United States Patent Application Publication US 2026/0137732 A1 - sequence listing, part 7

SEQ ID NO: 4 - DNA, 3151654 bp, Akkermansia muciniphila (residues 1,575,828-3,151,654 of 3,151,654)
  source 1..3151654: mol_type = genomic DNA
aataccatgcagtttacacacgaaatcgaacaaatgtgttgcgtcaagaaaggctgcaaccatggtccggcccccatcccgcaggaaggcaactggacgcaatccaaggagatcacggatatttccggcctgacccacggcgtgggctggtgcgctccccagcagggcacctgcaagctgacgctgaacgtcaagaacggcatcgttgaggaagcccttgtagaaaccagcggctgctccggcatgacccactccgccgccatggccgcggaaatcctgcccggcaagaccgtgctggaagcgatgaacacggacctcgtgtgcgacgccatcaacaccgccatgcgcgaactgttcctgcagatcgtgtacggccgcacccagagcgctttctccgaaggcggcctgcccatcggcgccggtcttgaagacctcggcaagggcctccgctcccagatcggcaccctgtacggcacccgcgccaagggcccccgctatctggaaatggccgaaggctacatcaccaagctggctctggacgaagacggcgaaatcatcggctatgagttcgtgcgcatgggcccgatgatggaaatgatcaagaagggcgtggacgccaacgaagccgtcgccaagtgcacgggcaactacggtcgtttcgacgaggccgccaagtacatcgatcctcgtcacgaatgagattgaattaaaaagagtatatcaacttcaagcactattaccatcatgcctcttttcgaatcctacgaccgccgcatcaagcagatcaatgaagccctggccaaatacggcatcggctccattgaagaagcggaacaactctgcctttccaagggcatcaacgttcgcgaaatcgtgaacggcatccagcccatcgcgtttgaaaacgccggctgggcctacgtggtgggcgccgccatcgccatcaagaagggctgcacgaaggctgcggacgccgccgaagccattggtgaaggcctccagtccttctgcattcccggttccgttgcggacgaccgcaaggtgggcctgggccacggcaacctggccgccatgctcctgcgcgatgaaacggaatgcttctgcttcctggccggccatgaatcctttgccgccgctgaaggcgccatcggcattgccaaatccgccaaccgcgtccgcaaacaggacctgcgcgtctgcctgaacggcctcggcaaggacgccgcgtacatcatctcccgcatcaacggcttcacgtacgtgcagaccaagttcgactatgccacgggcaagctgaacatcgtccaggagaaggctttctccaagggcccgaaggccgccgtgcgcgtgtacggctgcgacgacgtgcgcgaaggcgtggccgtcatgtggaatgaaggcgtggacgtttccatcaccgggaactccaccaaccccacccgcttccagcacccggtagccggcacttacaagaaggaatgcaacgagaagggcaagaagtacttctccgtggcttccggcggcggtacgggccgcaccctgcacccggacaacatggctgccggtcccgcctcctacggcatgaccgataccatgggccgcatgcactcagacgcccagttcgccggctcctcctccgtgcccgcccacgtggaaatgatgggccttatcggcatgggcaacaacccgatggtcggcgcttccgtagcggtggctgtggctgttgaagaagccgccaggcagaacgcctgagaacgctgttaaaattcacagagccgctttcccgatgaatggggaagcggctcttttttatggttgaaaggaaaaggcgaaaagcaaaaccggaactgttccggaagcttccgcttttgttcatatcagctcccgatgcggaaccttccgtcccggtccgtgcggggaggcaggccgcgagaaggcgcggatcttctggaaacaaccgtcggtctggccgcggctggcgtgacaatgcggatttccgtgcggccggaagctgcgggagcggcagatttcccgggttccgcaccgtgaacgggggcgggagcaggaacggcgccgacaatcagtttttgctgttcatgggccttgtaggcgcgttgcagggtaaagtccctccgttctccgggtttcagggaataatccgccttcttgctctccccggccttttgggccagaggctccacacgctgctgcaactgcgcggcggcgtccagcttcccggccacccactccggattccattccggagttgaacttttcagggactgaagcagctccgcggcttttttgccgctttccagggctgccttgtaattgccttccttctccaggcgcgcggcgcgcgtcagggaaaggttggcttcgtaaaatgtgtctccgggaccgcccagggccgttgttgccgccaggagcatgcagagcagggagcagggtagaagatgccttttcatgattgttggcactatagcatgcacggctgttttggaaaggcctttcttccggcatgtccgcatggagcaggggagggacgctacatagaggttccggaaaggaagcgggcggccttcttctttttttacgaaggaagtctatcaaatttgcggctaggcatttgaaaaacctcctgcgaggtacggatacagtgctctttaataacgtgcccgcaaatgcatgtaccttcttcctcctgcaaaaatgtttccacgtgttcccattcctgcaacgcggacgagaaccgcttggattcggacttagctaccagctctgagcagaagtgatccatagatgaattattcatgattttatgttctattcatgaggcgtgcgtgaatgcgccctcactattcagggaaattttcaaaatgtatttccccttccatatatttccctcccgtctctttcagcaggcgcgggtttcttccttattccaagagcatatcttccatttccgtatccggcacaacttgacggaaaggccggagtgccgtatgctggttgagacctgtatatgacccggaacgagccatcatccctccctgcgccgcagatggaggaagatcccagatacctgacggaacagattgtgacgtatctgggcaacaagcgttccctgcttcacttcctggggacggggctggaacaggtgaaaagccgcctggggaaggacaggctgaaggccggggacctgttttccggcagcggcattgtagcccgtttcctgaaaaagcattcggaagagttgattgtcaatgatctggaagagtatagccgcgtcgttaacacctgctacctgagcaatccggaggaagtggagaatctggagctggagaggcattaccggcgtctgctgcggtatatggagacgcatgagtccccggggttcatcacggagttgtacgcgcccaaaaatccggacagcatcacgccggatgaccgcgttttctatacgcgccgcaacgccgtgtacctggatacggcgcggcagaccatcgatttgcttccggaagaggttaggccctatttcatcgcccctcttctggcggaggcttccgtacatacgaacacatccggcgtgttcaagggattttacaaggacaggcacggcgtcggcaagttcggcggaacggccggcaacgctctttcccgcatcctgggggatatttctctgccgttccccgtgttttcccggtttaactgccggttttccatccactgccgtgacgccaatgaactggccgcagaattgccggagatggacgtggtgtacctggaccctccctacaatcagcatccgtacggttccaactatttcatgctgaacctgctgtcctcctatgagaagccggcggaaaccagccgtgtttccggcattcccgcggattggaaacgctccacgtacaacagccgccagcatgccccggcggccctgttccggctgctggaggactgcccggccaagttcattctcctttcatacagttcggagggcttcatcagttatgaggagatgactaatttccttggccgtctgggacatatcgtcacgctggaaaccccgtacgccacattccgcggcagccggaatttgaggaaccgtccgcagaacgtgacggagttcctgttcctggtggaacggttttaacgggcaggggaggtaacaccatgaaaacccatctggaacgcttcatccgttttctggccgcagagaaaggcttgagcgccgcctaccagctttccgtgaggcagacgctggaggaattcgcccggtttctgggtacggaagacgctgatctttcccatgtggatatcggcacgcttacggagttcctccggcatttgcaggcccgcggcatggcccgcagctccatgcgggtggaaatggtgcatttgcgcatctttttccgctggctggccgggatggggatgctggaaaaagacccctccgcctttctggaaatgccccggcaggggctgtcgctcccccatgtgctggatcagcaaaccgtttcaacactgcttgaaagtgttgacgttcaggatattcctctcggctgtagagacagggccctgctggagatgatttacgcctgcggcatgcgcgtaagtgaggtaatcagttgcaaattagagagtttggatatggatgatgcctttgtccgcgtgctggggaagggggagaaaacgcggctggtgcctgtgggtaggtccgccttggaggcgttgaggacgtatctggagaaagggaggcccaggctggtcaagccggggacgaaaagccatattttcctgacggtgcgcggacggccgctgaccagggaacgggtacgccagattctccgggaacgcgccagggccgcgggaatagaacagcatgtcttcccgcatatcctccggcattccttcgccacgcatctgctggagaacggcgccgacctccgcatcattcaggaaatgctggggcatgccgatatttccaccacccagatttatacgcatctggaacagcagcggctgaatgccattcatcaccgcttccatcccaggggataataaagctattctcatccatgtgccttctgcgggcatatatcttttaaaatcaaagtccagtgcgtttatttcactagttccatattttgcattacatatattatgcgaagtattaaaacaaggtgaatctccgcccgtttttccttcttcttcgagtttttacactcccccggctcattagaatcagccagaaggggtttgcggcaactggacaaatattggactgagcgtttgcgaagagttatagaatgaatagagagtacggcttttagccgagtattgattcagaagcctgcaacgctccagattgctttttcactttcctccccatttcccgatagctgctctcttccggcaataagagcattgctgggattttcatacgtcgcttcctgctgtccgtccacgcggctgtacgaaggccgggaaaccgctttgcagttggacggaaagcggaaggcttgaagcctgaaagaggcacgaatcaaacctccgttccccagggggactgtttcctgtcaaaaacatgggaacattccctgcaccctgtattttccagtgggcttcacttctgggaaccagagcctcccgtcctgattaaatttctccattcaaaggggttttcagtattgccaacctttcttccatccccatccgtcgctgaaaaccccgtctagccgtcctctcctgctttgaagtattctccataaaaataaaaagtctctcactggctaacctattataacgcggcagaaacgggaaaattccttttccctccttaaaatttcatccggataccccttcccctcgcttctctcttgccagaccgtcattcatccgtcataatgaaaaaagcatgaatactttcgtctctctttgcgtgatcggaggcctcagcctgggctccctctgttatgcgcagcacatggataacgatgccaagaagaaggtgatcaaggatttggataacctgctcgccctgaacaggtctgcggaaaccaaggtgatcaatgccgccatcagcaagctgaattccgccggcagggatcccagcgccgcgtacgacctgctgatccagtccaaaaagttcctgatggaagcggaaaaggagaaggacaagagccagggcaagagcgccaagattgcctctaattccctgaaggactggatggaccgcgaggccaagaaataccaggacaagaatgcccgcaagggattgatgcttcaataccagtggggcgtgctcgtcctcaaggcccgcctcaaggaaaacctgatgaacgccacgtcaagctccaccggcggaacggaggaggagactctggacgttacggagttccagaagccggccatggatttgctgaacgcctacctagccgcctgctccgaccctgattttgtcgatccctcttccacttcttccaaaaataacaatggagggggagccgggaaagccggagcccgcattgcggaacaatccgttttgaatacggaggtcggggaggccctgggcatcggcagcatgtcttccaaggcctttccggattccatgaaaaaccgggacgagattttcgacaagcttttcttcacgggataccggaagacgcgcaatcttcccgccctccggcaggcatggggcaagagaatttccatggaagtggctctcggcaaggtaagccatgccatttccaccggcaagaaatccggcatgcagggacgcattgccaatgcgtccgaagacgagtttgacgaacaggattcctccgtcctggaccgcctgcgctggcgctgcgaactggattgctttgacctgggcgaccaggcgaacgccacgcggaacatgatgactctgatccggacgacggtagacccggtgcgccgggaacaaggtatccgcaccctccgggacaagctggtccagagcatgaagagcatgatcgcttcctcggaagatgaaaccatggcggacggttcttcctcctcctcttcagcctcccctcgtcccgcggtgcggcctcccagaaggaagacgccgcccaccacgatcacgaccagccgtgaaatggacgatcccggagccatcggcacggatgtgccgaagccgcccaagccggaccccacccgtagcgacgatttttttgaagacgcataacgcttttcagtaaaggctgttgcctgcacggcggctccggagttgatggaatgcacagagcatccttgacgtccggagccgctgttttatacagtagggccatgtatcagccatttcaatttttcatgcccgcgcaaattttctttggcgcgggttctttggacaatcttggttccgctcccctgcccggcgccaaggccctgattgtcatcggcggcacgtccgtcaggcggctcgggtatctggaccgggtgcaggctttgttgaagaaccagggagtggagagcgtcgttttcgacaaggtgcagcccaaccccgtggtggagcacgtgatggaggccgccgcgcttgccagggagacaggctgtgatttcgtcgtcggcctgggcggaggcagcagcatggattccgccaagagcatcgccgtgatggctgccaatccaggaacctactgggattacatccagggcggttccggcaagggccttcccattcccaacaagccccttcccatcgtttgcatcaccaccacggcagggaccggaacggaagcggatccgtggaccgtcatcacgaaggaggatacgcaggagaagatcggcttcggcttcaagggcaccttccccaccatgtccatcgtggatccggagctaatgctttccgtaccgcccaaattgacggcctaccagggctttgacgccctgttccacgccgtggaggggtgcatggccacgattgcctctcccatgggggacatgttcgcgctacaggccattgaatacatcgccaaataccttccccgcgccgtgagcaacggggacgatctggaagcgcgcgcctacgtcgccctggccaatacctattccggctttgtggagaccatttcctgctgtacgtcggaacactccattgaacacgccctcagcgcgttccatcccgctctcccgcacggcgcgggcctgatcatgatttcctgggcctatcatgaagcctatgcccccgcctgcccggaacgttacgccagggtagccgccgccatggggcaggaagcttccgtggacggcttcctgaacggcctgaacaagctgaaggaggcctgcggcgtggacaaactgaagatgtccgagttcggcattaccccggatttgtttgacgaatacgccagaacggccttttccaccatgggcaacctgtttgagctggaccgctgcaagttcactccggcggacgtcgtcagcatcctggaaaagtcctattcctaggagcgggtaccgccgacaggataaacgcggacaggctgcgtgcacaccaggcagccgtgcggcagcctgtccagccagcaggaaattttgtccaggaacatttcaatgcgttctgaggtgtctacgatttcaatgatgacgggcaccttctcgacaatttcccagaatgtggggctcatcaggcgcgtatgccgcccggcccccatcagtcccttgtacacggtgcagcccgccatgccgtagcggcgggtggcgtaggctacggcctcgtggacgggtacgtgtctgacggtgtcggtgctgctgacgtagatgcgcagcatgaggttttcttccggagtgttcatgattgtctcttatctggcggccaggtatcccaggccaatggcaatgagccctccggcaaagctgaggagggtgtaaagaaagaaggcgggaaagttcccctccttcaacaggaggaaggattcattcatcagcgtggaaaaggtggtgaagccgccgcacaggcccacggtaagaaaaagccgcgtttccgtatgcagcagcagaccccggctgaacagcccgtagagaacgccaaggaccaggcatcccagcaggttgaccgccgtcgttccccacggaaaggaactcatggagttgatttggacaaaacgggtcagcaggaagcgcagcacgccgcccgcaaagcttcccagcccgaccatcagcagcattttcatcatagcggcttttctccggttgaacgggaataagactccgggcgagattccaggaatgccgttgccggatgctgccgggaaaggcggcagaaggcggaggaaattggtgtaaaggcgttcatgttcgtatgggggtgtccttcaccgaatacaaagcttctgcatccggtgtgatacagaagccatcagcctgccgtgcaggcggtttagggtgcgttcccagggaagagcctcatttcctttaagcgcgtacaagtaaaataacccgttttttccatatctccagccttttattcttgatcccggcgtttgaatacgtatttccttttttccatgtcccagcccctccttgtcaccggaaccattggaatagacaccatcctcactccccgcaaccgggcggagggagttctgggcggctcggtgtcctttgcggcggtggccgcactgctttttgcggaccgggtggacgccgtcagcatcatcggagaggatttcccctcccattatgaagaatcccttgcggccaaggggctgtgcatggacggcgtggaacgcaagaaggggccttccttttcctggaccggggaatattttgacaacatgaacaagcgcaggaccgtctgcgccaatgatgccgtgatgctggaatggaacgtgcacgttccggagtccttgcgtaaccatcccgtcctggtgtgctgctgcatggttccggcccagcagctcaagtgcatggaacagtgcccggacgcggcactggtgctttccgattccatggacaagtggctgcgccgccagccggaattgctggacgccgtcatcagccgctcccatatcaccatgatgaacgaggacgaggcgaaggagtacgcccaggcgtccaccgtgctggaagccggggaattcctgctttccaagggcgccgcatatgccgtggtgaaacagggggaatacggcgccacgcttctggggcgggattccgcaggcaatctgcaaattttccgctgtcccgcctatcccctgaaaacattggtggaccccaccggggcgggagatacgttcctgggggcgctggccggctacctggccaccctgccccccggccttccatcctttgaggaagtgaagagggggattgtgtacggcacggtggcggcctccttcacctgcgagtccttttccgcggacgccctcctttccatgacggaggaaaccttccgccggcgccttgaagagtatgcggagatgtgccgtctgcccggcgtgtcttgctgatgcggcagatagatgcgcatccgccgcccctgggaatggggggctccttcccctcatgattcgtcaaattgccggggtttggttccggtctccgtggtgaagccggctctggcttttctgctttccctgttgcacgcgcgtagcagcccttattcccaggagggaccaggagaaaagcggccaagcgggatgcaggacatggaaaaccccggcgtgacgagcacgggccgggggttccataaagacagggaccggtatcagccggttcagatgtcctggaggccgaatttgagttcggcttccgataccacctggccgttcaccaggcagcggccgagggcctggccgatgttgccgcgcatcttggtcagctccgcctcaatgatgagcgtatcgccggggactacgggacggcggaatttgatcttgtccgcgctcatgaagtagccgagcttggtggcgttgccgggctggcgcagcatgacgatggaggcgacctgggccatggcttccagctgcaggacgcccggcatgaccggatggcccgggaagtggccctggaagaagagttcgttcatcgtcaggttcttcaggccgcggcacttggtttccccttcaaagccgatgatgcggtccaccatcaggaagggatagcggtgcggcaggaggctcatcacttcattgatgtccagcacagcgtctccgtacggcacgttgacgggattgggcgccatctgctggttgcggcggtgttccttcttcagcttggcggtcagctcggtgttcgggccgtggcccggcttgatggcgatcacgtggcccaggatgggcttgccgcacaggctgaggtcgccgatgaggtccatggccttgtggcgggcgaattcattgatgaagcgcatgggctccttgctcatgagctcctccccgcggatgaccacggcgttttccaggctgccacccttgatgaggcccttttccagcaggggcttgatgtcctcgtagaacgtgaaggtgcgggccggggccagttccttttcatacgtttccggcgtgatgaccgcgtcaaagtactgggtgatgcggttttccggtcccacgcaggtcacggaaacgcggaattccttggaggggaggatggtcaggatggaaccgcccttggtttcaatggtgacggcctcgcgcacttccagatagcgccgcggcacttcctgctccacaatgccggcgctcttgatcagttccacgtagggagcggaggaaccgtccccgatgggaggctcgttggcgtccatttcaatgacggcgttgtcaatgcccatgcccgtgagggcggaaagaatgtgttccacggtgtgtaccttgacggagccttccgccaggctggtggcgcgctccacggtctgcaccttctccacgtccgcgttgatgaagggctggtccggaatatccacccggcggaatttaatgccgaagtcggcgggggccggcttcagggtcagggtaacgggctgtcccgtatgcaaagaggtaccggccagagaggccggagagccgacagttctttggtttccacatgccatgcggggaatgctagtgaatgagctcccgtttggaaagcacgaaatcacggattttcctgtaaattcagggaaaggagggcattccggcgtgtcatccggagagggagcggagaaagggcgcttgaaaaaacgcctttctcccgttagtcatgttgcatgcacatcacagcaggtcccggcatttcccgcgcattcatcctcggcgccgggctgggcacccgcctgcggccccttacccacgtgctgcccaagccactgattccctttttccatgagcctctcgtgctgcattccatgcgccgctgctacgactgcggcatccgggagttcatcatcaatacccaccatctggcggaagcctgggaccaggcgttcccggaacgctcctggaacggctgccccgtccatttcagccatgaacccgtgctgctggattccggaggcggggtgaagaagatcgagcccctggcctccgcggaagaacccctgctggtgatcaacggggacatggcagccaccttcgacctgcgccgggtgatggaggaccatgtcaggcaccgccccgccgtgacgctggccctgcggacctccggggacaagaggaacgtgggttttgatttttcctccggccaagtgacggacatgcggcacgccctggggcgcgatccgggcgcctgccagtttaccggagcctattgcatggagccggaggtgttcggccgcatccatccccgtgagatcgtttccatcatcccggtgtttctggattacatccggcaggggcgcctgcgcggcgtgctggcggacgacggcctgtggatggacatgggcactccggaatcctacatccaggcccatctggactttcccttccctgctccgcggatccatcccggcgcggaagtgtctcccggagcctccgtggacgctgccagcgtaatcggcccccgcgccgtcgtggaggaaggctgccgcctcagggagtgcgtcgtctggcccggcgcccgcgtgcccgcaggcacctgtgcggaacggaggatttttcatctatccctttgactgtcaaccatgccttttctgcgtcttctccttctccttttatttttctgcggctccgtccaggcggagcaccgcgtgttcaccagaaaagacggcttcctgtccatgcgggacaagctgaacgtctattttttccagtctgacacgcaccgccttctggtgcgggatgaggggagcgtccgggagccccggtacggctccctggacaaggccatgcgcaagagcccctgttccgcaggcgtcaacggcggattcttcggcgcggatgcggagggaactcccctgggcctcgtcgttcaggacggcaagcgcctctctccgctggccacgggctccttcgccgtgtccggagtggtgtatgacaacggaaagaacggcttgttcctcatccgcagctccgcgctgaagcgcatgaaaaaactgcccgccatgcaggcggccattcagggagggcctttcctggtggagaacggcacagccgtcaaggggctcaacgcccggaaatccacctaccgcaccttcatcgccacggacggaggcaagcggtggtgcatcggcgtatcctcctccgtcaccttgagggaactggcggagtggctggcgacccccggcgcactggggaatttccgggtaaagacggccctgaacctggacggaggctcatcctccgccttctggtgccatgagtccggcatttcctatcccgcgttcaagcaggtcaggaattatctgggcgtggcgcccgctccgcgccggtaaacgccgtcctttacaggtgcgccatcgcgttttcccgcgcctgccctgcgcagcagcagagccgcaaacagcaggaagcaggccagaacggcccagtcacccagcagggcgtacagggttatctccgtacagcccacgggcagcgtggcggtcattacccccctggtaaacggggagccggaggagtccctcaaatccgcgataaccgcgccgttgggcgccagcgccacactgacgcctgtattggcggcgcggaccatggagcggcgcagttcaatgcaccggaacgccgcgttgcgccaatgctgttcattggcgcaggagcggttgaaccacccgtcattggtgacgttcaccatcaactggggttcctgccgcacgaagcggcgcacccagcttcccactacgtcttcaaagcaaaccagcggaatgactcctaccgtggcggagctccccgggcgcatgggcacgggcacggggctggaggaggcgcccggcgtgtagttcatccccattgccgttccggcggaggcttcaaaggccttttccaggaacgggaaggtttcccgcatggggatgtattcgccgaaggggaccagcatggccttggcgtgcggcctggccgtggaatagtccccttcaaagacggtgaggcagttgtaggcccgcgccacgcggccttcatcggacaggtaaatgtcatccgtgcccgtcagcaggatgaaattgcatatcccgttccggagggcctggacgtagtcctcctccacgctcaggaagttgacgttgtcctggttcggaaagcgttcccccgtggaatcgcggtaaaacgtggaaatggggaaggaactctccggccagattacccaggccggcatgtccagggaggcttccgtcccgtttttggcggcctgttccagggcgctgttctggaggtccagcatcccctgctccgtcgtgtccagcagagcccggtaaatggcgccccggttggccgcgtcccatttctccttctggctcaggttaagctgcacggtcatgacgggaacggtgaatttgccgttccccgtggctgcggcggattgcggggagtagcgcgccgtccagagcacgccggtgacgaacatgattaagagaaccgctaccagcgtgaaaaagtcccacggaacggtgcgcctgccttcatggaccaccatggttccggcccggcggcagacgcgccagagccagacggaaaagacggcagggaggaaggccagggccgttacccccgcatattccgcccactgggccagcggatttccgtaaagggccacgcccaggttgttccagccgaagccgggtatgagccagcccctcacccattccaggcacacccacagggccgccccccccagcgcggcggaagcgctgggcagcatgtcccccacagcccaggatttccacgccgtcctgcgttccttcaccgtctgccgcgccccgggcagcggccgagcgtccggacggaaaaacacgcccatgaccagcgcccagatgccgggaaacaggccgccgtaaaatatcatcaggggaatatagcccagcgtgctgacttcattgacccaccagaaggagatgccgtaaaacaccacgccgaacatccagccgtacagggcatacgccaggattccctttttcccctcccggcggcggccgtaccacagcgccgtcagcaacggcagaaaacctatccagacacagcctccccagtccacgggaatgaaggcgcaggccatcagaacgccggaaaacgcagccagcagcaggcccgcccagacgggcaggagacggggagtgggaggggaaacgggattcatcgtaaaaagccttttattccaggcacgggaatggcggcattgttcctcatgctgactcattcctgcaacaaaaaagattgcaaaatttgctcaaatgcggaaatagtgggcgcagttcatacaacccatatacataatggcagacatcgacgaaaaaacacctctaaacgtccccggcaagttttacgtggacagctcctgcattgattgcgacctttgccgcgaaacggctccggaaaactttggacgggatgacgacgaaggcgtctcctacgtcaagaagcagccggacaacgaaaccgaacaggaagcctgcgtggaagccatggaaggctgccccgtggaagctatcggcgacgacggcgaataatatattctccatattattttttaaccgcccggggctgttgacatccaacactccgggcttttattttccactcatggcttctccctggtctccctacatgccggacagggaccgtccggaccccaacgcctccccgccccggtatgaatacctttcccgtgacgaacaggaggtgaggcaggcgctggcggactggttccaggtacctccctccaccagtgaaacacggaatctccatacagcggagtccctgctgggagacatcctgtccaagctccccctggatggagaaggcatggaccccgagctgctccgggaaggctggctgaaagccgcggggccattcctgggccagcaatccaacctgctttccatcgtcaagggagttgccaccattcaggtgcttcagccggccatgcgctaccacctccagcagtggcagggcgccctgctgggaaaattgaaggaccagttcggcaaggatgccgttcattccatccgcatccggatagggtaattccgcgtgaagcaaggctttctcttgctgccaatcacctgattttcatcgcactaacaggtattggaatacgtttcagggatttgcaatccgctgtcaaccggttttttccctcgcttgattcatggtcaggatcttcccgtgcaccgcctcttgtttttccagcggggaaatagcgggaaataaaatgttagatatatttatcattcatttattgtaagaatattgtccgttttttactgttgctgtttctttagcggattgcaaattctgtagtttcatggcgaataaagcggaattcgcgccagtgcggagcggcctttccgctttccaacagaaattacatataaatgaaaacgtcctttttcctggcattacccgcagcggcagttctatcggcacacggagcggaggcgtggagttcccttgacggaattattccggagctgaagatgggggaaacctccatcacccgcatcgattattcctccggaggcgccctgatcacgaacggagggccttccgcaagcgccgttcaatccgtccttggctctctggatgcgggatggtattccggcaacaagaataacaatgacgggacgcttgcctccgtgacgggagatggcgccgccaagctggtttccgcctccggcgcaggaggaggatttacggccgtcaaattcaatgaattgtccgccagtaccctgtccgggtatgcagccctgaggatttcctttgatacaggagggctttccaataccagcagaacggggcagccccagaatttcagcttgtggtacagcctggggggagaggaaaattccgttttccaggctggttccacgatttccggcctggcaggcaacgttaataaccaatcctatagctggacggtttccaacgatgaatacggttccctgttcgaccagggggccaccttttatctggtgatgaataccgatgttcttaacgccaactacgcttatcaggagcttgccgtgaaaaatttcagcgtggagggccttccggtgccggaatcttcctcctgcgccgcggcattgttcggactgggaggcctgtgcctgaggagaaagcgcggaatccggtaaagggaaactgcctcattttatgtttgatgaaagacagtcccgcatgtgaatgtagtagtaataccatgcgactaaacccttccctccttttgctggcatcaggcctgttgctttgttcccgtccttcctatggagactggacttccccgcatccactccagcaggaagaagccgctccggcagccctcattcccttcccggcccatgttgactggaagacggggacatgccccaaaaaggctcccgtttccgtgaaaaagaacgcggccctggccaagacgctgggcaaggaaggctacgagctccaggtgcgccccaacggcatcctgatcagggccgccacggatgcgggtgttttctatgcccgcaggacgctggaccagctgggagcccggggggattatccgtgctgcgacatcaaggacagcccggcgttcgccatccgctgcttcatgcacgacgtaggccgcaatttccggtccattgagacgctcaaggcggacattgacgaaatggcccggctgaaattgaacgccttccactggcacctgacggattacccggcatggcgcatccagtgcaggaagtaccctgtactgaatgacccttccaagaggatcaaggaccgggacgtcaatgacacctactcctacgaccagatcagggacctgttccgctacgccaggaaacgccacatccagatcatcccggaaatcgacatgccggggcacagcacctatttcaagaactgcttcggcttcccgatgcacgaccccaggggcatcaagattctggaggaactgctggaagagttctgccgggaaatccctgtggagatgtccccctacctgcacatcggcgcggatgaaatccacattcccaacgggaagcagtttgcggaccgtatggcggccaaggtcaaatctttgggacgccagcccatccagtgggcgggcaacaacgacctgcccgtctccggagacagctacgcccagttgtggaatgacgaaaattccgtaggattgccggaccccgccaagcagaagaatccctattttgattccacggcaggctacatcaattcctttgaccccggcatcctggtgcgccggaatttcttccgccagccctgcggaacggccaggagcgacaaccattccctgggcgtcatccaatgcctgtggccggatacccgggtggcggacaagaagaacatccccatccagagtccccagtggccggccatgttcaccctggcggagcgcagctggaaggggctgccggaggacggttcccgctttgccggcaacctgccggagaaggatacggaagcctacaaggctttctccctgtttgagaaacgcatggaagccctggccggggacaagcccttcccctattggcgggattccttcatggaatggaccgtcttcggccccgttccaaaggacagggaggaagaagtgagaaacggcctgctggcgggaaaaacccccgcagggctggagcccatccaggcccgcggcggcaatctgtacttccgcacccgtgcgggggcggaaggcctgttctccaaaacgaagccgggaaacaccgcctgggcggaaacgaccctttatgcgcccaaggccggcaccatgtacgccatggtggggtttgacgctccggcccgctccacgcggcgctgttccggagtcccggcagccggggaatggtcccagtgcggcaccagaatatgggtgaacggaaaggaagtgaaaaatccccagacctacaagctggcaggacagcggcgttatgaaaagcacacctggaattcccccgccaatgaaataccctttgacaatgaggaattctggtgggcgcgtccccccgttcccttccaggtgaaggccggagaaaacaaaatcctgattgaacagccgtatacgggcagcttccagtcctggggcatcagctttattccggtgaaaaaatcgggagaacgctggattgccgatccaggctattccgtcaagaccgggcctgcaaagtaagattccattttttgctgaaatgaaagaaaaacgcctgcttcccctgctggccgtccttctggcaattcctttcaccgcagccgcccagcggcccaacgtcatcctgatcctgatggacgacatgggctggggggatctgccctcctaccaggaccagcgcatgaaggagggattgcccgccatggacaatcccggactgagaacactggccagcgaaggaatgacgctgacgcgccattattcctccgccccgctttgcgccccggcccgcagctccctgttcacgggggtgcaccagggccatgccaaggtgatccgggacaggtcctttgaccttcccatcgaacaggccccaacgctcggcaccgtcatgcagtccgccgggtacaggacggctctcatcggcaaatgggggataggcggaggaacggaacatgcgggcactccgcaggaatccacggcctaccccaccaaacgcggctttgactactacttcggctacctggaccacgtcagcggccaccaccattatcccaaggaagaccccaatcccatttcccccaccaagagaagcggcatctgggacggggacaagtgcgtcacggcggattgcgacaaggcgtactccgtggacctgctgacggcccgcgccaaaaaatggattatagatacgcaccgccagaatccccgccagcccttcttcctggcgctgacccacgtagccccccactcccagctccagatccccaccggcccctatccggaaggccgcggcgtaaagggcggcgtgcaatggctggggaagccccacaagctggtgaataccgcggagggcaagatcaactcctacatctatccgcgctatgcggacaagaaatggcccatggcgcagaagaggtacgccaccatgatcgcgcggctgagcgattcctttgaagacctcatccagaccctgaaagacctgaacattgacaggaacaccgtcatcatcatgacgtcggacaacggcccgcatgacgaaggtggccagaatccgcagttcttccgcaattacgggccttttgacggcatcaagcaggacgcgtgggaaggcgggttccgcgttcccaccatcgtccgctggcctggccgcgttccggccggttccgtcagcgaccatccatcccagttccacgactggatggctacgctggccgccatcggcggcgtcagggctcccttccggagtgacggcgtttccctgctccccaccctgctgaacaagggaacccagccggacagccgcctgtacatggaatacagcgccaagatgtcccggagcaagacaacgacgcccggctaccaggattttctcccgtccaggaggaactccgtccggggcgaccagcagatggtctacatcggcaaatacaagggggtgcgtaccaacatccagtcccatgcggatccgtttgaaatttacgacaccgcgaaggacccggcggaacgccatgacctgaaggacacgccggaagggaaaaagatgcagcccatcatgcacgacaaggtgctgagaatgaggcgaatttacgattatacccacccggtgcgcggcacctttgcccagcggccctatgatgcggaacctgttccggccctccggaaagaggaaatgcccggcaccctggttcccctgacggcgcagtcctcccagggcgtccgccggaaggacggcagcgtgaaaagagagctttatctgaacgttccggaaaccgggaaatacgtcttcttcatgaaaaccccggcgaaaaagggagctaaagcgttcgtcaggctgcacgacgcgcatctgctggatgcggaatacggctacaagcccggcgcggaggtatcctcctccatgggggaaggaacgacggaaggagatgcaggaaaaactgggctgaagcccatcccgctggaaaagggctggcatcccctgttggttgaaacggaaggcttccccgggcttcccgaccttttctggcagagggaaggcggcaggaaagaggccattccggtccaggccttccgcacgacggctccctgaacggatggggcgaaacgtccgcgccgcccctgaggtcattttcccccggtcatcaggacgagggcgcgcgggaaataccgtttgaggaacaggtaaacgccccgtgccagcatgtacacgacaggcaccaggcaccaccagacccagggcgcccacggggacgggaagcacgtttccacccctgtcagggcaatcagcacgaagatgtgggaacagtacacgaagaagctgccggacgaccaccgcgccagccgttccgacagtgcggggctgacggccctggccactattccgaagctcaggaaggccagaacaatcagtccggaaaaagcaacgtccggaaccaggaaggtatccgcacagcttgcccagacaagggccgcagaggccagaataatggacgcgtgcacggccaggggcatgttcccccagcggtccaggcaccccggtgcggaagacgccagcatgatgccgagcacgaagtccccgaacatatagggactgggccacgccagggtgtcatcccaccggtgcaggaacaggcagaacaggccgagcgcgtaaagcgcgggacgccagcggtgcagcagaaacgccgccagggtaaaaatcatcaagtcccgcaggaaccacatcggggtcagcatggggcatgttcccaccccgaacacggaagccggcgaatcaggggaaagaggcatgcccgctaccagccagtaggccgcgcaccagaagaggtacggccacagcagggacagcaggcggcctcccgtccattttccggctccgctcccctccaggcgggaggcggaaaaatatcccgccagcaggaaaaacgtcgccagcgccggaccgatcagccattcgttgggaagaaaggggccggaaggcacatgctgcatgacgacgaccagcgttgccagcagccgcgcagtctccacccagggcaaacgggggcgaacttctgcgccggataagggggagatggtcatgacggggcccattctggatgatcgctctgaaaaagcactatttttattatgtgaataaccggcctgtcgttcgcaaggctttcaaatgctttcacaacaggcacgcatgaaacaggcgttttcccatacctgctttcttatgccgaaggggaagctggcggcgtgtcaattcaatctcatgtacaagagcgggtaagggtttccctgctcgtcatgggccgttcttttatggacttgaaagcccatgtattcataaaaacctctggcgagcggattttgctcgttcacggccaattcattgatggaataagcttcgattccatattccaccaacttcttaccgaggcctttcccccgttcttcgcttgcaatgaacagcatttcaagtttctggccgccaatccccatcaggccgacaggaaattcgttttcgttctccgcaacgatcagatgaggtatctctcttaatgcttgcggaatgtattccttaatattttctatttcgctgtccggcaaaaacaggtgcgtctccctgacagatttttcccacagttccatgagctgccgtatcagcaacggagttctttcctggatttcaatgattctcatattccactaaaagctgtcttcattaataccggccataccttggcgtgcttgcgcattggcagcacttctacctgaccggacctttacaaaatcccgtactgctccgcaaccaggccccttatttcatcaaaggttttcactgcgggaggattgtccgggtgggctcccagatgtttttccatccacaccatatggtaccagcggccgaacttgtacccgcactgatgaaactttcctgcgaattgatatcccaaacgttcgtggaactgcacgctgtcccgcccaagccaggggtcttccgcctccggacaggcaatgcaggcgtttagattcaggatattctgcaaggaaagaatcttttccagcgctgcgtacaattcccgccctatgcccatttttttccggtcttcccggacgtaaaccgtcgtttccacggcccagcggtacgcggcacggttcttgaaaacgccagcataggcataaccggcaatttccccttccctttcgcaaatcaggaaggggtatttttccagcacatggccgattctttcctcaaattcctgcacctccggcacctcatattcaaacgtgacggctgttttttccacatacggagcataaatttcaagcaactttgccgcgtcccgccttgtcgcaatcctgatggtatgatgatttttcatcctgctccccgtcttttccgattgatctccctgggcccaatgccgccattctaattatttcacaggcaactgtcaatgttggcgcctccggcagggaaaacacggcccggcgacaagaaagccggataatgtgcctcgccagcttccagccgctggttcttccgtcattccttccttttaacggcaaaaaagaggtccatggaaggatggctgcgaatacttttttccgtatggagttcgtactccatgttcagggccccgtatgggctctgcgggagccatttttggtaaaagtaccttttggcggctccaatggccgcgccccataaaaatcccagccggggcctgaccgtcattccggcatattccccagggggaagaaacgcctgctccagcccgtctttttcaagtgcgccgcccacaaatagttcaaaagaaccattccggccatcatagtttctggacagaacaaagaagggaagcacgcttccccggggcacggaagccagggaatgataagccgctgaaagggcatggatatccgcggagatcgtttgatcgccggattgcctccctattccccagatggcctgttcccccagggtcactatttccactgccggttttgacatgccggtttttctcctaataaagttccgtttttccctgcccgcttgaaccagtgcgcccagtaatgaacatgctgccctgcatccattgcggcaacagtataaaccgggttttccacggcccttcccctacgtttccccggtagaacgaacgcccgcaaaaaggccggattccccgcggaacccggccattggaaaggatacggcatcgtgccggtccccggctcaggaataaaacccgatgtccggctcacgttcctgccgcctgcgcttgaaatacgggttgcggtagcggtggatgcacttgctgggggcgccgggagtatagtggagcgggtccgcctccttggcggcttcccggcccagtatctccacaaagtccttcagagatatttctaggtctgcatcgtggcatgccagggcggcggacaggcgcaccttcccgttgtcatagtccacgtacatggcaaacagcgtggtctggtacagatgccacggttcgctttccaattctccggactggtgctggctgatggcctccagcagccacgtcagcgcgtgttccagttccagattgtccagaacatcccggatgagggacgtttcatggccgaagacggccacgctttcctgttgtcttgccctgttgattttcatgtcttggttctcctttccggtttcccttgttgagcggggacggcggatggctctgccgctccaactagcttggacactttttttcaacaggttgttcaatatgaattcgggaatttgtcagcccatgtccactttcccgatgtagggcaattcccggtaacgctcatccaggtccatgccgaagcctacaagaaattcatctccctgcgtaaaacctacgtagtcagcttcaaaaggcactttccggcagcagtgcttgtccacggccacggcggagagaacctgccgcaccccctgccttttcaattcccggcaaacttcagccagagtagcgcccgtatccagcacgtcatccaccaccagaacgggcacgtcaggccggaacggcccgcagtccccatcccatgccacggagccggaatgttccattccggcgtagctggtgatcttgacggttttcaccacgggccgggatttcaaatgccctttcagcatcgtggcgaaagggatggcgccgttcagcagcagcagcagaatatagggcctgcctgccatggccgcgtcaatggaggcggccagttccttgacgcgcgcgcggatggcttcctctccaatcaggggtgtgatggtgtaagtcatggaaacggaagcatgatagcgttctcccacaaggaaatcaatccttgaaggagaacggttgacggcggaaaatgcttccggtatgttgcggctgagatgatcggcatcccgaactaccgcatgttttcagggtttctcctggtgattcttccgctgctgtggctgggcgcatgcgcttttacatggattttcctttccattccaccccagccggaagttatgggagagagcatgagagccgttttctcccttttcgccccgtttttaagcgtgggaatcctggcggttctgctggacatctggttcggcaagaggatttatgaagccaggaacggctgggtgcatgcggaaaaaaggctgttcggcctgcgccgggatgcttttgactatgatccagagcttttgtcggaatgctccgtgcttcatgtggacgagcatacaccgttgagcggggaagaactggaacggctgaggcatgcaggcgccactatctgccgcaggggaagaagggggccgcaatatccggccccctgctgggtctgccgcctcgtttacgacggccaggttctcttcctgctggcggcgccttcacgggaacctgccgaccgtctggcggagttcatggcagccgtgatacggacacgccgggaaagaggcgcgtgatttgctcacagaccgcttccgccccgggaagcgcgggccagccttgcggctccggttttccgtttggcgggaaccggtagcggaataccaggtcttccggcccgtcccgatgggcaacaaggcggattttccgcagttccgccccgttccactgccggaacaggacgccgttgccgtccgcggccggccccagggacaacaggcgcatattcgtcagggcgtgcaggacggcgttggcccggcgcgtttccaaaaccgcgttgatcaaaagcatgccgaggagggcaataccaaaaaaacagcatattcccatgaccgccagcacgaacatgacctcacccgtccagaccggagcggacgccgctatgcaacaaccccagacccatgccgcggcaaagaaaaccgaaaacagcattcccttccattccttcgcggcccttctccaccatccgcagcgggattttccctgccacaggattttttctcccggcaacaggcgttcggccagtctgtcacgttcctcccgtgtcaacaattcctgcatgtttatcctctccgtttccgcctctataccagacggaaaggcggcttgcactccttttgttccgggaaatgccgatcagcaacggcgtagtattgaaatgagcgtcggcaaactttttcctgaaatccgttacgtccctgcggacgcgtgccgttcaatggcctccaggggcttgcggcgcttcatccggcagagggcgcggaggcgcatttaacggtagcctaccgctgggccgcatggtaaagtagggcagaaatgactgattccccttccaagcgcctttttattctggatggaatggctctggcctatagagcccattttgcctttttctccaaccccatccgcaattccaagggcgtcaacacgtccgccgtgtacggcttcgccaatacgctgctgggcattctggagcatgaacaccccacgcacatcgcggcctgctttgatacttccgcccccacggcgcgccatgagctttaccccgcctataaggccaacagggagtccatgccggaagatttgagctaccagatgcccctgattttcaggcttctggaggccatgaacattcccatcctgcgctatgaggggtatgaggcggacgatacgataggcacgctggcccgcatcgcggacggcacgaaggagttccagacctacatggtttcccaggacaaggacctgggccagctcatttcccccacctgctatttgtggaaacccggcaagcggggcaacgaccacgaggtggttgacctggagaagctcaaggaacaatggggcattgaacgcgcggaccaggtgatcgacatcctggccctcatgggcgacagctcggacaatattccggggcttcccggcgtgggtgaaaagacggccaaactgctgatcggggagttcggcaccgtggagaacctgctggcgaatgcggacaagctgaagggaaagcgcaggcagatcgtggaggaaaacggagccatggcgaccctttccaaacaactggccaccattgaccgggacgttcccctgaccgtgaccctgcctgaactggtcaaaagggatcccagcccggaagagctgctggccctccttcaggagcttgagttccgttccatgcaggccaagctgttcgggaaaaaagcgccggaagccaggaagccccccctccctgcggacgatttgtttgctccggcccaggcggaacagcccccggcggaggctcccgccgccccggcggcggacgcgcggcagaacggttccggccaaatggatttgtttgaggaacgccatctgaaaacggtggatgatttcaagcacgagtatatcattgcggatacggaggaagcccgttccgccatggttgccgagctggaaaagcatgattcctggtgcttcgacacggagacgacgggcctgaatcccctcacggacaagctgctgggcgtcgccttctgcgcggaaccgcacaaggcatggtacatgcctgtctccggtccggcggacctggaagcggtcaggccgcttttggaaggccctgcggagaagaccgggcaccatctgaagtttgatctggaagttttgcgcgccaacggcatacgggttaaaggccccttttttgacacgctgctggcgcacgccctgatcgcccccggcatgaagcacggcatggaccttctggcggagaacctgctgcaatattccaccatcaagctgaaggacattgccgcgccgggagccaggaagcgcgagctggataccagcggcattcccgtggaggtcatgggcaagtattcggcggaggatgcggacattaccctccagctttccgccatcctgaaaaagcaggtgaaggagagcggcatggaggagctgttccgcacggtggaactgcctcttctccccgtgctggcggacatggagttcaccggcatccgcgtgcttccggaatccctggaagaggcttccgtcaaggtgggagccattattgacggcctgcgggagaagattgaagaggccgccggccatcccctgaacctgaattcccccaagcagctcggcgatttcctgttcggggagctggagctggtgaagaagcccaagaagacgaagacgggccagttcgtgacggatgaagataccctctccgccctggcttcccagcatcccattgtggcggatatcctggcctaccgggagaacatgaagctgaagagcacgtacctggacgcgctgcccaagtacatctgcccgcgggacggccgcatccacacccagttccaccagatgctgaccgcaaccgggcggctggcctcccaggaccccaatctccagaatattccggtaagaacggaacaggggcgcctgatccgcacggccttcgtccccgcctccggggaatacaccatgctctccgcggattattcccagattgagctgcgcatcatggcggcgctttccggagaccccgccatgtgcgaggccttcaaggaaggccgggacatccatacggagacggcggccagggtgtacggcattccccgcgaccaggtggacgccgtcatgcgccgtgcggccaagacggtgaacttcggcatcatttacggcatttccgccttcggcctttcccagcggctgggctgcccccgcagtgaggccgccacgctgattgagaattacttcatccagttccccgtggtcaagtccttcatggaggacctggtgcacaaggcggaacaggccggttacgcggaaacgctgctgggccgcaggagaatgattccggagatcaattccgccaacaagaccatcaagtccgccgcggagcgcaccgccatcaatacccccatccagggcaccgcggcggatatgatcaagatagccatgatccatgtggacaagctgctggaaggcaccaggtcccgccttatcctgcaaattcacgacgagctgctggtggacctccacaaggacgagacggagctcatttcaaagattgaggaagccatgatcggcgcccttccccttcccaacggcgttcccattctggtagaagccagaacggggaataactggctggaagcccactaggattttgcggcggaccaggggcgcggaccgcccctcccgtcccccgtatttttgaattgacggatgcctcccgattacggattcttccggattatgcactcatcatccctgccggcaattgccctggctgcctgttcctgcgtttgctttcagacagccgccgcgtccgtaacctatccgggaacaacaccgggagcccccgccgcccaccgggaaggggatgtttatacgttaagcaacaatattctgagcgcctcatggaaggtggacggcagcaggctgattcccctgggaatcgtgaacaaggagcggggcgccacggacgaaaaggccgccaccggcgcccaggctccggaattgttccgcctttccacggagaaggaagcctacaatctcccctcctcccggtttgtgatggaaggagttcccgccatcagcgcattgaaagggcattccgccggcctccgcctgggggaacggccggaaggggccgttatttccgccgttttccgggacaaaaacagcgggctgacggttcactggaaggcggaattgagggagggttcctcctacgtcaaggaaacctaccggattgaagcgtccaaggaggtggatttgaagaaagtccagttgattgatttgcaggatcccaccctggccgtgaagggcaccgtaccgggcagcccactggtcagcgagcgggaaggcacgtttgccggcattgaacttcccgtagccagggcccaggccgccggaggaacgggaaccgtcgggtttgactgcaaccttcccatgggcagcggtaacgcccagacgttcaccacggtgctgggcgtatggccggagaaccagcttcgccgcgggttcctttattatctggaacgggaacgggctgcgccctaccgtcagtttctgcattacaacggctggtatgacgacggcctggaccccacggaaaagacgctcgtcaagacagccggggaatacaggaaggaactgggttcccgccacgtcaggctggacggcttcgttctggatgacggctgggacgacgttaatgaagacctctggcagccctccaccaaaaaattcccgcacgggtttgaacctgtagtcaaggcggtcgggaagattccttccggcttcggcatctggatttctccgctgggagggtatttcggcccggaaaagagggttcagcatgccaaggacaaaggcattctcccggcggacgccgcgggattcgacctttcctgcccccagtattacaagtggttcaaaaaacgctgctccgacctgatgaagaaggacaaggtgacctatttcaagtgggacaaggccggagacggcatcagcccccatttcatggcccttctttccatcgccaacgaccttcgccgggagaatccccgcctgttcatcaacacgacggtaggcacctggccctcccccttctggctcaaccatgtggattccacctggcgcagcggtacggcggacgtaggctggacgggcaagggagacgaccgcgaacagtggatcacgttccgcgacggggcctgctataacgtcatcgtcaagcccggcccgctttatcccctgaactccatcatgcaccacggcatggtgctgggcaccaagttccaggccgcgcgcgtcagcaagggagaggacgggaagcaggacaacagggacctgaagaacgacgcccgcatttatttcggttccggagccaatctccaggaactttatctcacgccgtccatgatggacaaaaaggcgtgggacgacgtggcggccggggcccgctgggcccggcgcttccaggacgtcctggccgacgtgcactgggtgggcggcaacccgaaccagctggaaccgtacggctatgcggcatggagcccgcggggctgcacgctggccctccgcaatccggacgaccggccgcggacgattgatctggatgcgtcagccgtctttgaacccgtcaagggagcgcccgccgttttcctcatgaaggcctcctacccggaccagcgcgtcaaaacgctgaatttggaacagggcaagccggtgagcctggaacttcaaccttttgaggtgctggtgttcgacatgagaacgaacggacactgacccatgggccgccggccattatgcctcccccttccgggcggcatggtttttttatggcctctccggagcctgatttccggaacgccttttgaaaggggcaagcccccggaaaaaatgggggaagaagaaatcccggagggaatatcaaagagccaaagcgtccccgtcccgtaattccggaacggttaccagggctttcccgtctttcaacgccaccacgcgcaccttgcgctcctgcatcccttccgcggtttttacctgaatggagcttccatcccggacggcagaggcgggaatccacgcggaggcgggaacctgcacgctgatgtttacctgaagggccatgttgacgggggccacctgccattcggaaacatgggaggcgttcggctccagggaggctatcagcacggcggaattgcgctcggtatccagtgcggcgtccaccgccgtaacgcggcccagccattgcagccgttttccattgttcagcacgcaggaggcggtcagcgccgtgcttaccctgccctgttcatccctgggcaatgcggaaaattcttccagcggcacgggaacccgtatcatccgctcctggaggggaatcaccttccccaccggctgcccggcaaccacgcgggccccggctcccacggagcattccaccacctggcaggtatagggagcttccagcaccgtgtcccggagggcctgttccgcttccgccacatacgcctccgcggcgttcagccgcgcgttcacagcccgtcgctgcggcacccggagcaccagttccgactcttttccgcttttggagacggagctgtacgtcttcttgatggctttcagggcttccgcctgttccgtggatacatccaggcgagcctgttccagcccagcctgcgcgttcgccaggcgtgcacggtattcaaatttttccagctccagcaggggcgttcccttcaggacgatttctcccgcgctgaagagggggtgcaccttgtccaccttcccggaaacgccgggggaaagcatcgtcaggtgggaggccttcacgatgccgggcgcggaaatggcaagagtgttcgtctgcaaatgcagcggctccaccgttcctgcgaccgccttgtccttttctccggcagagcccgagacggacgggtccgttaaaatggccgtacctatcaaaagcgccgcgatccccaggccgatgcctatggaccaggatgttccctttttttgaggggcctcgctcatgaacagctccggggggaacgcggcccgttatttgggatattccgtctccatgatgtgggagtaggcttccgccgtttccacagccacggtttcaatgttcttcatcaactgggcaaactgggcttccgtgaggtccatgccttccagaacgaaggactggcggtagtagacgtatccgctgttggggtccagctggaaggcgccggccgtctggtccgcattcagctcactgaggatgatgctgacttccacacggcggttttcaggcaccttggcggcaaaaagcacgtcaatcaccagcgtctccggacgatcaatcatcgtgtacaggaggctcacgggcgtgaacgtatcacaggggacgaacgcgatgcccgttctgaggttgtggttgtccgcggaagtaatccattccgtttcttcccctctctttctgagaacggtgtacacacggtccaaaaggctgagctgctggttttccatattgaaaattgtttaacaggagggttgcttgcgaaggcgcatgcaacgtacgcgcccgtttactggattcaagcttactggcatccttctgattcgtcaagctctcctgacgtaaagaaattgaaaaagcatgtacgcatccggcataaaaacggacgccgcccggatggacggcgtctgggaagtctgggaataaagtgcgtaccggagggtacggcgcccttacaggatgtctccgggctggtagcccgcgccgttcgggaacctgtccgtcagctcctgcaccatggagcggaacgcttccacctgggcgtccgccatgcccgtggcggaggagttggagtcaaagatggtctggaggtccgcccggtcaatgcccaggcgaccgtcttccgccaggcggtccagcaggttgttttccatgatttttccggccctcaggtcgttggagacggccacggcgtgttccttgatcacctcatgggcggtttcccggccaatgccgcgcttgacggcttccatcaggatggtggtggtcatcaggaaaggcaggtagcggcgcagttccgcggccaccacggcttcatacacccccatctggttcaggacggtcaggaaggtttcaaacaggccgtccgcggcatagaaggaatccggcatgactacgcggcgcaccacggaacatgatacgtccccttcgttccactggtccccggccagtccggagatcatcatcaggaagcccttcaggatgacgtggaagccgttgacgcgttcgcaggagcgggcgttcatcttgtgcggcatggcgctggagccggtctgccccttggcgaagccttccgtagccagttcatggccggccatcaggcgcagggtcttggcgaaggaggaacagccggaggtgagttccaccaggccggaaaccacggaaaagtccagggaacggggatacacctgccccacgttcatccacttggcgggaatgcccaggtgggcgcacacgcggtcttccagctccagcacgcggcccgcgtcctgcccgaagagggagagctggtcaagctgagtgcccacggcgcctttcagcccgcgcacgctgtagcggtccatcagggaaatccaggaacccaggccgtgcacgatgtcttccccgaacatggcgacgcgcttgcccatggtggtggtctgcgcggctacattgtgcgtgcggccggcgatggtcacgtgcttccattgtccggcaagggcgctcatgcggttcagcacggccacggccttgtcccggatgatctgcatggacttccagatctggagctgttccacgttttccgtcaggtcgcgggaggtcatgcccttgtggatgtgctcgcagccggccagctcgcagaactcttcaatgcgcgccttcacgtcgtggcgcgtgacgcgttcgcgggcgtcaatggcgggaaggttcacctggtccttcacccgttcgtaagcttcaatcacgccgtccggaatatccagccccaaatccttctgggccttcatcacggcgatccagaattcgcgttccaggacgatgcggccctctgcggaccagatggatttcatggcggcggaggcgtacctttcagccaggacattgggaatcacgctcatatcaaaatgtgtgtatgcgggggttatcaaaaacggtgagccgccatgatcatgacgggagggaaaaaagcaagcactttcccgcagcttcacggattaggaatcccacgggattccatggtccggaaaagaggtcctttccaatgttcagggatggctgacaggccccccatagacgcccgattaacattcccgccattcccttttcacagccgcacaccacgctgggagccagagcctcccggccctggcagctatttaaacgaaagcttccgcgatggcttcacccacgaaaggcaggagcctgccgcttccaggagacggagccgcaaagccgccctccatcgccgttccgctagtttccggcgggaggttccaaaccgtaccgggcgtagccggaaacgatttcctggagaatggcagaaattttttccagggaacggacaggaacgtattcataccttccgtggaagttgtggcctccggcgcacaggttgggacacggcagccccatgaaggaaagacgggctccatccgtaccgccgcgcaccgggatgatttccggctccacgcccacggccgccatcgccctgcgggcatgttccaccaggtgcatgtgcgggaggattttttccttcatgttgtaataggagtcctttacctccacatgcacggttccttccccgtacttccggttcagcagggcggcgcactcctgcatgaattccttctttcgctcaaattccgccgtgtcgtgatccctgatgaggtactccccgaccgcccgttccacatccccccggaacgagtccaaatggtagaagccttcgtatccttccgtaaaggcgggattctggaacgcgggaagcattccctggaattccatgaggaccaggcacgcgttcagcatcctgcccttcgcgctgccggggtggatgccggtgccgcgcaccgtcgccacggcagaggccgcattgaaattttcatattcgatttcccccagggctcctccgtccacagtataggcgaagtccgcgccgaagcgctccacgtcaaaggcatccgtcccgcggcctatttcctcgtccggcgtgaaggcgatgcgtatctcgccgtggggccgttcgggatgcagcaggaaggaggcggccatatccatgatttccgccactccggccttgtcgtccgcgccaagcagggtggttccgtccgttacgaccaggtcctggcccgcatagtccgccagttcggggaaaacggcgggggaaagcacaatgccctgttcccggttcaggacgatgtctccgccgtcgtaggagcgcacgatgcggggcttcacgcctctgccggagacgcccggggccgtgtccacatgagccacccagccgatgacgggaacctccctctccacgttggacgggatggaggcgtacacgatgccggaggcttcatccagctccgcctgggctcccagcgccttcagctccccggccagcagccgggccagttccgtctggccgggagtggacggaacgctgcgggaatccgcatcagactgggaacccacggaaacatactttaaaaaacggtctaaaacggagatattcatcagaaaaatcaaggattgaggagagtctagcaccgggccccgcgaacacaagcacaagacacggtttatccttgcgattcaagatggtttacagtatgtaaacaaagcttctccccatgatgactcctctacctcttggcattgccgttgccttatccctgacctgcggcgccctgccccttctggcacagagcgcctatgtgccgggtcccatgcccgtttccgccgggacgaggcaggaccccacggacatgtacctggaagcgttaaagctggtaaccaggtctgccgaactggtggaaaaacgcgactacataggagccatccgcctgacgcaacaggcggaagaaaagttgggacgcctggtgaaggcctatccgcaatggcggcccaaccttcttcaaacacgccgccagctcaacagggagaagctggaccagtggcagaagctggcgcagcagcaggccgccgccgtttcatcaggccccggcctggaattggaacgtccggccgccgtgcccaagcgacccaggcccaagcccaacatcgtccttcctccgggctacaagggagtggagttcccttcccgccccggagaatccctcgtcaacaccatcccgtccccgtccgtctcccccggagcggccccggaagtggtggaaagcaattacgagcgcatccgcaggctgctggacaaaaccaccattgaaaacaaggccctgatccaggcgctcaagcgcacccgcaaggaacaggaggacattctggcaaaactggccatagcgtccgccggagaatccgtttaccgggacgaactgctcaaggtcaagaagcagatggaggatgaaagaaagaccagcaacaagctcctccagaccctcaccaagcgggtggaggagctggaacagaaagtcaccacgctggaacaggaaaaagtccagtatctggcgcagattgccgatctccaaattcagctcaaggagcaccaggacaagctggccaaggtcacggatgagaaaaacgccctccagaaagaccgcgaccagttggctgccctggtggaactcaacagcccggacaaaaccaaaaacctgctggaccgcaacctgacgctggcggcgcagctcaaggacgctcaggataaaatcgccgccctggaaacggccaagtccgactccgaagaacagcggaaggccaacctgaaagccctggaagaggcgcgggaagaatccgcggacctgaagcagaaactgattgccatccgggatgaaaacatcggctaccgcaagcgcattacggagctgaacaccaagctcatcaatgcggatgtggagctgtccaagctggaagcctatccggaaaaaagccctctcctgctggaggaaaaccagttgctgcgctccacaatcgccaagcagctccgcatcctttccgtgcaggaccagagccgttccctgctcatcagcacttacaagcgcctgctccaggaaaacgcggacacttcggaaatcgcctccctgatggacaatgaagaagccatcaagctcaccccggcggaaaagcagattgtcaacgtcatcgccagagacaacaagatagacatccccctgacggaccagcagaaggaaaagatcaacaagctggcccaggccctttccgcggaacgcgacaaggccgcccagcttgccagggaactggaactggcgcgcagccagacgaagacaaaagcggccaaatccgccaggaatgacaagagccatgcggaagccctggcccggacccagaaggccctggaacagaaaaaccttcaagtggaggagctaacccggcagatggatgaactgaaagcccgttccgccgaacaggcgcgcctggccgccatttccgccggagccattacgccggagcaggaaaaagctctgaacaggagcatggaagccacggtgcgccggaagctggaagcggaagccctgggacagggagccgcggaggccttcgccaaaaaacgctacgccgctgcggaacaattgtaccgcaccctgctggacttccagccggcccacgttccggccctggtcaacctgggcaccatcctgctccagcgcaacaaggcggaggaagccatcgaatacctgaaaaaggccacggaactggatgcagcctcctcccccgcatggttcatgatgggcgtggcccagtaccgcgccgggcaggaccagcacgccatcgcctccctgacggaaacggtccggctggacccggccaacgctccggccctgctttacctgggcaacctggaaaccagcgcaggcaactatgaaaaagcggtgggccactttgaaaacgccttgaaaatccagccggaatcaccggacgcccacttcaacctggcctggacctattcccggctgggccgtacggcgcaggcacgcaagagttatgacgccgccatccgcagcggcggcctgccggattccgacctggaactcgccatcaccgggaccaccacccttccccgcaaaaaacaggctccggacaaagctccctcgcctgccgcgaacgaggatgaaatgcgcctggccgcagcagtaagcgatccatccgccattccccacgatgcctatgaggtgcccgcccatgtggcggaggaccccaatgccctggaaaggccctctgccgggcccaagcaggtcgtggtcagccaccgtccggaagccgggcccgtctccctggcggaccagatgagggaaacggcctccgcggcgcctgccgcacagcctcctgcggaaaccgccaccgccgcagcggaaccgcccaagccggaaaaacaggaagcaccccgcaggagaagccgcttccgcatcggttcctgacggactcgccccttcctttttctcctgaaaaacgccatgtatcaagtttccattttaggactgggcctcatcggctcacggattgcacgccacatgaccggactgggtgacaaggtcaccgtctggaaccggacgccccgggaagactttccggaagccgttccctccccggcggacgcggcccgcgcctccaaaatcatccagctctatctgaaagacaggaatgcctgtctggaagtatttgaacagatgaggggcgcgctgaccccggaacatgtcatcctgaaccactccacgattgacctggccaccgtcggcaagctctccctgatgtgctccgccatcggctgcacgtatgtggactgcccgttcaccggatcccgcctgccggcggaaaaaggggagctggtctattatgcgggaacggactcctccaccctggaccgcgtgcggccagtactggaacacagttcccgtgacatcctgcacgtaggggggatcggggccggaaccgtcgtcaaactggtcaccaacatggtctccgccaccatggtgcagagcctgagcgaagccctggccatcacccaggcatacggcatttcccctcaactgctggggcaggccatttcccggaacgtcatcgcctcccccctggcgtccttcaagctgcccctgatggcggaacgcgacttttccacccacttctccctggacaatatgcggaaagacagcatctacgcccaggaactggccgctgaaaagggaatccacccgcccgctgccgcgctggtctcctccatcatggggaaactgtgccgtgaagggcacgcggaagaagacttcagctgtctggcggaacaattcgactaagcttttcccattgatgaaattcagaggaacatgcgcctttctgctgctggcccttctcctgcccccctgcgttcgggcgcaggaacagaaggaggcagggaacgccccttccgcggaagcgcaggccgctccccccgttcccgttccggacaccgccctgatcgatgacgcctctgaccatccggtattgcagggcagctccaacgtgagcgccgtaccccccgctccccagcatccggccgcggcccctgccggaacagaaggacagtccgtcaaacggcagccgttcaccagcgtttccgcttccaagcaatttcacgttacagggatggattccctgttggccggggccattgccacgcgggcggactccatacgcacggccctggtgaaaatcctcaagcagccggacgaatggaaaaacaacatcatcatccgtctggtaggggagccgggaaacccggttccggccaaccccatccgcatgcagaccgtgattgtggggaataccctctcctacaacatcttcattcacctgggacgcggcatcaaccaggacaggctgcgccacgccatcgtctccaccctgctttatgagatgatgctgcgcacggtggatccggaaggactgccggacgaagtaacgctgcccccctggctgattgccgggctggagcaggccgtcctgtggcacaccaatgaagcggaccgggccatgtactccaccctgttccagcaatccggcatcatgaccccggaagaaatcctgaactgcccggaaccggaaaaggaactggacgccacctcctacgccgcctatcaaacctcctgcggcgcgctggtgctctgcctgctgaaccaggaaaacggtccggaagggatgaaacagcttctggaccaggccattctgggcaatgacgatcccaggaatctcatcaagcgccattttccgcagctcaacctgaccccctcctcccttcataaatggtggacgctccagctttcccgcatggcgactcctcccctgacggaaaccctcacgatcacggaaacggaacgtcacctgcaggaagccctcaccctggtcaaatacgatccggacacccggacgaccgtcaccttccccctggacaatctggaccaggccaattccctgacggacctgaacaggcagctttccaacatatccggcagcctgctcaacctcagccggcgctccttccccgcctaccggcccgtcattgtggaatacgccaagcttgtggccctgatgcagaccggaaaaatcaacggccgggaagccgccccgaaaatcgggcagcttcgggaaatcagggagctatccatgaaaacggcccgtcgcgtccgggactacatggactggtatgaaatcaatacgcggtccggaaccggcaagacattcgcctcctacgcggcagccgtcaaactgctccgtgaacaggaacagccggccaatacccccatttcccggtatctggacgatattgaaaaactgtacaccctcccggcgaaggctcccgttccttccctgcatggaaagaattgaaggaaacccgttcccctgcctggaacggccatttctttccagatgaatttccgccctccggcggggcaataggcattcacgcatttctattaaaagacgcgagagttcgcggtattttgatctatccctgatttaaccatgattactttatttttcataagttaatcatgcagaacaggataattccgccgcggatttacaatccggaagtcaacttatttttttgagttcaaaaaagtaacggcaaatattcccacatataaagtaggaataataaacaacgcctaatacggaaaccttatttatttataagaagttattgagtttgaagcggtcttccggattgtaaatccgatactggttccattcagtaatttttttaataatttcatgaaatcctctctgtatcttacgatgttcctgctttgctcagggttgggggcccaggccgccacattgaaatatttttatgatttcaacaagcttgacggaaacctgtcatctttaaatgacaataacctggccggcccaaatgcgggcagcgccacgttcagcggatcaggctggatgaattacaccgatggctacgaaggccggggctatgacagccgcacgaacggaggacaattgacgctggggtcctccagtacgggactggggctgaatgctacggaagggttcagcctttccattgccgtcaaggactactcccccggcaattcctcctcctcggatatatggaaaagcatcctgaccttcacgtccggcaacagccagaacatgtacctccagaaggattccggcgacgcctccgctgccggggcatgggcggcctactgcggcggaaacgtgggcaactgggccaacctgacgatttccagggattccttttccaacatcatcatcaccttccagaacggggaattgaacatttatctggacgggcagaagaaaatcacggcctccggagtcaatttcaccggagacgtgcagtcactcaagctggcatccaccgccaatacgaccatggatgacctccaattatatgccggtgtcctgaatgacggggaaatagccgctctggcggccaaccccgcccttcccgttccggaacccgccacggccactctgagcctgctgggactggcttccctatcgtgcatgcgccgccgccggggttaagtcccctgattttttttaagggaaaacaagttagttcttgttttcccttttttattcactatcactctatctgttagaacctacatgaaaattaccgcactgttcttcggcgtgttcgccggctgtctctcctgcatcccggcccatgcggcggactacctctggaatggaggaaacggctcctggacggattccggagcgtggcggctggatggttcctccgccgactggagcaatggaaatacggcccaattccagacggattcctccatcacagtaggaagcggaatctctgcgtccggaatgctttacaacggtgcaaccatcacgctgaacggaggttcccttaccctgacgggcgcggctgccgggaacaacggaggttccgccactctttccaataccgggctgattctggacgcccccaatgcggaagactcctatgaagtccgggataccagcctcaccggctccgccacgctcgccaagacaggcgccggaacggttaccctggatggagcgcatacggccagcggcgtctggaacatcaacgcgggcaccctggttttcaccggggaaagaaacatcaccgccagtgacaacaaccggattaacggaaaaatcaacattgcctccggagccgtgctggatgccagcaacggccgcctgttccataacggcgtttatacagccaatttccagtcccccaccattacgctgaacggaggaacgctcaaactgaaccagttcgggtatgactccgcctccctgggcaagctgcacaacaatttttacgcccttaaattcgcttccggaacctccagccgcatcgtcatttcccaggggtatgaatccggaggcacggccagccgcggcatttacatcgccggctggggcacgacggccaccattgaactgggagccaaccaaacccttacatggacttcctccaatgcgcagtaccaggatgccatcgtctgcgaaaccggagccggcagtgcgctggcgctcgccatcggagaaaattccgtactctacttcaaccaggtttttgccaataaaaacacgtccggcgaatacggagaccccaccaccgccaacttctccggcctgagcctcattaaatccggcgccggagagctggtcatccagagggccaatacgatttcctccggccgcacggtccgcgtggatgcgggcaagctgacgctggaggtggacaacgccttcggcgccggcagcaatctgggcaacgtaagcatcgcttccggagccctgttctccctgaacggccacactcttgccaatgtcattgacgtccaggacggagccacgctggacatgggcggcagctcctatgccagcatggtcaactggcatgaaggcggcatcctcctgaacacggaaaacaacaagggcacgctcaacatcatgacccgcgccgccctggaactgggctccaaggcatgggcgggaagcgtgctgacggatacggataccgtttttacgctcacggcggaccagaatctgggagccctgggagcaaacgtcaactgctggacaggcggccgcgggtataacaacaccctccagagcatcaccttcacgggcggccacggaatcaacattgacaactacggagccaagtgggccgtcatcctctcggaaaacgtcaccttccaggacatcggcagcctgaccttctccaacaatgccgctgacatgtccaactctgacgccctttacggcgcgggagccattgccgccaacgacaccgtcaccttcagcagcacgggagcccttacattcaccaacaacagtgtgcgtacaatagaagatgagtctgcttccggcggggccatttacgcctccggaggagcctccttcatcagcacgggcgccatcagcttctccggcaactccgccatgacccacgggggcgccatccatacgggaggcaccacgggcagcctcaccttctccgacatcgcggaaaacatctccttcaccggaaatacggccggagaaaacggcggcgccatcaataacgattatgaaaccgtggaatggtccagcgtgggccacgtggccttctccggcaacctggcggaggcgggcgcgggaggcgccatctggtccggaggggacgtaacggtcaataccgccgcctccttcagcatgacgggcaacgaggcccgggacggcggcgggggcgccatctattcggacggaaacgtcaccttctccggcgtgggggccctgaccttctccgacaaccacgcatccacctacgggggcgccatcggagcctacggggacatcactatctccgattccggcgccgcctccttctccggcaacacagcctatgaagggggagccctggacgcctacaacgttgccatttccggcaacaccgggacggtgctgtttgaaaacaacagtgcggaaaacgccggaggcgccatcaacctgcagggaggaggctccatttccctgacggcagaccaggcggacatcatcttccgcggaaacacagtccaggacggaagcgtttacaacgccatccatttcaacgacggcgccatggcttccttcaatgcggcggacaaccgccggatcctctttgaagacggcctcagctcccaggacgaatccgtcgtggacatcagcgtcaatgacgccgccggggccggaggcacggtcgccatgtccggcgcaaacagccagtccggcatccgggccaatacgaccgtgtacggaggcaccttttccgtcagcagcggggcaacctacggctaccattccgcagactggagcacggaagaagcgcgaacctccttcaccgtaagcggaggaagcctccacattggcgaacaggccgccctgaacgcggcggacgtgaggctggaggacggaacggagctgtccgtcatgggaaccggcagcctgaacgcagacacgctgacgctgggaaacaacgtctccgttctcggaacgggcgaaggcagcttctccatcactgccaatgccattgatatttccaacggaatcacgatcgacctctcccgcggctccatggtcggcatggaactgcatgcggacaccctgacgctgggagggacgctggccctgggcgacgaccaggtggactacacctcctccatctggcagagggaccaatcctacctggtcatggatgcgtccggcgtcacgaacatggacgggactttctctgaaatcctctcctccctctccgactccgctaccatcacggtggggaatctggggctggaaggctatgacccctctctggaactggggcgctgggaactgcgctgggatgaaggaaacgccctccatctggattggatttccaatggcctggtagtcccggaacccgctacctcccttctgcttctcctggcggcaggcggcctgctcgccgtcaggaagcgcactatctaacaaccaccatctcttaataaaacatgaacagtacctttaaaacctgcatgtgcgccctggccctgggcctgtccggcgctgcccccctgtacgcggcttccgccacggcagcctgtgaacaaacgcactccatcctgtatgcgggcgcggacagccaggccatcatgaagatcaaggtgaccgttacggaaaccagccagatcctgaagggaatgaccttctccatggccggaaccacctccgtctccgacatcgcgaaggcccggattttctactccggcgccactccctacttctccccgaacgcggagcaggccaaccggagggccatccccgttctcaacaccatctccaagggggccaaaaccttccaattcgagggaagccatgcgctctccgcaggagacaactacttctggctgtgcgtggacctcatcccccgcgcgcgagggttgaacaaggtggacgcctcctgcacgggcgtggccctgctggaggactccaatgtagaggtcgccaatccctccccggaaggctgcgcggaggtgtacccctaccaattccgcgtggtgccctactaccgcaacaccaacctgatgcgttggaatcccgaccatctgaccgcccagcacttcaaatcattcacggacctcatttacttcaacgtgggatgtgacacggaaggaaacctgacggggcagaacaacgcccagttcctgaacggcctggacaagcttaaaaaccttcgcggaacggcgggcagcaagatcattctgggcgtggcccactgtgacgctgggctaacggctttcacggggaatgcggaaaaaaggcggcagttcgcgtaccagctcgtctcctttgccaaggaaaagggatttgacggtatagacattgactgggaatacccggacaacaccaacgaatggtacaacttctgcctgctgctgggagaagtacgctccgccatgggtgccagcggcatgtccctgagcgcggcgatcaacccgtactacctggcgcccaccagtgaaatgatggacctgctggacttcgtcaacgtcatgagctatgaccgtgccggacagcactccacctatccggacatgctcatcgatatccaaaccatgcgcaggaaaaacattccggactgcaaaatcgtcgtcggcctgccgttctacaccaacgagacgcgctccaaccgcaactgggacgcccagaaaggctattccaacgttgtccagctctaccccaacatcgcccccggcacggacctctgcgccatcgacggccagcagcactactttaacggcatcaccacgattaagaaaaaatgccagtacgtaaaaacccagaagctgggcggcgtgatgatctggtgttatgatggagatttgctgctgacgcacgcgaaatcactagcaaaagccatgtattccatcatcaagcaacaggctgtccgctaatgttttgaagcatctcctgctccggcgcgcattcttttttggagaatgcgcgtttttttatgtggtcttttttgattcaaaaggattcaggggttgtctttcccaagatgatttgtaatcatttccccgaattattttcatatcactacacaatatgaacacgtcattgaaactccacggcctggtggccgccgtacacactccgttcaaggcggacggttccctgaatccttccagcgttgacgcccaggccaggctgcttgcctcccagggcatcaagctggctttcattaccggaagcaccggtgaatcctcctccatgcagcttgaagaacgaaaggaaatctactccgcctggaaggaagcttccgccaagtacggcgtggacgtcatcgcccataccggttccaacagcgtctgggacgcccgcgaactggccgcctttgcccaggaatgcggattcgtggcgaccagctcccttgccccctcctactacaagccaggcactgtccagcgcctggtggaatgctgcgccttcgccgcttccggcgctcccgacctgccctattactattacgacattcccgtgctgacgggcgtgcgtttcaatccggtggacttcatcaagctggccaaggaacagatcccgaactttgcgggcatcaaattcaccaatccggacctggccctgtaccagaccacgttgaactacgacgaaaacgtggacatcccctggggcgtggacgaatggttcacgggagccctctccgtaggcgccaagggcgctgtgggaagctccttcaactttgccccggccctgtaccagaaactcatgaaatcctttgcagaaggcgacgtggaaacggcgcgcgactgccagtggaaatccgtgcagatgatcaacatcctggcctccaagggctacatgggctgcgccaaggccctgatgggctggctgggcgttgacctgggtcccgcccgcctgccgcagggcaaccccaccgcggaacagctcaaggaactccgctccgagctggaagccatcggcttcttccagtggtccatgaactaaaccgctttccctcttatggctgcaacacttgacctgcccacgctgggcgcattctaccgccgccagcttctggaagacgttctgtcgttctggttcccgcgcgcttacgacgaaaagaacgggggcctctaccactgctttgacgcggacggcaccctggtggacacggacaaatccgtgtgggcccagggccgcatggcctggatgctgctgaccatgtacaacagcattgagaaaaacccggactggctcaaatgggcggaaagcgccctgaacttcctgacggcgaaatgcgtggaccctgccgacggccgcatgtacttccatgtggaggcggacggcacccccctccgcaagcgccgctatgcgtacagcgaatcctttgccgccatcgcctttgccgcccatgcgaaagctgcaggaaatgaagaatccgcaaaagccgcgcgccactggttcgatgtctttacggacatctgcttcacccccggcaagatggttcccaaattcaccgggaaccgtcccacgacgggactgggaacacgcatgatcacgctggcgaccgcccaggaactgcgcaagtacctgggtgacgaggacggcttctacaccggatggatcgaccgctgcatcaacgacctccgcaccctgttcatgaagccggagctcaaggccgtgatggaagtggtgagccctgacggcgccatcatcgaccactttgacgaacgcacgctcaatcccggccataccattgaggggggctggttcgtgctggaggaagcccgcttccgcggcaatgatccggaactcatcaaggtgggctgcgacatgatcgactgggctttcgcgcgcgggtgggacaaggaaaacggcggcctgctctactttacggacgtgtacggcaaacccgtccaggaatactggcacaacatgaaattctggtggccgcacgacgaggcgctcattgccatgacgctcgcctacaagctcaccggagaggaacgctacgccatctgccacgacatggtgcacaactgggccttctcccacttccaggacgtgcagcacggcgactggttcggctacctgaacaaggacggctccagggcaaacaccctcaagggcagcctctggaagtccttcttccaccatccccgcgccatgtggttctgcgcccactactgcggcgccgtttaaggaaaaacaaaacatattactcttactaaaagccgtttgccaaatatgacaaacggcttttactttttatctatctttaaaatgaagataataggaaatctctgctgaaaaggcattccaaaaaaatccagtctgtttttattttcagaggatcaaaaacaattgctcctccttctgcggtgttttatgatgccgctaacatgctgggaaaagatctgcacatctttttccatgaaatcatacatttcaagcgtgaacccaacttctaatatccatgaaaagcactcctcatgctaaataagctcaatagtggatgaagcaataaaagagaaatgtcatgaccggtgaaaaattcacgttgatgcaatattccgtcagcgccgtcttggggctgatagaagcggaagatttcgttataccagaaattcagcgcccctttgtctggaaacgaagccaagtacgggatttaattgattccttatataacggctaccctacgggctatatcattacttggaagaatcctgacgtgaaaaccaaggatggaggaaaagccaacggaaaaaaagtacttatcgacggacagcaacgtgtaaccgccctgatggccgctatcgccggcaaagaagtcctggatgaagattttaataaagaccgcgtcaaaatcgccttcaatcctcttgctgatgatccgagcaagcgttttgcggttcaagacgcttctcatttaaaagacaaacgatggataccggatatttccatcgtatttgatgccgatttcgatgcgttcgagttctccgttgaatattgtaccatcaatgaaggaatcaaacccaacataatcaataaatccattgcctctctaaaaggaatcgccaacaggcaaattggcgtgattgagctggatgctacattggatattgatgaagtaactgaaattttcattcgtatcaattccaaaggaacgtctctcagccaatcagactttgtcatgtccaagatggccgcggacatggaacatgaaggcagtatgatgcgtaaaacagtggactatttctgccatctggccgtgaaacctgatttttactccttattggtacgtgatgaggaattccagaattccaagtatgcggataaaatcaagtggctggctcatgattatgatgacatttacgatcccgattacggcgatatgctacgggtatcattcatgcaccagttccgcagaggaaaacttgctgatttggtcagcttattgtccgggagggatttcgaaaccaaggaataccgggatgatatcgtagcggaatcctaccggaaactggatgccggcattgtacaatttatcaaccagcacaattttacacaatttgtaatggcccttaagggtgcgggctttgtctccagcaaacagttgaattcacaaatgacgttggattttgcttacactttgtatctgatgctgcggagtgatccaaccattccaaacgaacaaatcaaacggcatgttcaaaaatggttcgtcctctccaccctaacttcaagatacatcggatctccggagacgcagatggaccgtgatatgcgcaatatcgaagaaaaaggcttcctgaatttcaaaacagaagtggaggcctctgccctatcggaaacattttggacggttacgctgcctcagaacctggaaacgtcttctgtaaacagtcccgccttcaataccttccttgctgctcaaattaacctgaactgcaattccctgctgatgaaagggactaaagtctccgatctcattaccatttcaggagacgttcaccatatttttccgcgcaattatctgaaaaagaacggcattgataataagacaaaatataatcaggtagccaattatatctatcttgatacgcaggtaaataaagccattggagacgatcctccctctgtctattttgccaaagtgcaagagcaatgcgggactaaagccattacactcggaaatatttccgacgaagaaatgctttaccgcaatctggaggaaaacagtatccctcaaaatattgtcagcatggatataagtgattacgaatcattccttcaagaacgccgcaaactgatggcgaagctgatgcaacggtattatcaggaattgtaaatcatgctcctgtaatatataaatttataaaaccggttaaggatagacgatatcctccgtccgcaccaccacgtcgccggggtccagcatggcgttaatcagggaacagaagcggaatttttttatatcctccgctttgatggaaagctcttcaatggctccgcacgccagcaggaatgcgcgcttggtgccgggaagcagaaaagtttccggagtcatccaggaggagccgtccccgaacacgacgttgctgtaccgcgtatccgtcacctgcccgtgccggaggatcagcacttcttcatcctcacccaaccccagccctaccgcctgaagctccgtccggtcctcccacttgcagaagtaatccagccgtggattttccacgcatgccagccttttcaccagccggggacggtaaggttcaaagacgggacggcgcgcctttccctgcgtatcatacgtgatatggcatttgtaaatgccgcggccttccggccccggacaggccgccagcacggaggccagatcgggaacggcggagccttccgctccgtgaaggtccatggcggcttccaccctgcgctggtgccaggggagcaggcagggagcgccatcctcccatttgacggtttcaaaaatcaaacggcacataaactttggcaatagcttcccggtattcatcttccatgcggctcatgacggtgatgccgcctccgcttttgtacaccattcccttttcatcctcttccatgaagcggatggcgacggcggaatccaaatcccgcccgttgaagaaaccgaaaatcccggtgtaaaacccccgctccatgtcctccgcctccgcaatggcccggcaggtggcctccttgggcgctccggtcacactcccggcgggcagcagcttcagcaggatttcccccaggcgggaacgccagtcttccggcaggcggcctgaaatctcggaactgcattgcaggatggttcttccgcgcgtttccaccgggctgatatagcggtagcgcctgacttgcacatctgccgccgccatggagagatcattgcgcatcaggtccacaatggtggcggattcccggttttccttttcatccgtctccagccagtggcgggcttcctgcgtggcggcaggagccgttcccttcatcggaaacgtggaaatggaccgcccgcgtaccgtgacaaacggttccggagagaagcagacgcagccgcggccatgcacgccgggaacacgggcgtccggccccagcagcatccggtagggagcccgtgcgaaccggaacagatggcgcagcgtcaggttggtttccacgggggtagccacgcataaattcagcaggtaggagtcccccctcatcagatggttccggacggaggcgaaggacgccgcataccgggccatggaacagggggaagggatgaaccgcagccgttccggaagcgtcggccagttgccctgctcccccatgcctcccagcggcagggaaaaagccgccatacgttcgtgccccgtttccggaagctcaaacaggaggttgtgctccagatcatgggagatcacaaagaagaacggacgttccgcacggcccagggcattcatgcggaggatggtttcttcccgtgtgtacattggcgggaattattctatcatgtgcgcgccatgagtcaaccgaacgtctggatcatcgaccaccgggattcctttacctggaatctcgcggaactcgtcagagtgacgggaatggccgttccgcgcgtggtctccaacctttcgccggaactggaacaggcggttcaggcgggagaaaaactcatcctgtcccccgggcccggaacggtgaaggacgaatgccaccaggcaaccttccgccttctggaccgcctgcccccctgcactccggtgctgggcgtatgcctggggcaccagatcctgggcatccgcttcggggcccggctggaacatctctcccagccgcttcacggggtccgtgaacccatacgccggacggagagctgcccccttctggaggggctgccggaggaattctccgcaggcctgtaccattcctggcgtcttgccgccaccccctggccggaggaactggtcgtcaccgcaagggattccgggggaagcatccaggccattcgccacaggtcccgccccctttacggcatccagtttcatccggaatccatcctgacgccggacgggaagtccctgctccggaatttcctgtctcttccggcaaatgcggttgaggggagccctgcctcaaacgaatcaatgatccacagccagcatcagggatgaacgggaggaggccggaaagtgtctcatacctgtatcatcccggcccatatccgggccgcttcagatataacgccttttattctcatgaacgcacaggacgaactcaagatcagggacatggaaattctgttccagccttttcattcacgcaagctcgacactcccacccgcatcgttctcccggccatgacccggggattttctcccagcggggttcctacggaccaggtggccgcctattacaagagccgggcaaaacatgaagtagggctcatcatcacggagggaacctttattgacgaacccagcgcctccccttcctccaattaccccaatttcttcggcggggcctccctgcggggatggaaaaaggtgttggaagccgttcataccacggattgcaaaatagccccccagctttggcacgtgggcatggcccggcccttcaagggagagaacctgcccaatccggaactgcctcccatcggaccatccggaattgacgtgaacacgctggaacaaacggcggagcccatgagcatcgccaagattgaagaagtcatcgacgctttcgcgcgcgccgcggcggatgccaaacggctgggctttgacggtgtggaactgcatggagcgcacggctacctgatcgaccagtttttctggaaggagaccaacaggcgcacggacgaatacggcggagacctggtgggccgcacccgttttgccagcagcattgtccatgccgtacgcaaggcggtcggcagccagttccccatcatcttccgcttctcccaatggaaaaccggccattacgatgccaagctggcgcacacccccgtggaactggaagattttctgacacccctgacggaagcgggcgtggacatttttgactgttccacgcgccggttctgggaaccggagtttgaaggttcccgcctcaacctggccggctggaccaagaagctcactggaaagccctccatctccgtcggttccgtgggactcaagggggattttacgaatgcctttgacggcggcccggaagcggaggccgccagtgtggaaccactggtggaacggctgaaagccggggagttcgacctcattgccgtaggccgcgccctgctggcagatgcggaatgggcggaaaaaatacgccacgcccgtgaaaaggacattcacctgttcacgaaagaagacctgaaaacgctgaaataggaaccgatggggcaccggatatgcggaaacgctatgcccacgccctgcctactttttcctgaggcggacagtcaggtacagcagccgcagaatggccagggccggaagctgaagcgtcagcagataccacggagcggagccgaaatattccagcacggtcccggccggagcataccgggtaaaaccgtaattcgttccgagccacacgttcaccggaataatcagaagcaggtaggcgtcgcacaagcccagcgttttcacgtcatcccacggacgcgcgcgccatcccaagacgacgggaagataaagggcggaaatcaataaaagcccgtgccccacaaagaaggcgaagaacgcggcggagggaaagccgtcgtgaagcatgggggtaatcagcccctggacgctcgccgtcagcacgccgaaatacgccacggcgcacgcccagggtttgcggaaccacagggcgataaagcacaccagcgtcatcaggctgcaaaagtgcagcggaagcctgtcctgccagggctcccagtgttccctaacaatgcgcccgaacgtttcaatcaggaaggtcagcaggaagacggcgcccagcgccttcccgatcagcacgcgtttttccatcctgagcctccggcagccccacaggagcccccccgcggccagagccacgacgcccagggccgcccagtgcggcaggctccagcggataaacaggggtgcgatttctccagacatacaaaatccgtcaacaggcaggaggaggttccggacacgcatgaagcttgccgctgatggattccaccctgagacgcagaacatatacggcgcggaccatgccgggggtaaaagccgcctcccgccccgtctggtgcagcatgatgcggctcaaggcatggattttttcctcatcctcccgcaggaactcgacgacgccccggcccatgacgcagccgtaggcataactgtaccggcacggggtatccccctccatcagcagatggtccccgtccatctcaaaagagacctccgggcgaatttgcaggatatccagcttcctcccttcccgggcgcagtggaaaaacagattcagggaaccctcccgttcttcataaccgaaattgaggggcactacgtacacctccctgccgtcccacaatcccaggcggcacaccttgaaccgggcgaccatatccagcaaatccgcgtgccggattacttccctgtcttttcttctcataagccggcagcctccatccattcattcatgcaaagcgcggcgcgcccggccagcagggttccgttccgtacggaagccgcccggagcccgcaaatatccgtcccggcggccatcaattcacaggcatgcccggtcagccactcctccatccgggaaacgtccgcctccacatgaaactggagagccagcgcatgcttccctgcgcaaaaggcctgatgcggggtaatctccgtagacgccagcagacgcgctccggaaggcacgtcaaacgtatccccatgccaatgcagaacgggggttccctccaaatggcggagaggagacaggcgcccggcctccgtcagggagacgggcccccatcctatttccctggccgtaccgggataaacccgggcgccgagggcatgggccatcatttgagcgccaaggcagacgcccagcaaaggcagttgacgctccagacgcatgcggaccaaatccagctccgtcttcagatagggataccgttccacatcccacacccccacaggaccgcccagcactacgcaacaatcagcccccagccactcctgaacggaaggatacggagcgcctgcctggacgtaccggatttgaaaacccctgctcctgaaaaggggctccagcgtgccgagatcttcaaaagccacatggcaaagggccaggcaggtacgggagtgggaacggctactcatggcaacggaggaatggaccgcaacaggaatatagaaaaaaatcctctgggaaaagctttttaccgcgttccgtccgcatttccgggacaatggaaatcacaacgaggagggaatctccgccacatcagcaaaagagccctccgccgcacggcataaatccacagggctcaattcaatctggcatcccaggcgtccgccgctcaccaccatctccggcagagcctccgcgctggaatcaatcacggcgggatacttcctcttcattcccagagcggtgcagcctccgcgcacgtaccccgttacggtggtaatatccttcacaggaagcatggaaagagccttggctcccacggcacgcgccgccttcttcaaggaaagctccgcgccgatgggaatcacgaacacgtaatactgccgcggcgcgccctccgtcaccagcgtcttgtacatcttctccgccggcagccccagagcctgcgccgtatgccacgcgtccacaaactcgcggcactcataggaataatgcctgtaagggacatgcagcatatccagcaggcgcatggcgttcgtcttcgcctccttctccttctttttggacataagcttgaaccggaatccccctgcagcatagataaaacggctcccttttacaagaccggttctctttccttccctgctggaaagtacggcgcagccatgaggccgttcatcaggctatacccacctgcttatggcgggcaacctcaggaacggcaaacaacggaggagggggaaaaggaaaaaaccacctcattctccctgaacccttgacttgacgctgacagaaaagctaacatccggtatcatggcagatcatcacgtccggagaagcattggagaacatatcctgcgctgcttcgtcctgatcgtggcgctcttcatcatgtccctgggcatcgccctgtccgccaaggccaacctgggcgtctcccccatctcctgcacgccgtatgtgctcagcctggcgctcccgctgacgatgggaaccgtcaccatcctgatgcatctgagctttgtcgccgtgcaggcggccctgctgaaaaggcaattccgtccggcgcatctgctccagattcccgtcgtctttatcttcggcgccttgacggacttctccatgtggctgatggctcctctggaaccgtccggatacctctggtccgtaatcctctgcctgttcagctgcgccgtcattggattcggcgtctttctgcaagtcaaggcggatgccgttctgctggcggcggaaggcatgagcctggccttcgtcaaactcttcaaatgggaattcggagccgttaaaaccagtgtggactgcacgctcgtctgcatcggcctggcctgctccttcatgttcctgcccggattgacgggcatacgggaaggaaccgtggtggccgccgttctggtgggcatgatcgtccgttttttcaacaggcacgtcttctggccggacaggctgctggaacggctggcacgccccggagccgcaggagaagtccttccgctggagcaaacagccgcttacgcgccggacgcccccctggtcatctccattgaccgggaatacggctccggcggccatgccatcggcaaaatgattgcggagcggctgggccttcaattctacgactcggaactggtctacctgaccgcctcccaaagcggccttactccggactacatccgcaagcacgaacagcagctttccagccgcttcctgcatgaactctatgcgcagaactacgcttacacggcggaggaactgccaccggaagacgccaccttcctggcccagagcaaagttatccgggacatcacggcccggcaggcctgcgtcattgtggggcgctgcgccaatttcatcctgaaagggaggcccaacctgttcagcgtattccttcatgcggaccgggccacgcgcatgcagcgcatcactgaaaactacggggtgaagcctggcggagcggccaaagccatggacctcatggattcccgccgccgcacccactgcctgcactacaccgggcaggagcttggcaacgcccgtctctacgacttgtgcgtcaacacgtccgactacggactggaacgcacggtggaactgattctggaagccatcaacaccagaacggagcaatcccccgccgcggaaacggcccccgtccgggaacccgcgctcccggaaccggaggacgaggacatccagggagaaatctccctggcctgacaagacctgcaacagggatgtgaagccttggcgcgtgccctctcctgccatatatttcccgggccttccggcaagcgtaaggcagaaaggcagtttccactgctccttttccaacagttttccactctccgggcggtcttcctccggggaaaacaggataacttgagcaattcacggccatgaagcatgataacgttttttaccgttaacggcgcggaatggaaaaaagaagatagaaaggcgcaaacaggaacgttcttttctacataaaacaaattaatggctctcatttccatgaaaaaactccttctctgtttgttgttcctcctgattccggctgtatcggaagcagcggagtccctgccgcccaccctgaaaccggaggcccagcaccgggaccatgcctacacctgggaaacgcgccatgaagccgttaaggaacgccaccggaacatcaagccggaatacgtcttcatcggagactccattacgcaccactgggccggagaaccggccgacggcttcgggcagtatgggaaggactcctggttcaggctgttcggcccccatgccgtcaccaacatggggttcgggttcgactacgtggacaatgcctactaccgcatccagcagggagaactggacggaatatctccgcgggtcatcatcctgatgatcggaacgaacaacctcggccacaggaaggacacccccggagcatgcgccgccaataccaaagccctgatctctctcatccgccggaaatgcccttcttccaaaatcctccttctgggcattctgccgaggaaagaaaaagacctcattgacgccatcagggaaaccaacaggcagctctcccgcctggcagacaaacggcatgtctttttctccaatcccggactggtgcttcaggaaggcaactccggtacgcttcgcaaggcctgcaccatggacggcatccacctgtcatccacaggctactccatccttgccgatgaactcgccgatctgctgcaccggatggacccgcagtacaagggaggaaaagtgccccgccccgccaaaatcgacgggatggaccccgaccaggtgcatctggtcgccatcggagactccatcacggacaactaccgtaaggacaaccttccctgccaggactttctgcccatctggaaaaaatactatgctccctacaatgccttcaatgcaggcttcaacggcaatacgacggatgacgtcctggcaagaatcgggggcaagggaatcctggaccatgtctcccccaaagtggtccagatcatgatcggcaccaatgacacgggacgcggcaatacggaagaagaaactttcaacggcatctgccgcgtggtgaacaaagtccattccaaactcccccatgcctccattctcctggtcggcattctgcctagcgacatctacaactggcacgtagccgcggcagcctacccggataaaaaattcaaaagggatatggccgtcaatgacaggctggcacgcctctatgccaaaaatccgtttgttacatttctggacattcgcgacgtctttctggacgccaaaggcaaggtacgggaggaattattctgtgacccggcagtcgtcgtcatcaacgggaaaaaagccggccccctgcaccccaacacggaagggcagcgcctcatggcggaagccattcagccaaccctggcacggctgatgaaaaggcattccaaataggaataaagggggttttcccgttccctcggtctcccgtttggagtacggcatatacgggtggatgaaagcctactgcccggagcgtccgtctatccgggcacatagaaaaatctatcctggctgtccgaaaaaaccttcatgaaatggaggctccttgacagccaaggcatgataaaaggctccctcggccctaagaaaggaaagtccttaccccggagtcccgtggttcccgtacatttgcctgctgcacaggaaaaatcaacgctgttatggcctttcacagtccaaaaaatcatgagactttggtcccttcatccttcctatctggactggctgccctgtggcggaaagtcctgctgggccaaaccaaaggctatacgtaccatccccagttcatccgcttccgggaaccaagtatctaaggcaatatctctctttcctaaatttttttagatagtattcattttatcaaagataaacaaagatttttgtttatcctcaaaatgcttattacaccgatatttaaaaccattgcgttccatcataacctttaaaccttcctctgaaaaataataaatatgatggacatattcatatcgataattttccaaattatccatattatcagtattaaattctaatatagggatatatattattaatataagattttcaggagtattgcttctcaatctagacaaaaacaaatcaacatcaaaacagtgctccaaaaaatcaaaacaacaaataatattccatttttttgaccgatacaattttatagcttcatcctcaaaaacgttacatctactcaaaacagatttcccatatcgccttatacctttttctattgcaaaagaagacatatctatccccctaatggaacaaatgatggaatttttctttcaatatattcttccacgctggaataaaatatcctaggctacaccctatatccagaatatataatttactttccatttctttaaaatcaatcatatctttaatatgattgacgagatcataagctttcttttcttcattaggtatctcattttttagaaatatttcatcaacttcatgaggattataaaaatcattttttatatatattttttctctgtattcgtactgaatatcctcggccttttgtgacgataaaagctttttcatgtaattcccattacaataatattcggtcaaaccttcagagtcatgaattaattttaccttacacaaaaactgcctcaattcttctaagtatttttgagacaattcgttgtaagtatctttattttttatacatccatcaatcattctattttgagcgtcgcttaacacctgttttccagaatgcattaatatatactttaaagtgaaaatctctaaaggaagcaatagcctttctttggattcaagtctcctaataaggaccgagagtgtctttttactgtcaatagtaatatcaaaataatatccctcatcaaataatttatctttataatagcattgatgatagcctgcatttatagaagcccattctggattttttgttacttttttaaaatattccaaaaacattttttttccgtagtgcgatgttattttactgcctagataggctcctcgtaacacaaatggagatttttcttcctcttcctgacaaacattatttatgaaacttttggatgcagagttttgaaaacgagcaatatagtagcagcaattttgtcttatataatgtcctttcagagaatcatcttttatcgtttgtttataaagtctacataaattgttgaaaatacgatctttttcccatggctttaaagattgaatataattaatgacaccgcttgcaaaggtggaggaaatactggctccaaacacagattctagtttatctcctccacattccatcatacgtactaatctttcctcaccttttctatccggatttttcaactcaacaaagctacaaacattagctttaaaaacaggcttttgtttccagggattcctcaaacttttcaattttgaatctatatatgcatatatagttccaggagaaaaagcacggttgtttaatgcttctataaaatattgtgtaaaaagtccatgctggacccgatcctccccttcaactgaaacttcacgagaggaacaagaagccataaccgtcacacctgattcaataaaggctgtctgataattttccccaatagcacctgcatagcaacaatctaaaattattattcgttgctgtgctttacttgcattagcaaaatttaatattttatccattgcgagactttcagattcatctgatacaagacaggaacttatagtatcaagttgtcctcccaacttatcattcaaatgaccatgaccggagaaataaaagagagcgatttctacagaactatcacattcaaataatttctttacttcatactctaaaatatctttggtatctgtattttcaagtaatgctatagaaaaattagaagatccatctggatgcttttccagtaaatctgcaatttccttcgcatcacggacacaatagtttagtttatccaatcctgcataatgatcaatcccaactatacacgcttttctcataatttttttaactgaaattttttcacttatctatgagttattaccaataatttattgaaattatacaaattagaaaataatggaagaaaaaatattgttgggtggggaaaatgacatattttttctactttcgccggaattattactgccgaacatattaccgcaaacctcccctctggcttgataaattaccaatactacttctgtatgatttttccgaacatctgtaaaaaatcaacgctacaaggactcttccggtccaagtctctgtgagactttggtcccttcatccttcctatctggactccatcggcctggttgccctgtggcgtgaaggcctgctcgcccggaaagtcctgctgggccagacaaaaggctatacgcaacatccccagctcatccgcttccgggaaacggaaaaccccattcagaccatagacacctacctgaaagccgtccatgatgaatccattcgcagaagctacaactttgatttaagcaaaatttctctctatgagtgccaaccacctcccagcctcctcctgccggacaaacaactggaatacgaatttcagcatctcctgaataagctccagacaaggtctccccagcgatacgatcttctgcatcaaaccaccaccatccttcctcatcccctctttcagataattccgggtgatgtgagttcttgggaaaaatagactcggaatcattaaagatcggttcaaattttatttacaataaaaaattatatccttccgtgaagaaaatgctcactactttataattaagataaagaggtttccgattctgacaatggctgtatccctgcaaatcctttcgttcttttaaaatccatacgatgaagaaaaagactcattgattctgaaggatcagctgttgtgaaattaatttgtgaaagaatattacgaggcatacataccgacagaatagtctgtcgaagcatgtggcctgttgcttggttcaaggcatcagtctgaacatgcactactaccttggaaagaggcaagaatgaaaataattcacgggcaattcttaaagcacatccacatacataatcttggtacaattcatagaatctggccctaggcatgtctttcgtacttaacttgcctcttgcagtaagtattttaatctgagtaggaacaacaacttcactatctatcattaaataaataataactgttctggaatcaggaattgcaaagtgaatgtcacaccctatttcctgaatttcgctcaggggattaatttccagaatagcttgctggtaagcaatagtatctccctgattaatagataacgctaattgatgaagtgcagaccattgattgaatgcctgctcataacatttaatggacgtttgatagttgtattcgtctctttgtctcgcaagaaggacattctgttcaagctcttttttgattctctcaacttttccaaatatgcgatgaaggaaattaggtttaaacattcgaagtttttgtagagaaagacgttcttctttatcattctttattggacaggaaggaggagactgatcaacgattttatcccagtcgaacgaatcccctacgtcatgatggatagtagttaattgcttgatacgatcctcaaattttttcgacctctatttgcgccctgactaattcattgtgtttttcctgaagagccaactcccttaaagctaatctttcctgtctggctgcttcacgcgccgctcttctgctcgctgcttcgagttctcttaaaattccacttatggttgccatatctttacaaaacggagactattttacaatattagcacaaagaataaagataatcttcctaacaaataagaccgtcttgccagacaggtttatgaattataactggctaaaaaggaaaaggccttaaagcgtttatgctttaaggcctttatttggtggagcatagcgggttcgaaccgctgacctcctcaatgccattgaggcgctctaccaactgagctaataccccttgactttcgtcttggtgcgtcctgttgaggacggggagaaagtaccattactggcgcaggcgcgcaagctttttctgcaaaaaagatgcagacggaggattttttccgggaaatctccacggggaagattcatccatccgtgtccgcccggaaatcgggacaacccaaataaatgtgtttgaatgggatgcacggctgttttacctttcatgaaagatgaaacggctccttttccagcatcgcatgctttccgctgtcgccttggcggctttttttctggcaggttcccttcacgcgcaggaaccacccgcaaccgccggacagccggctcccacggcggagagcggcatttccacaccccggcgggtggccgggctgggcgttctggcgttcctgatcggctggatgatctggagaagcggttcccgccgccagaaggacggcagccaggagcaggagagcccccatgacaccgaaccccgggaatgacgccgtttttgaaaggttgcccctatcctgtccgtagtcgttgcagagagtatccctctgccccattcatccatgaacgtttttttacccatcctgagccttctgtgcggcgccttgctgacggaagccgcttctggcccgtccgatgccggggagccttccccgggcgtagcgcaggagttatggttcggtattccgggaagctcagtaagagatttaacgcacgggaaggtttttgaaacagcggcatcagccgttcacaggataagcagcctggatgtaactaatctgggcgaccagtacggagcccgttattccgccctgctccgggtacccgtcagcggcaagtaccgtctttacctgtcttccgacgattccgcggagctgtggctgggcaaggacgccacccagaaggacatggcctgcattgccaccgtcaaggggtattccgatccccataattggagcaaccagcccaaccaggcttccgaacccgttcaactggaagcgggcagattttattttctggtggtgattcacaaggaggacggaggtccggaccatatgtccgttgcctggtccggtccggacattccctctccggtcatcattccgtccacggcactgttcgtgcctcccggcgttttgccggaagacaagccccagcctccggcagcggctgattgagaagcctgtccctttcctccccttccggctcctctatattttttcaaggcacatgaccaatttatcattaggaaaaggagtgtttcccatgaatttccattgccggaaaaggaaataacttcccctggcatgataaaaaaccggacctccccacgtcaggaaagtccggtttttctcgtcgtatatcatgtagttaattggagcggcctgacaccaaaaatgccaaaacacccactgaaaccaatttagcggatttctaatccgtggtcacataagccatgtaagatttttcggcagggaagtctttcttctcgggggagctctaccatccccccaggatataaagaagaggaaagtcctgggaataagggcctcccggcccttgaaaagtacgttaacagaaggaaaatgttcctttccctctcccttgggattttacgtttcatacgaaaccgggaggcttccgttcccagatggatgtctttgaaccatcgggaattttttctcaaatcctttcccttcaaggtaggaacttgaccacggattagaaatccgtcttcattccggttacttaaacgcctgcttgccgtgcggcaatttcttgtgctgctcaataagatatgtaacgaaaaggaataatggggccttagtgctcggcacgggtaatttctccggcattgaaccggaaacggcaccaggcttttctgcaagcctggtcaagatttatccaattcatttattttatgattattccataacttttttacagatatttcatttcaattattcacctgttattcacattctatttacatttcttttttctcttttgtccagaacttgaacttcttttccacggcggcaaatcgtgaattacggaaaggctatccgggaaaggaacagcagattctcactcaagaccctccctcaacaacagaatgagaaaggcaggaaaactgttttccatcatccctcgtttcctctcatggtctaagaagggagaaatgccgggaagcgtttgtttccggcgccaattcctccaatacgatcagctcctgccgccacagactaaaattacggagtaagcttccggtcagcaatccatcattcaatcggtttcccttttcattccttgtagccttttccgcagggatttttcatctctccccctactccaaaaaaaccgttttctaaagcattgccgatgccagctacgaccacatggccgcccaaaaggatataccgtaactgccccattatttacggaaagccaggcaaaaaatcttttccgggcaccggagatatggaatttcccgtcacctcctccctagcggaagaaggaagccagctactccctgcagcgtttgtttatttaccacaggcatgtcatcggccatcggcttcctgttcccttgaatacggttttccattcatttccacggcacagaatgagggccaataagggggattttaaatgtacattccagggaaggcttcttcagaggatgtgtgacgccaattgtccttgttccaaacacggacgaacgttagattttccgcgccgtatgaccagagcatccagaatagaacgccttgattatctgaaagaccagttgcgcaacagggtcgtcatcctggatggcgccatgggcaccaatatccagaagttcaggctggaggaggaggattaccgtggagaacgttttgcggatgcggcccgctaccccaacgacctgaagaataataacgatctgctggtgctgaccaggccggaaatcattctggatattcaccgccgctttctggatacgggtcgcgcggatattctggaaacctgcactttcggcgctaccagcatcggccagcatgattacttctggcaccgtccggaagaaggacggcgcaaggaccaggagtatttccaggaggtggtggatgcccctgaattgaaggccctggtccgggatttgaacatggcagcttccgcactggcccgccaggcatgtgacgaagcggaagcgtcagacggcaggccgcgctttgtggccggctccatcggtcccatgcctgttacctgctccctgtccccggacgtgaacgatcccggcttccgggccgtgaatttccgccagctgaggcaagcctaccgcgaccaggttctggccctgctggaaggaggagtggatatgctgctggtggagacgattttcgacacgctgaacgccaaggcggccctgttcgctattgaagagatttttgaggaacagccggaggccgccgttccggtcatggtgtccgtaacgctgacggacaaggccggacgcacgctgtccggccagacgattgaagcgttctggaattccattcgtcacgtccgccctttttccgtgggcatcaattgcgccctggggccggacctgatgcgctcctttgcggaggagctttccggcctggcggattgctacgtgtccatttacgcgaatgccgggcttcccaacccgctcagccccaccggctacgaccttcttccggaggacatggcccggttcatgaaggagtatgcctccctgggcctgctgaatatcgtaggcggctgctgcgggaccactccggagcatatcggcgccattgctgcagccatggaaggggagcctccgcgcattcctgcttcccaggagcccgcgctgcgcctgtccggatatgaagcgtacaatcatactcgggagaagaataccctttttgtgggggaacgctgcaatgtggcgggttcccccaaatttgcgcgcctgattcgtgaagggaattatgaggaagcggtatccattgcccgccagcaggtggagaatggagccgtggtgctggatttctgttttgacgacggcctgatcgacggctccgaggccatggtccgctttcttaatctcgtttccgcggagccggatattgcccgcgttcccttcatggtggattcctccaaatgggaagtattggaggccggcctgcaatgcatgcagggcaagggaatcgtgaattccatttcactgaaggagggggaagaggagttcctgaagaaagcggcgctgattaaaaagtacggcgctgctgccgtggtgatggcttttgacgaacaggggcaggcttccaattacgacgaccgcgtccgcatcgccaaacgggcctatgacctgctggtggagcgggtgcagttcccgccggaggatatcatttttgacccgaacgtgctgaccgtcggcaccggcattgcggaacacgccaattacgcgctggatttcttcaaggcagcaggctggatttcccggaaccttccccacacccatatttccggcggcatttccaatgtctcctttgccttccgcggcaataatccggtgcgggaggccatgcattccgccttcctgtaccacgccacgcggcaggggctggacatgtgcatcgtgaatgccgggatgctggaagtgtacgataatattcccaaggacaggctggagctgattgaagacgttctgctgaaccggaatccggacgctacggaacgcctgacggattacgctgaaaaactggccgcggagaagacggaagacggaaaggaaaagaagcccgtgctggcctggcgggagcaggacgtcgccaaacgcctggagtattccctcatcaagggcattaccgagttcgtggatgcggatacggcggaggcgttccgggagctgggctctccgctgaacgtgatcgaaggcccgttgatggacggcatgaaagtcgtcgggcaattgttcggggacggcaagatgttcctgccccaggtagtgaagagcgcccgcgtgatgaagcaggctgtggcatggctcaccccgtacattgaagcggacagcaagggttcctccaagacgggcaaggcggtgatcgccaccgtgaagggggacgtgcatgacatcggcaagaatatcgtcggcgtggtgctgggctgcaacggctttgagatgattgacctgggcgtaatggtccattgcgataccattctggaccgggcggaagcggaacaggcggacctggtgatgctttccggcctgattaccccttccctggaggagatgtcccacgtggccgcggagatggagcgccgggggatgaccattcccctgatggtggggggagccaccacgtccgccctgcacacggccctgaaaatcgccccccattacaagggcgccgtggttcatacggtggacgcttcccaagtggtgcccgccgccgcctccctggtgagcgagaagaaggattcctacattgccgccgtgaaggcacggcaggaggagttgcgcaacaggcatgaaaacaagcccgtccgtgacctcctgcccctgaaggaagccagggaattgcgctggaagggagcggagggcggttatcttccccccgtgcccgcacgcctggggccggtttccatcggcagcctgcacagctccgtcagctgcggctgctgcagtgacgacccgcgctattacgtgactgtgcaggagctgattgagcatattgactggacgccctttttccacgcctgggaattgcacggttcctggaaccgcgccagccaggagttccggacgaaggacccttccaaggcggaggcggccgcggccctgtaccaggacgcacgcgacctgctggaccaggccgtgaaggagaaccgctaccaggcccgcggcgtcatcggcattttcccggccaattccacggccagccatgacgacatcaccgtctggacggatgagtccagaaatgttccgcaggccatcctgctgacccagcggcagcagttgaacaagcagggaaagactcggctggcactggcggatttcatcgctcccgagggggtgaaggattatgtgggggccatggccgtcagcatccacgggtccaggcgctgggcgaaggaatgggaagccaggaatgattcctaccgcgccctgctggtcagctccctggcggaccgcctggtggaggctttcgcttccatcgcccatggcaagctgcgccttttgtggaatattccggaagagtcgggggtgcgccccgcctgcggctaccccagccagccggaccaccaggagaaggaaaccgtgttcggcctgcttcatgcccgggaggaagcgggcatgaacctgacggagacctggatgatgcagcccgtttcctccgtctgcgccctcgtgttctcccacccggaaagcacctatttttccgtgggcgtcaccggggaggaccagcagaaagattacgccgccagaagacaggccgcccattcctgactttcccgtttttattccgcctttcccctttatgcagcataccgaccaaatacaggccctgtcagagttcctgctggagtacgccaccacgcttatgggcgcaggggtgcacaccaaccgcgccgtgcgcaatatttcccgcattgccgccgcgtacgggtacagtgcggatatgaccattttccagcgcaatatcaccatgagtctgatctgcaaggatgacgagacgctgcgccgcacctccgtccggaagctgaagcccctggcgttcaacttgaacctgatccagcagctcagcgaattgagctggctcccggtggacaacaacgtcagcattgcggagatggagcaggcgttccgctccatcgtgcgcaccaagaggttttcccgctggacggacctgcttctggtcagcgtgggcaacgccgccttctgccgcctgttcaacggggacctgtgggccatgctgaccgtgttcgccgccaccctgctgggcttcctggtaaaacagcagctttcccggttgaagtacaatccgctgggcgtcattatcctttccgccttcgccgcttccatggcggccgcgtgcgccgtcatcttccagctcggctccacgcctcagatcgccctggccaccagcgtcctgttcctggttcccggcgttcaaatgatcaattccatcatggacctgatgcacggccacatcctgatgggcatctcacgcggcgtccattccatcatgatgatttcctgcatcaccatcggcctttccgcaaccatgctcatcgtgggggtaaacagcttatgagtccggattttctttcctccatcctcctggacggcctgatggccgccattgccgccacggggtttgccgtcatctccaatccgcccaagcgcgccattgccgtttccgccctgctggcggccatcggccacgccttccggttttacatgctgcattcctggtccattgacatttccagcgctacctttatcgccgccttcaccataggcatgctgggcgtcatgacggccaagctggtgaagtgcccggcggagattttcgccttcccctccctgctgccgatgattccgggcgtgtacgcctacaagaccatcctggctctgatgcagttcatgcaggagaaccaggacacggccaccatgaaccggctgattgtagagatttgcaagaacggcatcacggcgttcttcatcatcttctccctggtgatcggagtagccattcccatgctgatgttcaaacggttgagctatacccgcatcatcaagccggaacactgacccccaaacgcctgaaacgggtcatttttctcttgccagactacgccccgtatggtttactacgccccgcaacggcaggaatgccagtgcaagacagccccatagtgtaattggtaacacacctgattttggttcagtatttctaggttcgagtcctggtggggctgccaatccaaccctctcttcaaggagggttttttgctgcctttttccggcgccgtttccctccccgatttcgccagcagtgagatttcccccggccccagtgaattgccggcctgcggcacggcggttgtcctggcggaaccttcgtgaacctgcagcgcaccagggatgccaccgggcgtaaggaagccgtccttcccgcatgttcattcacggccgtgcgccgggaataagggttccggcccctttagactccggacggcacaaagaaagagagaaattccccgccgctgtgctgcggaaaatgttttaaatacgctagccaggaaaccagacaagcctggcggacagaaaggatagcttgaagcgctcaggaggaattaatcaagcttccattcccaggcaagggcagaatgaacatggcgggatatgatattcccccccccactccgtttatttctgcagaatacagaaggatttcccccttacaaaatttggaacagaaaacggaacgggcacttccggagattatccggaggagccaggggaacggagtaacggccaccctttccactttcccccgtttccacgccttccggacgagggccacgtggcatttccagacggtaaaagctcttgcgttacagggatttttttgcataatcccccggcaggaatgacggaaaaacctatacaacttgggcttgccgggctgggaacggttggttccggcgtttatgaaacgctgtgccgcaaccactcccttctggaagcccggagcaagattcctttcagaatcaagcgcatcgccgtgcgcaatctggaaaaacccagggaaaccgccgttccccaggagctgctgacggacgactggcagaacctggtgaatgacccggaaatagacatcgtcatcgaactgatcggcggcacgcgccaggcttacgagctggtgacgctggccctccgcgccgggaaacccgtcgtcacgggaaacaaggctcttctggcggagtacggcgcggagattttcaagctttccgcggaaatgggcacgcccatttattttgaagcttccgccggaggcggcatccccatcatccagagcctgcagaattccctgatctgcaaccatatcaattccattgtcggcatcatcaacggaacgtccaattacatcctctccgccatgggagaacacggggccgattacgcggacgccctggtccaggcccagaagctgggctttgcggaagaagatccctccctggacgtcaacggctgggacgccgcccacaaagccctcatcctggcgatgctggcgtacggaaccacgatttcccctgacaagatttacgtcagcggcattgagaacattaccagccgggatttcgagttcgccaggaagctggggtataccatcaagctcctcgtcgtcatccgctaccatgaagggcaggaagacgccctggaactgcgcgtccagccctgctttgtccatgactggcatatcctggcctccgtgaacggcgtattcaacgccatttccgtcaacggagacattgtaggggaaacgctgttttacggccgcggagcgggcaaaaatcccacagcctccgccgtcatcagcgacgtgatcaccgccatgcgtgaaagccgctatcctgaataccatacggggttcaatccgtatgccaagtcctgcggaatcatgcacatcaatgatacggtcaccccgtattacgtccgcttccaggtggcggaccagcccggcgtcattgcagagatagcccgcattctggccaccttcggcatcggcatatccgccacctcctccgctcccagccatatcgctgaagacggagcccagtggaacgacctcgttttcatcctccattcctgcccgtggggccagcttcagaaggccctggaggaaattgcccgcatttcctgcgtggcggcggaaccccgcgtactccgcatcgaacaccttcttcctcaatcctaacctacatcatcatcctgttacatggctcttatcgttcaaaaattcgggggcagctccgtcggcaccattgaccgcatccgcaatgtggcgcgccgcatccatgacaccgccaaagacggcaaccaggtggtcgccgtcgtttccgccatgagcggggtgacggacaagctgatcggcctggccaaagagttgtccgaatccccttgcgaacgcgaacttgacgtgctgatggccaccggagagcagcagtccatcgccctgctctgcatggccctgcacgagctgggggaaaaagccatgtccttcacgggggcgcaggcgggcatcacgaccttcggcagccatacgcgtggccgcatccacagcatcaaccccacgctgatgaacaagtacctgctggaaggcaacatcctcatctgcgccggcttccagggagccacggaagaaggaatggtccagacgctgggccgcggggggtccgacctttccgccatcgccatcgctgccgcgctgaaagcggacgtgtgccagatttttacagatgtggacggcgtgtacacctgtgatccccgcgtggtgaaagacgccaagaagatacaaaccctttcatatgacgagatgctggagatggcctccaacggttccaaggtgatgcagtcgcgctccgtggaattcgccaaaaaattcggcgtcgtctttgaagttcgcaactccatgaacaccaaccccggtacaatcgtgcaagaagaaactccctccatggaagccgtcgtcatccgcggcatttccattgaccgcaaccaggcccgcgttaccattaccggcattccggaccagatcggctacacggcccagatactgggcgccctggcagaagcggaaattaacctggacatgattctggccaataccgctcatgacggctacgtccgccagtctttcaccatgccctccaacgaactgggccgcgcccaggcggccctcaagccggtcatggccgccctgggttccaccgtgaaggtggaaacggaagcgggtcttgccaagctttccctggtaggcatcggcatgcgttcccactccggcgtgggagctaccgcgttcaaggccctggcggacgccaacatcaagaccggcatgatttccacctcggagatcaagattgccgtgatggtggacgagtcagacattgaggaagcggcccgggtggtgcacagggcgttcaatctgggcgtctaacccttccccctttttttcaggcccggttcacggaaacgtgaaccggttttttcatgtattttcccccctgtccgggacagggaggggaatgctgaaatacaaaaaaaggcctgcttcctgaaaggaaccggacggggagaggaaacatgcccgggcaacaaggaagggcctgccggaaagagggaaagaaaaaagagtaaggcgttatttgccggaagagggccggaagcgggcggcctccgattctgcggtgatcctggcgggttcgatatgaaggagtttccttatagcttgaccccgatcgctctccgtcatcgggaagtaaatgacgtcgtctcccagatcataggaatccaggcccgggatactgtccgccggagcaaaagattccggcgtgtccggcagtttttttacctccttggaggaggcaagggcataatacatataattaccggaatacagttccgttttaggggagctgcccggttccggtttggagaagctgcccgcagagtgtttatgggaagcccagctccactggatcaaagcctccacgggaatgtccccccggagggattggacgacgcgggcgtagtacgttatctcctggtccgtttctaccgtcttataaataataaccgccaggagaatgtcgcttctccgcaggtacatggccgggctgtaaagagaagcatccgcggccacttcagcctgcgtgggaaaggggggggaagatggcgccgcgctggccgatacgggtatcagtccggaaaacaaacaacaaaagagtggtgttttatccatagaaatgggtagattactttcttttccattatgttcaaaaacggagcgaatgctttaaaagcattcgctccgtaaaaaagaagttgatgaattattcagcgtctttcaatgtcgcccggttgattaaccaaatggggccagtcaggaaactgccaatggagatgttgtctcccggacacattcctgcgtgaccctttccggcaaacacaataatgtcgcctggctgcgggctgcaatagcctgtatcctggccgtcggcatagtccgggtcgcccaggagcttttgcacacaagcagccatgtcccttgcacggatgatcacgtgggttttacctcccagcgcatcggcgttcgcctcggctccgatgggcatagccccggcttcattcttcaagtcctttccgaaggaactcagcgcgatactcatgcgcagggcgcagctgttataatagctgcgcaattgctcaggtacattgtcctcaatttccttcaggtgagcctgatagagccaccccccgatgtaggaccaaacctgtccgggattgggcatggtgacataatccaccatattgtagcatttcagcagtttttgggcatcctccgtcttccagagattgacgggggcatcaatttcccaaagttccaggtcagccccatccatttgaggaacgaattcttccgcattgggatagggggcaatggcatccggaaccttcaggttctcatgatggagcttgacgtaatggtaaccttgcttgagttccttcttgccctccgccttcttggatgagttgccgtccttgagttccaccactttctggttgtctatttccaggtaaccgttgtcgtccatctgaatggtaaaggcatattccttatcaaagggaatacggatgtatccttcccagtcatggacgccggtttcttccgtcttgtgccagacgattttgggagcgtcttttttcttcaccttgtaacgaggattattttcagcgtcgagcgggtgaaatggtatagttgatatagccatagtgtttatgttttcaattcatttattgttgaatgaactggtcattcagtccatggtcaccttgaaagatttccctctccccatcaacacgttcaacgcgtattcggcagacaggaaaagggccgaaacggcgcaggaatcaggtgaaaataaagggcatcaaaaatacaagcattgatggccaataattaaacattccaatctctccgtcccgggaggaaataaatgcgccttccgcctgcacattccggaattttgccaaaccgtctccaatacgaaatataagaggcgcctccagaaggaatatacctctccggactattgacgagtgttcatctacaggtaattggtcatttttccctgtaaccatgcaaaggccgcaaaggaaattcctttactgcacccgtatggtctgttcaatcagttcgttcaggcggggggcggaaacgccgccgaccatttccttcagcttcatgccttccagatacaggaccgttagcggaacggcttccagcccgtacttgcgggccacgtccggataagcgtctgcgtcaatcagcacggcgaacgccttgccgtcctgcgccgcggcataggacttgaccgcctgcacgtagtccgtggccgggcggctccaaggggcataaaagacaatcagcaccttgcggccggagagttccgtgagctgcctcatgtcctcccccttgtagtccatccacacgggggccttctttttaggctccgcgggggggagaacttttttgggagggtcaaacgttctttccagggggcgcggagcgggcttcttctccgcgtagcgggcgcgccgttcgctggaatcgtcgcatccggtcaggccggccatcagcaggccgctgaccaatatgaacaagccctgtttcattccgcaggcaagtatgcccggggaaggcgaatttgcaagactgaaacccgtcccgcttttcgcgttgcccccgcccccccttctctgttatggtagccgttgcatgaacggcgtccctccactggaatttgcaggggtttcccactgggcggctttggccgttcttctggcggcgggagtttgcatcatggaactggggcagtcctacaagaaaaccgtcaggaaccgcactacgttctggctgggagtcgcctgtctgttcagcctggttccggacctggccgccatgctggcggatgaaccggaaaagagctggacgtggatgcttcccctgcatttctgctccgtcatgcaggtgctctgcgccctgagcctgtggattccctcccgcctgctgcgctccgtggtgtactactgcgtgctgtgcgccaccttgcaggggctgctcaccccatccgtggcccacgatttcccgtcgtggacgtacttcgcctttttcctgtcccacggcgtaacggtcatcacggccctttacctgccgctggctctggaatggaagccggcgcggtgggatttcctgtgggcccttctgctggcgaacgtatatctggccgccgtccaccccgtcaacatgcttctggaaaccaattacggattcaccgtggctacgcctgcgggcggctccgtgctggacctgttcgggccgtggccctggtacctgctgtggatgcagattccggcgctcgtgctgatgtacctgctcacgcttcccttccgccattatcccaggggacgcacgggcagttccctgttccatcattgagaaaggccccaccatccgcgccaggctgttcatgccggaactactgcgaaagaggaaaggcgcggactcccgattccgggcaagaagggccggaacgagccttttattggacaataggcttgaggatgccgatgtaggtgtccgacgttccggttccgcgataaatggaatctatcctgatcttgatggtgtgcacaggctgcctgtagtacggcggcacgacgatctggggcgtccagtcatcccgcagcgtggcgtcaaaggtgtaattcccgttcagcgttacctggatgactttggggcggctgaacatggaataggctatgttcggatgccgccgcgcttccgtatccctttccggattggtcaccggggaaatgccggtttccagcatgatgcccagcagccgtcccggattcttgagcttgatttccagggtttctccctgcccgtctccggaaacgccttccgcccaatagccggtgccgttcttcaggttatccggggagcacggcgcgccgtaggggtccttctccagagtagagctggccgtcacatcatactggtccgtcagggttcccttttcaccgcggatggtgacctggccgtccttgtccagcacccagccggggccgggcgtcagcaccacggaggaagcatagggcctgccgtccgctcccagcagggaccaagtataaacgcctttgggcgtagtcacaatggatttggcatctgcggacgggtccagcttgacggattggttggtcatctccgagctgtatacattcacgaccgccctgggggtgcctcccgtccaggtcatcaccggagaggcgagcagcgtcagacggggttcccccatgttgaccttcggttccggcgtaatggcaatatcctgcgcataaggcacggaaaactggaaggtaagcacatgagtacccgccttgttgggaacctgggccaccagccagtgggtgattccggcaacgggggacatggtgggagcgtccgcctgaagatgccgcccttccaccagggaggaatcacatttcaaatcgtccacggacgtcacgacgtcctgcaccgccttcgtaaaaggcaggttgcgtatgggctccggctttgcggcattggcctgttcatccggcggatcatactggaacggcacgcccacggagatggtcttgcccttgacgcctttggggatgtccagcgcgcaggtgtaaatcagaaaggcctggtgctgtttcagggacacggtaacgtccagggcgttcagccggattccgtccgcctgcgtcaaatccatggggaccggcaagccgggcgccggagcaatgcattgaagggagacgttccgcgaccggggctgcggggccttttctgcggcgctctgttccttatgctgagggtctgcggccaggaccggcatgcagcacacggcgccggtcaaccagatcagggtagccaatctcatggccgttaaaataacgccttgcagcacgttcatcaaggctcatttgaggcagatggaaaagccttttcctcctcctgcttcccgccttaaaaaacaagggagaagccattttttaatccgtaaaatccgtagccggcaggcattcgtttcaagcccaggaatgttgtcccatgttttttaaaagggcttgttgagactttttcggaacgactttttaccggatgggtgaagagcagcgcccttatgaaggggagcagaaggaggccgctcccaaccggatagaaaaccggcatggacatcagatgcttcatcatgttactaatcaacaaaattcattcactggtaataatcaacaggaatttttcacataacaggaaatacacgctgcaatacccatccatccggccccttaacgccttcttattgccgggggtttcccatggaaaagccccctccgggaggggcgaataacgttctgcaggaaggcgcccgtcaagcaaaaaaaatggagtgtcaggcagacaaaaaaaattcacgcaagacaggagcaaaatttctcggaaaccgggataaagcacaacatgtgggatacatgaaaaaagactgtacaatatttccttttcatcgcgattatttttcagtagataatgcaaacgctacgcgccgccccaaccccgcgacggagcgctgcctcacgggatttctcccaaatgctttctacttcgcaagccatgactatagacaactcgcaaaccatactcaaactgcgtacaggacaggaaatcatcctcccccagaggaaggaccttctgggcggtctgaaattcaccagaagattttcccacaacgaagtccatccctatgatgaagtggactggacccgccgcgacgtccgcatcatggactggaagaccggcaagaccatttacgagcgcctgggcctggaagcgcccgcgcactgggatgacaacgccgtcaagatcacggcggacaagtaccttttcggcagtgaaccggggtccctggaatatgaagacagcttccgcaatatttacgaccgcatttccaacacctacaccgtatggggctgggaggaaggctacttcgccacgctggaggacgcggagattttcaacgaggaaatcaaggccatgctggtgcagcagatttgggctcccaactctcccgtatggttcaacatcggccactgggaacagtggcgctggggccgcccggacctgcgggaaagctataccggccacggcaacaaggcctaccacaccaagggcaccaagaacaacctgaagaccttcacggtccagtccacgtatgaatatccccagtgctccgcctgcttcctgacggaagtgggggacagcatggaggacatcctggaccacctgaccacggaaggccgcattttcgcgtccggttccggcgtgggcatcaacctttccaccctccgttcctccagagagcccatcagcggcaagggacgctcctccggccccatttcctttgaccgcggctgggaccgcatggccggagccatcaagtccggcggcaagacgcgccgcgctgcgcgcatggtgctgatgttcagcgaccacccggacattttcgagttcatcagcacgaagaaccgccaggaagacatcgccaaggtgatcctgcgcgagcacaacgtgcacgtggagctgaagcagattgcggaaaccaagctggtggcgggaaccccggcggaaaaagccgccgcgcgcctcattctttccctgccgctggctacccggaacagctttgacccgcacatggacgccctgctgtacggggaaacgctttcccaccagaacgcgaaccattccgtctccctgaaaggcgatttctggcaggccctcgccaacaacggcaatacctacacgcgctgggtcacgaacccggcccacattgaacagactttccgggcccaggaactgctggaagccatggcgaagtccatctgggacaacggggagcccggcgtgcacaacaatgacgtgatcaacctctggaaccccgtcaagtccatcggctccatcactacctccaacccctgctccgagtacgtcttcctgaacaatacgagctgcaacctttcctccttcaatgcctaccgcttcctgacgaaggatgaggacggcaagcccgtcttcgacgcggacgccctgacccacgccgcgcgcctggcgatggtctgcgctgacctgaacgtggaacgcggcggcttcccgattgaagagatcgcggaaggcacctacaagtaccgcaccacgggcatcggcttcgccaacgtgggcggctccctgatggcgctgggcgttccgtacgattccgacgaaggccgctggattgcctcccagctttgcagcgccctgacggcggcctgctggacggcctccgcggagatgggcgcggaactgggttcctacgtggaataccccgccagcaagaaggacctgctggccgtgctgcgcctgcataacgcggcccagaaactggcgaccgccctgccctcccagaaggattccaagactctggacgacctgattgaaaacatcatcgccaatgccggcggagtgctgccggaagcgcaggggctgaccgcttcctacgccctgcacgcctacctcaagagcttcaaggctcccaccctgatgaacaaggagcgcatcgcccccgccgccaagctggcggaagccgcctccgggatgtgggccaaggtcgccaaggccacggcgcaccgcaacgccttcgtctccgtgatggcccccacgggcaccatctccgccccgctgggctgctacgatgaaggcaccacttccattgaaccggattacacgctggtgaagtggaagcagcttgcgggcggaggctccctgaaaatgttcaaccgcctggccctggaaggcctgcgctccctgggctatgcggaagacttcgtcaatgaagccgccctggaagtggccggcctggacggcctgatttccgcgttccaggggaatatggacgccgtcgtgaaccagctcatcgtggacccctgcaacgaccaggccggacccgtgcgcctcgcgtggcgccgcctgctctccggcacggaatcccgcagcgagattcaggaaaaggtggcctatatcagcaacccggccaacatgtccgtgctgacggcgaatgaactgaccgtcatcaatggctccgcccacattgaatccatcccgtggctggacaagaaggaccttccggtctttgactgcgccgccaccaacggcaacggcatccgcgccatctcccccgccggccacgtgctgatgctgggcgccctccagcccttcatttccggggcgtgctccaagacagtgaacatgcccgtctccgccaccgtgcaggaagtctacgattccctcatcatgtcccatgacctgggcgtgaagtgcatcgccatcttccgcgccggctccaaggcgaacgccgtttacgtggtggacacgccggaaacccgcatgttcaaggccaaccacgtatgggaacagctggtgaacgccggaacggaagccattgacgaaattattgcggaagcgtccaagccgcgccagcgcaagctgcccggtcgccgcctgggccagaccgtgaagttctccgtgggcggccagctgacgggctatctgacggtgggcgtgtatgcggacggtacctgcggagaagtcttcggccgcctgggccaggtgggctcctttgcctccggcatgtttgaagcctattgcaaattgctctccacggccctccagttcggcgtgccgctcaaggaagtggtcaagggcttccgcaattactcctttgagccctccggcttctgccgcgtgggggacgatacggaggcggacacctgcacggaaatccgttcctgcgcctccgtggtggacctgatcgccaagattctggcgtggctcttcccggaaagcaacggctaccgcctgcgggacgtgttctccatcccgagcgtcagcctgcccggccaggctccggacaccacggtgagcgtgctgcccccccgcatcatcaccgccccggtgcaccttgaaaccccggcgctgccggaggttcccgccgccggcaaggcgccggaaggcaccatgcttaacggcgcttccctgtgcccgcagtgccattccctggcctacgtgcaggacggcaagtgcaagtcctgccgctcctgcgggtataaggatggcggctgcggagaataaacggtaaacggcttattcccgtaccctctatttcaaggcggaacccggccagcttccgggttccgccttgctgatgctttccccagctccaatccatcagaatcaatcaaatggctatgtggaacccatggcgcggatgccaccggtacagcgccgggtgcaaattctgttatattcatcaagccgacagacggaggggaatgaatacggacgagatcgtgaaaacagacaattttcatgcccccgtgctgaagaataaaaagggagattacagaatgaaacccggccagaccgtgtatctgggcttctccacggattttctcatccgggaggcggacccatggcgcggcgaatgctggaacatgatccgggaacgccgggacctgaattttattttcctgaccaaaagaattgaacggttcatggaatgcatccccggtgactgggcggacggctatgacaacgtcaccataggctgcacggtggaaaaccaggacagggcggatttcaggctccccatcttcaacaagcttcccatcaagcataaaaacatcatttgccagccgcttcttgagcaggtggacctggccccgtatttgaaccagattgaactggtcgtcgcaggcggagaatccaacagctgcgccaggcccctgaattatgaatgggtcttatccatccgggaacaatgcatccggagcaaggtccattttgaattcaggcaatgcgggacaaacttcatcaaagacgggaaaatgtaccgtcttcacgtcaggcagctatgcagccaggcgaagaaggccggcatcaactgctgacctcctgcccggcgtgcggcagaaaaaagcgccgcccccacgcgttccggactacggggcaaaaaaccacccggaagaaggaatgataggcgtttgccttgaaatccggcgtaatttcattcatagtacagcgtgaacgcctgagcccgttcctctatctttccatgaaaccctactacaccctggccgatcttctggatgaagaacatccgtttgatgccggagaatccgttcccgccagactggccgtgatcggcttccccatcgcccattccaaatcccccgccatgcagcaggccgctctggatgcagcgggcatccgtgcgcgctacatccgcatccaggcttctccggaagagtttgcggacgtggtgcgcctgctccgggaaaaaggattcctgggagccaacgtcacggtgccccacaagcaggccgcctgctccctgtgccatgatacggacgccctctcccgcgctacgggttccgtcaatacgctcgtctttcaaaaggacggctctgtttccggcttcaatacggacggtccgggctttggacgcgccatccgggaagaattttccgtggacctgcgcgatttgaaggtggtgcttctgggcgcctgcggcggggccgggctggccctggcctacacctgcgccatgcagcactgcgagcggctgacgctggcaggcaggtcagaagaaaatctccaggcccttaaggacaaactgagttcctttttcattgacgaacacaggctggaaggaccatccgaccgtctggcggcccacctgaacaacacgccgcggttcaattccgccgtggcggaagcggacctgatcgtcaacgccacgtccctgggcctgaaacctacggacccctcccccgtgccgtccgccctgctttccgcccaccacctggtgtatgatttacagacgcatgacgacgctttccagatggaagcccgcttccagggagccagggtctccaacggcctctccatgctggttcaccagggggccctttcctttgaacgctggttcggcatcaagccggacatttccgccatgcgccaagcccttgaacaaaagcatgcctgacaccaaacccgattttgacatccgggctttccggaacgcgctggtggagtggttccggcgggaggggaaggattacccgtggcgccggaccacggacccatggcacatcctggtttccgagctgatgctccagcagaccaccattcccaccgttctgggaagatatgagcggtggatgcgccagtttcccactccggggcatctggccgccgtggacgaacagacggccctgcgctcctgggaggggctggggtattaccgccgcgtgcgttccctccaggccatcgccagggagattgtccacgaattcggcggagagttcccggacaacccggaagggctgaaacgcctgccgggcatcggcccgtatacgtctggggccctgctttccttcgccttcaacaaggccgctcccatcgtagacgccaatgtggcgcgcgtgctggcccgcattgacaattattccgtgcccgtggattccacggaagggttgaagtacctgtggacccgcgcggaaaacctggtggatccggaacatgcccgcgaattcaattcagccatcatggaattggggcagacctactgcaggatcagcgcgccggactgcctgctctgccccgtgcgcccattctgttccgcggagcagccggaaacgctccccgtcaagaatcccaagccggaaatcacgcgggtggaacaccacgacattctctacctccgcggtaaatccatcctgctggcaagatgcccggaagggaagcgccacgccggcatgtaccgtttcccccagcgggaggacgaccacaccctttccctgcctcatgtcctgaaacagacctacagcgtcacccgctacaaggtgacccgctacatccaccatgtggcggacgccccggccttccgggaaggagaggagctcgtgccgctggacaaggttcacgagctgcccatggcctccccggaccgcaaggccctgaattcccccgtcctcggcaaactgctggaccatatcagatgaatcccagactgacaccggaactggttctttccgcctactgccaggggtgttttcccatggcggacccggaaacgggggaaatttccttttacgaaccggatccccgcgccctgattccgctggacgaacgcttccacatccctcacggtctcaagcgcgtcctgaataaaaaaccttttgaactccggatggataccgcttttccggatgtggtccatgcctgcgcccggacggacgaaccggaggaacaatggatagacgggcagattgaggaagtgtacggcaggcttcacgagatgggatttgcccacagcgtggaatgctgggatgaggaaggattgcaggggggcctttacggggtctccctggggaaggcgttcttcggggagagcatgttccaccggaaaacggacgccagcaagattgccctggtggccctggtgcagtacctgcgtgcgcaccagttcctttttctggatacgcagtggactacgccgcatttgctgaagttcggaacgtacgaggttccggcgggggaataccggaagctgttgaagagggcgctggaggggtgaggagaaaatttggagtttatttattttaatggacaaaatgggaataaatggacagaatgaactccatggacggaatgtctcatggatttattcccaagcatggaggataccggaatctggtggtataccggattgcggagatcatttatgatttcacgttccggttctgcaataaatacgtgaaaaatcaaggccggacctatgaccagatggttcaggcagcccgttccggcatgcagaatatcgcggaagggagcgtggattcaggagtcagcaaagcgtctgaattgaaactgacgggaatcgccaagggaagccttcaggaactaaaggaagactacccagcggggactggaacagtgggaaaataacagcctttacgcgcaagagctgatcagggccaggtttccttccgcacaggaagttatccggtgggtgggcaagcacaggaatttccgcccggaccattttggggcaaatacagccgttatcctcattaacgtggcccttggcctgcttgctaaattgattcaagcccaggaaaaggatttcatgcagaacggcggcatccgtgaacgcatgacccgcgcacggctggaacagcgcaaacacagaggcaaataatcttcttgtttaatattttggtccactccgtccatcaagtccctttagtccattcctcccccctctccacaaaaaagcccgtggctccggagaaccacgggctgtctattaacccttaacaaaaaaggcttacgcctgttccaaagctgcctgggcggcggccagacgggcggtcgggacgcggtagggggagcagctcacgtaggtcaggcccagcgtgttgcagaacttgacggaagcggggtcgccgccgtgttcgccgcagatgcccagcttgatgtccggacgggtggagcgaccgagttccacggcaatcttcatcagcttgccgacgccttcctggtcgatggaggcgaagacgtttttcttgatgatttccagttcctggtactgcggcaggaaggagccggagtcgtcgcggctcatgcccaggcccgtctgggtcaggtcattggtgccgaaggagaagaactgggcggtttccgcgatttcgtcagccgtgacggcggcgcgcgggatttcaatcatggtgcctacgaggtagtccaccttggcgcccttttcttcaaatacctgcttggccaccttgtcaatgatggctttctggatgtccagctccttcttgaaggccaccaggggaaccatgatttcaggaaccacggcgaagccttcttcctgggagacttccacagcggcttcaaagatggcgcgggcctgcatttccgtgatttccggataggcgatgccgaggcggcagccgcggtggccgagcatcgggttgaactcgtggagttcagccacgcggcgcatgatgacttccacgggcatgcagattttctgagccaggtcaagctgctgttccttcgtctggggaaggaattcgtgcaggggcgggtccagcaggcggatggtgcccggcaggcccttgagcgccttgaagatgcccttgaagtcgcccttctggtagggaaggagcttggaaacggcggccacacggtcgctcttcttggtggaaaggatcatttcacggacgaagtcgatccggtccccttcaaagaacatgtgctccgtgcggcagaggccgataccggtagcgccgaaggcgatggcggtttccgtctgcttgggggagtccgcattggtgcgcactttcatcttcgtgcagtcgtcgcaccactgcatgagcctggcgaagttctggtaggtgcggctgtcttccggcttcatggtcttggagatcagcacctggatgatttcagagggggaggtttccaccttgccggcgtacaccaggccgctcgttccgtcgatggacatgtagtcgccttcattgaaggtcatgcctccaacggtgacggtgcggttgttgtagtccacgatgacttcatcagcgccgcagacgcagaccttgcccatctggcgggcaacgagggccgcgtgggaggaaacgccgccgcgggcggtcaggatgccttcagcggcaatcatgccgcgcaggtcttccggagaggtttccagacggaccaggagcactttttcaccgttgtccgcagcttccacgcagcgttccgcattcaggtagatgcggccggtggcggcgccggggccggcgggaaggccgcgggtgagcatcttggcctgcttgatggcttcacggtcaaagatgggggtcagcagctggtccacctggtccgcggggatgcggcgcacggcggttttccagtcgatcaggccctgctccaccatttcacaggcgatgcggaaggcggccacgccggtgcgcttgccgttgcgggtctggagcatgtacacggtgcggtcctgaatggtgaattcaaagtcctgcatgtcgtggaagtggttttccagcacttcgcggatgcgcatcagttcattgaaggcggcgggcatcacgtcgtgaagggccgctacgggagcaggcgtacgcacgccagccaccacgtcttcaccctgggcgttcatcaggaattcaccgtaaaattcgttttcgccggaagcggggttgcgggtgaacgccacgccggaaccggattcttcacccgtgttgccgaacaccatggcctgcacgttgacagcagtgccccattcggacgggatgccgtatttctggcggtaaacgatggcgcggtcattgttccaggaaccgaacacggcgccgatggcgccctggagctgttcccacgggcattccgggaattcatggccggtgcgttccagcaccagcgccttgaagcgggagaccagttccttcaggtcatccgcggagagcttggtgtcttccacgtccgcgttgccgtagcgttcttccttgatggcggcgatagcggcttcaaagggttcgtggtcttcatccgggttcttctgcacgcccagcaccacgtcgccgtacatctggacgaagcggcggtagcagtcccacgcgaagcgggggttgcccgtggccttcaccatggcttccacggatttttcattcaggccgaggttcagaatcgtgtccatcatgccgggcatggattcgcgggcgccggaacgcacggccaccagcatgggcatggcttccgtatcgccgaacttgcgtcccaggatctgttccatcctggcaatgccttccttgatctgcgcgtcaagctgggcgggataggtgcagccgtgatcgtagtagtaagtgcagacctccgtggtgatggtgaatccgggagggacaggaaggccgatgcgggccatttccgcaaggttggcgcccttgccgcccagaagatttttcatgctgccattgccgtcggcggaccctccgccgaaggaatagacgaatttgtcagtagatgcgctgcatgcgcaggaattggtggacatatcgattgttgtagtcgaattaatgattctgcccaaacatcaaccacaggagccaacaaaagacccgatagcgagttagggtcgagtaaggatgcccgccgcccctcgctttgtcaactcgaaattgtaaggaaaacggaaatgttttttatgttttttagggaaaaataccttccgctttttctccccgtctccgtgctcccggctccatttttcaaagcgattcccggaaggaggaatccggctcgtaataaaggatatccaccggacattccacataaatggtaccgcccgtccaacggagtaatggaagaatgatccccgggattctataattccgggtgcgggctaccgtcattttacccttgatccgcacattgggaggttccgaaatataacagatatcctgaatttgctttcttggcacccggtcgatgtccaggattgcgcggcctgtaaaatggtaggatacatccgtggaaaaaaccagaatattggaactgaagttgctgtacccggccttgcggcatgcttcctcccccgccctctgcaattcttgcgaggctgtggaggacaaaacgttggaaagaccttttatgtgcacagggctttcctgggtaatggagcaggaggaaagaaccagcaaggagcttcccgccagaagaataggtttcatgatcttgagagagaatattaaattaacccgagttttccggaacggataattgtccgccggaagttggggttcttcaagacagctttaaggattcacgaggacgccggcagcggcggcagtccttgtaaataaaaagcggacgcttatcaaccagataagcgtccgccggaaggaatatgttttttatttttacgccttgcagaaggtgtcttcatccgcgcaggcggcctggacccacttgacggaggaatcactggaggcgatatgcaccaggcagtggtacacggcttcctggtccgcatccagccgggcagctacctgggcggcggtttccggggtggagccaagggccgcccttactttccccagcagggccaggaaggtccccgcggcctttttgccggcctccacgccgggctggtggtaggcgttgatgttcacgagggaggcatagaaggagacggcgcgctcaaacagggcgaccagcatgccgagcgttttggcgttcacttccggaatggagatggtgatggaggaacggccggattccgccagagcctggcgggtgccgcgcaggaagccctggaggaagtctccgcaggtggcgcccgcttccacttccaccgcgtccgcggaacattcccgcacttcgataaaggtggcgaagaagttgttcacgccgtcgcggagctgctgcacataggcgtgctggtccgtggagcccttgttgccgtatacggagatgccctggcagacttcgttgccatccaggtccagccgtttgccgagggattccataatgagctgctgaaggtatttggagaagagcaccagggcatccttgtaggggagaaccaccatgtccttttcccccttgccgttggtggccttgtaccaggccagcgccagcttcatggcggcgttgcatttcacgcagtcctggcgggtcttttcatccatcaggcgcgcgccttccagcagttcatccacgtccacgccctgaagcacggcgggaaccaggccgaccacggacatgacggacgtgcgaccgcccacccagtcttccatcgggaagcgcttgagccagccttccgcttcagccgttttgtccagtttggagcccacccccgtgacggcaaccgcctggggcgcgaattccagtccgttcttcctgaagaagtcctgggccaccagcatgccgttgcgggtttccggcgtgccgccggatttggagatgacgacgacgagcgtttcttccagcggcagggattccagcactctgtacatgccatccgggtccgtgttatccaggaagaacatgtccagcccagcggcagggatggcgtccgccaccagttccgggccaagggcggaaccgccgatgccgatgacgagggcggcggagtattgttccgcgcggggaggcgtgattttgccgtccagaacatcccggccgaaggccttgacgtccgccagaggtccatcaatggcggctttcagttccggcgtgggagccagtgcggagttgcgcagccagtagtggcccaccatgcgtttttcatccgggttggcaatggcgccggattccagcgccttcatgtcggcgaacgccctgtctatccgcccctgcatggaggacaggaaggcgtcgtccagaggaagtttggaaaagtcaagggagatgcccagttcagggtagcgaacgagttgttgtgcgtataggctcatgatagtaatggattggaaaaagagttactggagttttttcaggatgcttttggcctgcacgtcatcctggtccgccgctttctggaaccattcccgggccttggccatatccttgggcagtccaaagccggtctggtacatcacgcccaggttgtattgctccgaggcatagccttccgccgccgcccggtggcgtatgcgggattgttcccgggcttccgcggcggacaggcccagggcccgcgccgcatccggccacgtggctccgaatttggaggcggagggggcatagccggcagctccggccttgcggtgcatttcgtccgcttttttcttgtcccgcttcacgccgtatttgcccagatcatacaggaacgccatgccccagtagccgcgggggctgcccagctctgccgcctgctggaagcattcaaaagcgtcctcatattttttggagcccatggcgcgcacggcatcggagatgtggagctcggcttccttcaagccggggaattcagggatggcggcccattcccttttcagttcatccctgtcccttttggaggcggggggcatgccggacggcccggaaaaacggaagagggggaaatacccttccatggctcccatgttgcccagaccggacatcaggaagacgccgggggataccctccacatgtgcatgtactggatgcggccttcctgaagggattctttggccacccattccggcatgttcgccggttccccgaatttttccgtcaggcccaccagaagagccttgtaggcggatttcaatttggtttcatactcggaaccgcggcatttgctccgggagtagaagacaacggccctcaagccgccggaggggtcatagtcaaagtttagggaaaaggtctggccgccgatggactgtttggtcttaaatacgccgttgaggccggtgcgtgaaaggagggcatccgtgggcggcccttcaagctgcttgctctgcctcagggttttcagcacctggtccttgtccattcccacttccaggttttcatagagggcggcaagcagaggggcgcacgtaagcgcgaagagtcccgcaacataggctagttttttcatggaaaaagtaattgggcggtttcctaccagaccgggacggttttcaaaaggataaaatgcgtcagcggaagtgaggaaaaattttcataaaatatttatttccaatctatccacaatcttttcagataatcctcccccgtgaagtccgggggcatggaatcatgggtcagccggaagcccggaacggcttccgccaccatcctgcggaagtccgcgtggctcagcttgcggcagttgctggtgcacagcatccagccgccgggttccaggcattcgcgcgcctgggccaccagttccccgtagtgggattccacccggaacacccttccccggtcatcccgggagaacgtgggggggtccaaaataatgccgtggaaggagcggccctgcctggcgaaccgttccagccagcggcggacgtcccccttgcagaagtactgggtggagggatcaatgccgttcaggctgaagttttccctggcccagtccaggcacggctgagccaggtccagcgtggtcgtctgagcccctcccagggcggcataaacggaaaaggccccggtataggcaaaggtgttcagcactctcatgccgggggcgctccgttccctcacctggcggcggtggtcgcgctggtccagaaagattccctgggaataaccggtggacatgtctattttgaaacgcacgccctgctccgtgaccgtaaattgcagggggagttccggtccggctatttgcacgggcgcctccttctgattctgttccagccttttgtggaacacggggatatccagttcccggagttcgcgctccaaatccgcagggatgggacaatcccgcgtggagaccagaacacggtctcccatctggtccgcaaatacgcccgggcgcccgtccccttccccgtcaatcacgcggaagatgtcggtatgggcgggaatcaatccttttttgcagtccaggcaatggcggtaggtgcggctcacggcgggacgagactacggaatttgacggcggggggcaatgcaaaagcaatgaaaaggggggagaatcctgtgggtgcagggctgttccattgccgcggaaatggacttcatggacttcatggacttcatggacttcatggacttcatggacttcatggacttcatggacttcatggacttcatggacttcatggacaaagtaaagattaagtccattctgtccatcaggtccattcactgccattccggatgaaagctccctatggagagagtccggggagctcacaaaaaagggagccggatcccacgatccggctccctgatgattgaggctgtttttccaacgagggccttagtcggcgtattgttcgttgagggcttccatgatttccttggaggcttccgggatgttggtgccggggccgaagatggccaccgcgccgtgttccctcaggaagtcatagtcctgggcgggaatgacgccgccgcagaagaccaggatgtccggacgcccctgcttggcgagttcctccaccagggcgggcagcagaaccttgtggccggcggccagggagctcatgccgatcatgtgcacgtcgttttcaatcgccattttggcggtttcttccggcgtctggaagagcgggcctacgtccacgtcaaagccgaggtcggcataggcggaggagaccaccttggcgccgcggtcgtggccgtcctggcccatcttggcgacgaggatgcggggacggcgccccgtgcgttcggcgaagtcgtccgtcatcttgcggacttcctccaccagcggatcttgaccataggtttgagcgtacacgccggtaatgagtttgattggtgctttgtggcgcccgaagtgtttttccagggcggaggagatttcacccagggaggcgcgggccttggctgccttgatggcaaggtcaaggaggttgccttcacctgtgcgggcgcattcggacagggcttccagcgcggcttcgcacgcggcggagtcacgttccgcgcgcagcttctgcaggcgggcgatctgggcgtcccggacggtggtgttgtccacttccagaatgtccatcttggcttcctgttccagacggtatttgttgacgccgatgatgggctccttgccggagtcaatggcggcctggcggcgcgccgcggcttcttcaatgcgcatcttgggcagcccggtttcaatggccttggccatgccgccgagtttttccacttcctgaaggtgggcccagcccttgcggatgagctcattggtcaggtattccacgtagtaggagccgccccacgggtcgatcaccttgcagatggtggtttcatcctgaagatggagctgggtgttgcgggcgatgcgggcggagaagtccgtcggcagggcgatcgcttcgtccagggagttcgtgtgcagggactgcgtgtggccgcaggcggcggccagggcttcaatgcaggtgcgggtcacgttgttgaacgggtcctgttccgtgagggaccagccggaagtctgggagtgcgtgcgcagggccagggatttcgggttcttggggttgaactgcttgatgagcttggcccacagcacgcgggcggcgcgcattttggccacttccatgaagtagttcttgccctgggcccagaagaaggagaggcgcggggcgaaggcgtcaatgtcaatgccggccttgatcccggtgcgcacgtattccaggccgtccgcaagcgtgtacgccatttccaggtccgccgtggcgccggcttcctgcatgtggtagccggagatggaaatggagttgaatttgggcatgtacttggaggtgaactcaaagatgtccgcaatgattttcatggagggatcaggcggatagatgtaggtgttgcgcaccatgtattccttgagaatgtcattctggatcgtgccggagagctggtccagcgtgcagccctgttcctgggcggtcacgatgtagaaggccagcacgggcagcacggcgccgttcatggtcatggaaacggacatcttgtccagcggaatgcccttgaagaggatttccatgtccaggatggagtccacggccacgccggccttgcccacgtcacccaccacgcgggggtggtcggagtcatagccgcggtgcgtcgccaggtcaaaggcgatggagaggcccttctggccggccgccaggttgcggcggtagaaggcgttggattcctccgccgtggagaagcctgcgtactgtcgcaccgtccagggacgggccacgtacatggtggcgtacggtccgcggaggttgggggccacaccggcggtaaagtccaggtgcaggcagtcgtcgtacacgctttccgagtaggtgggcggcacgggaatctgttcattggtcatccaggtttccgttccggaagccgtggccggggcgccggccttgatttcaggataggaggcggatgcaaaatcaggaatattgctcattgaatgaaataggttggtggttgttagaggccgatcttgttctggatagcttcaacggtgttgtagcagttggccttgacgtggatgaagatatccacgccggcttccttgaacacttccacatggtcggccggataaccggcgagggccaccatcatgtccggcttgatttccttgagcgccttgcagaaggcgggaacgatttccggataggtgtcgtccgtggagcagatcacgcacacggcgcagccgctttccgcagccgccctggccgcgtcttccggggtctggaagccggacgggtaaaccacgtccaggccgccggcgcgcaggaagtcgcgggagaagtccgcacgggccttgtgctggcgcagcgggcccatgttcgcgaagaataccatcgggcgggagcctttttcctccacccaggcatcggccttggcaagcagggattcaaagcgttccgccaggcggcgcttcggcagggcttccatttccagcggttcgccgcacttgcagtcggcgccggccacgagagccttgttgataaggcaggtggagaagccttcactggcggccttgcaggcggagtccacgctcatttctacttccgggagctgcacgtccgcatttttgcagcagccgtgtcccttgggagcggcgcaggcggcgccttccggcgtttccagctttttctccgccaggttgacgtactggttgacgcccacgatggactggcggcgctggtccgccagttcatagcgcttggcggcggtggcgtttaccttcttctggatggtgccggccttgagggccttgatgatgccgccttccttttcaatgccctggaagacgtcccagattttccgggaggcttcgtccgtcaggttttccaggtaccaggaaccgccggcggggtccactaccttgtccaggttgcattcgcccagcagaatcagcgggcagttgcgggcgatgcggcgggagaattcgtccggcatgcgcacggccgcgtcaaagggcagcacatcaatgctgtccacgccgcccatgatggcggagaaggcctgggcggagccgcgcagaaggttgacccacgggtccaccttggaaagggtccagaaggaggtgcgggcatgaagcttgattttggcagcttcctcactgccgccgcattccttcacgatgatggcccagagttcgcgcagggcgcggattttggcgatttccaggaacaggttggctccaatggagaccgtaaagcgcatgtgcgcagcagcttcattcacggagatgccgcgttcctccatggcgcgcaggtaggccacagcggtagagagcatggagcccacttcttcaaaggaggaagcgccggagtccgcataaggcagtccgctgacgccgatggtctggaaggcgggagcgttggcgacggcccatttggtcatcaccgccatctggtcatagtaggcgcagatgcccttccccccgcagagggagcccttcatcacggccttgcccaccgggtcgtacagaacgccgcccttgaggtccgccgtgttgaatccggccgccttgtacgtgttcaggaacatggagaaggtgcccaggccgcaggagccgggcgtgatgtacacgggcagcttgtcaagatgcacacccttgagagcggtatcccagtcggcctgcttgcgcagcttcaagccgcacttgcagttgagctggacgttcacggcagtgaggccgcggtccagatcgtgcagaagcttgccgttgaaatcttccggagtggaggcgggaatgctctgggcaatttcgcagggcttttccatatagcccagggcgcgcgttccgcggcggtacgggaattgcccggcaggcgccaccggagcgtgttcatcccatttgttatagatgggatgcagagtgattccctccacaagcttggtaaaaagcttcttgtcaaagtcagcccctttcaaggcagcgacggctgcctcacgccattcggcgtatgtggctggtgcgaattctccgaagtcaacctccggagccgttgttttgtttccctgttgcatggcgaagtcaatgggtaaggcctaatatgttggtttttagtcatgcgcaaaccaggccagatttaaagcgcagcgttattttaggaaatcaaactataaagtccagcgagaaaaacactccaagcccaatgaacgcgaatttgccacatcacgcgcggcgagcttgcaaaaacgatgtaaatagcgtaaataccaggattaagcatgcccccttcaactaccgtcaaacttcctgcccagctggtcaggcagcttcactccttccgccgccgcctcagaacggttaagatgctggaagccgtatgccttgcaggcattgccgtgatcctttcctacgttctcctgtacctctccgacagattgtgggaaacgccctccgccgtgggctggattctttttttcaccgccatggccggcctggcggtgtttatcccgtggtggagcttccggtgggtgtggcagaggcgcacggaggcccaattggcgcgcctgatttcccggacggatgcggcgctgggggaccggctcctgggcgtcatcgaactggattccgaaaagtacgggcgccagtacagttccgaaaagctgaaggaagccgccatggaacaggtggcccgcgaagtgtccgcgcgggatctgacggtgaatatccccaggcccagccacaagaaattgttcgtcctgctggccatcctggccttatgcacggcaggcgtatgcctggtgagcccggaagcggcggggaacgccctggaacgctggctccaaccgttcgatcctccggaacgctatacgttcacccagctggaccctacgccggattccctggtcattcccctgggggaaagctacctgtatgagctcaaactggcggacgccaccaagtcccgcccgcagacggcggagtatttcttccgcaacagggtgcgccagcaggcccccctgacggacggcgcgtataaaatccacattcctcccatgcagcaggcggacaggctggagtttttcgcgggggacgtcgtgcggcggctgaaaatcattccgaaggcccgcccctccctgctgggagctacggccaccgtggcctaccccgcctatatggcgcgccccgacgggcaggaggccatgcgcgcaggcgtcatttccgccccggaaggctccacgctgacgttgaaggtgactgcctcccagaacctggcatccgcggcggacgcgcagggtaagccgctccgcgtggaagggagcagcgttgtcattccggatatccgcctggaaaaagaccccagggaaatagaactcacctggacggacagcgacggccttgcgacctcccagcctgtgcggatacgcctggaacccattgaggacaagcagccttccatttacctgagaggaggggagaatgaccgctacgtgctggaagacaccagcattgaattggaggtggaggcggcggacgatttcggcctccgggaaatgggggtggaatggcagggggaaaaatctttttatgacgatgaggaagagaacgccgccgttccggacccggccaaggcaggcaagcccgttcccggcctgcgcggggaaaaggttctggcggacggccatcccacccaggccagcctgaaagggacgtacctgttccaggccagggcgctgaaattgtccccccagcgcgtcgtcgtgcgcgggttcacgcaggattacaagcccgggggaaaacgcgtttattcggaacccatgatcatcttcgtcctttccaaatcagagcatgcccagatgatccgcaatgaactggaacgcatcaccagcgagctggaggggatgatccgccgcatggacgccatgacggacgaggcgaaacgcctgaaaggaatggaaggcagtgaattgaaaaaggcggagtcccaggaacgcctgcacgccctggcggatgaagaacagaccaacaggcgcgaattgagcgacctgctcaaccgctcggaggacctgttcaaggaggcttcccgcaacccccagatagacccctccggcatgaaggagttcatgaagggcatctccatgctcaagcccattcccaacggccccatgaagaaggcgcagaagcagttccgggattccgcctccgagaaccgctccgaacaggagagccggaaggacctggacgacggggagagctcccattcggacgccacccaggcgcttaaagacgccatgaaccagctttccaagtccgcgcaggacatggaggccagcaccttcgtggcgcggctcaagcaggccgccgccaaggaggattccatcgcgaacgcgcttgccggccagatcaatatcattgtgggcatgaccatggatgaacttgacccctccaccaaacgggagatggaaaccatcgccacccttcaaaacgcctccacgcaggacatcggctggattctggaagacctcagctattacaagtcccgcaccggggaacgcatttacagcgacctgtacaaccagatgaacgccttctccctccgcgaaaagctggacctggtgcacggcaacatcctgaacgcgattacggcccgctccattgacgaatcccgcctgtatgcctccaccctgcgccactgggccaagctgatagacgattacaagaagagccgcggcggcggcggaggcggaagcggcggtggcgaccaagcctccatttccgacgccgagttcgagttcatgctgaaaatcatccgcatgatccagcaggaacaggacatccgcatgcgcacccgcgccgccgagcaggaacaccgcaaaacccttactccgccagtcccatgaataccgtgaacctttccgccctgattctggcagtttccctgccctgcgccgccgctccggagcccgctccggaatattccgccaagcacaaggaaacggcctccaagctggccggacaacaggacgaactccaggcggacacctccgacctgatcctgggagaaaccaatgagaatgtggtggacctgctgaaaaagtgccgccatgccatgaatgacgccgtggacctgctggaggtttacaatacgggcggccagacgctggccgcccagtcggacgtgattgagctgatctaccaggccgccaaggccaagatgaccggagccggcggacaacccaagcccggaggacaggccctgatggacatgctgcgccagctactgggcatggacaacgattcccagtctgcggaacagcaggacggggagggagaaggcgaaggagaaggacagaacggctctcagaaaggcaagggaaacaatcccggacacggagcggacggaaaatccaacatggcctccacccaggagaagggcgtttccaatccggacatggctacggaaacgcgctccgttcccaaatccaccggcatgtccgcggacgacatgccctccgaattccgcaaggcgctggacgcctacaacaaaacccttcagaagtaaacatgtacgcccgccgggcggctcccgcccgtgaatgaacaataactccctttcccccatgaaaaaggcccccatcctccttaccgttcttctctgctgcatggcggccgcgccgcagaacgccgctgcccaatcctccatgagaacgtcttcccccgtgccgccccaggtggagctgatgtacgtgaagggactccgttacctccagaacgcccagaagacggacggcacctatgatggcacctacgggcaggagcccggcatcatcggcttctgcctcatgtccgtgctggcccacggggacgacccgaacacggggccgtacgccaccatggtgcgccgctgcgtgaattacatcctttccaagcagaacaggggatccggctacattggggattccatgtacaaccacggtttcgccacgctggcgctggcggaggcctacggcatggtgagggacgaccgcataggccccgccctccggaaggccgtggccctgacgctgaccgcccagaagaagaacaagacgggaggctggcgctattccccggagtccacggatgcggacagcacggtgaccggctgccagatcgtctccctgttcgcggcgcgcaacgcgggcattcccgtgccggacgaggcctttgaacgcggcctcaagtatatggcttcctgccgtgacaagaagggcgcctacggctataccggcccggcgggcccccgtgtcaccctcaccgccatcggctccctgacgctgtccctggcacgcctcaagacggacccgtccttcaaggattccctggcctacctgaaaaagaacctgaattaccgggattcctcctacccgttttattttgagtattacatgtcccaggccctgttccatgcggaccaggaggtatggaaggaatggaattacaagaacatgcgctacctgggcgcctcccaggcacccaacggttcctggctctcagaccattccgcagcgtattccacctccgcggccctgctttccctggcgctcaattacagatttttacccatctatgaacaatagaatccgcctttccctcctgctggctccggcctgcctgctgaccgcctgggccaattccgtcgtggacgtggtcacggacagcaattaccgcctccgcggggaaatcgtctcctacggcaaacagggcatcgtcatcaagcacccggccatgcgccagaacgcggtcatcctcccgtcggaaatccgcgcgctttatttcacaggcacctcctccccggacctgcgagccagggacaagattttcatggccacggggcaccgggacatcatcccgtgcaacatcatctccatcacgcaggacaaggtgcagtaccgggacatgctgggcaacgagcgttccatcccccgcgaccaggtggctggcttccggctggatacgctccaggaaaagggcttctggcaggaacccctgattttcgacaacagctgggtttattccggcaaccgggaggacgattaccgcacccagtccggaagaaaactgatgaacgccctgaaaccgaaaatccagggagacaagtaccagtaccggctgggcaacagcgactaccccacctggattcccctgtacaagaacatcggcctggatccttcctccttcaccttccgcactaccatgacgatggacggcaacaacgaccgcgccggcattgtcttctgcttcggagggaacgagaacattcccttccggtccaattccggcagcagcctgaacaggctcatgctcagcatcgctcccggcaaatgcacccttctccgggaacagaagtccggcatcatcgtgctgggggaagtggacatccccgcccctaccctgacggaaggcgtggatatcaggctgacggcctcccggcagggagagaacgagcaggtttacgagctgctggtgggagacctgccgcccaagctgatgacggaccccagccccccggaacaaccgttgcagggggacgccttcggcctccagatggaagggcacgtctccctgaccatcagcaggctggccctttcctccatcaccctgagcgccaaatccgtgaccaagaatggaaatgccgcaacggaccttgtcctgacgaaggaggaggacgccattcccggttccatcagcggctacaacagcaggaataagacgctgactctttccacggacaaggaatatccgggcattccccgggagctttccatccccgccaagtatctggataccgtctttttcgcggagcagaacaagaaggacgattcccgctctgcggcatgccacagcattctgatgaaggacggctcccgcctgcacggcaacatcctgagcatggattccctgagaatcatcctgcggcatccgcagctcgggcagatttccctgcccctgaaaaacatcacccgcgtggagtttctgaattccgcacagccatcccgctccaccccctgatatatccgccatgaaacaagcaataacgcttttcctgggcgcctgcgccctgctggccgccgtccttccgcccggctcacgggcggaaggggtcattacgcttaaatccggggaaaaactgccgggcagcctggacacgctggacagcccgtacctgaaagtccgctccagcattctttccaaacccgtggatgtcaacctggaggagcttgacgagctggtttcttcccgtccgctggagataccggagcagttttccgtcatcaggctcgccaacggggacgagttttacggcaccctgaaggcgctggatacggagagccttcaactgcaaaccgcgtggggcggcctgcttcccgtcaacaggaagtacgtgcggcacatcgggttcgactcccagaaagcctacctgcgcaacgcgacggaatccctccagggctggaagtcctccgccaacagcatgctcccggaatgccgcaacgggtactggatcatgcgcggctccaacaatacggaactgcaaacctccttccccatgccgtcccgcctccatgtacagttttccctttaccataccaatacgttccggatcaatctctccctctggcaggactccaattccggaagcagcattgacctgggcctctccctggaaaaggcggagctctccaagaacagttccggccagtaccggacgctggggagggtgaaaaggaacacggaacggaactggtatgccgacaagagcgtcaagcgttccgacgttcatttttacgccgacccggaaaaaggcaattactacctgtacgtcaacggagaacaggttggccggtgggaagaggtcaaggacatggacaatatctttgagaatgaaagcggggacgatgaggaagaagacggggaagcctccaaaaagcatgaattcaaaccgggcaacactcttgccgtgagcggttacgacggcttgaacatggccgtgttcaacctgaacgtgtttgactggaacggcgccctcccccacctggcggaggaacaggacatcatttccaagtacgtcacggacgctcccagggacaaggccctgctggtgaacggagacgtgctccggggagccatttccctccaggaaaacggctccatccgcatcaagtcggaccactatgacgtgaccatccccaccgccaaggtgcgcgccctggaccagaaaggccaggaggagaagaaactgccggaggacggcgcggacacccgcgttttcctgacggaccagagcatcctttcactgaacctggagaccctcagggacggcttcatggaagggcgttccgcagcgctgggaaaagtcagaatcccgctaaaatccatccggaaagtccagttcaacctgcaaagcccggagctccggaagcagagggaaacgccgttccggagcaggtaaaggcgcgccgcacgcgttttagccaatccggttcccaggagcgtttaagagcgcatgcgtcaatgctcctccatttcctccgcccgccgcacggcgcttttcaccgcctgaatccaggcattgcggaatccgcattcgtccagcgcgttcagggcggcaatcgtggtgcctccgggggaagtcacctcatcccggagcgccatgggatgcttcccggtctgttccagcatgagggcggacccccgcatggtttccacggccatttccagggcggttttcctgggcagtcccatggctacgccggcgtccgaaagagcgtccagcaccgtaaacatgtaggcgggcccgctgccggaaatggcggaaacggcgttcatcctggcttcctccaccttgtagacggagccgcagccggagagcagccgccgggccgcctcctcatcttcatccgtcacggcggctcccgtgctgtaggcgatgaccccggccagcaccatgcacggggtattgggcatggcgcgcacgatgcgcgttccgtcgctggcgcaggcttccatgtcatccagggagatggcggcagcgatggagatcaacagcggcagctcctccccccgttcggaaagggaggaaatgagggaaagtacgccgtgcggcttaacggccagaatcagggcctccacagcgtccgccgcatccgcctccgtggccgcttcatgcacgccagggtattcctgctgaagggcctgcacgttttcatggtggtggtcatacacccagacttcctccggggacaccgctccggctttcagcatgccgcgcaggagggcgccgcccatttttcccagtccaatgatacctgttttcatggttgatgattttcttgcggtaaagaatataaacggtttatagaaaataaagatattaattacaacctgtgaaagtgaaagataaacttttgcacctgtttcctccagctttcagtggcaaattattcgtaaaaattgtaaacggttacgctccagtctattccgcctgatttactttgcagaagcagccttccacatggtcgttcacaaagccggccgcctggaaaaaagcgtagcagatcgttgaaccgaagaatttgaagcctctctttttcatgtctttgctcatggcgtcagattcgggagatgtggcggggatttggcctagggtcttgaaattgttaacaacaggctgacggccggggaagaatgacagggcatactggtagaaactgccgaattctttctgaacagccataaacagtttcgcgttattgactgtgctattgattttcaagcggtttttgacgattccgtcaaattgcatcaaccggtcgatgtcttccggcgtcatttgcgctactttctccacatcaaagccatggaaggcttcccggtatccttcgcgtttccggaggatagtaatccaggccaagcctgcctgggcgctttcaagcaccagaaattcaaacagggttttgtcgtcggtaacgggtttgccccattcttcgtcatggtattttatatatagttcgtctgttccggcccaaccgcaacgtgcattgatgatgtcttccatacttttccaggttaaaattcctttttcctgaacagccatgcggccagcgtcatatgaaagacgaagtaccccagcgtaatcagggccagactgccgaacagggaaaggggaatggtctgcccgttcagggcggaatccgttacggaataaatctggaaattcggaaagatgagggcaaacagcctgctgcccgccatttcccaccaggagatgcctcccgttccggagcccacccacagggagagcgcctgcgtctggaacagccccgccagatagaccatgaacgtcagcagcgcgctgatgatggttccgttcgtcatgcaggacatcagcagcgtgagggaggagaggaccacgaattcgcacatcatgacgcccaggcccgtctgcacgttccaggtagcgccctggaggcggattctgtccaggtacggctgcatttcctccaccgtatagcggcctttcagggaggcgatctgctccgccactaccgtatccgtccgcagccacagcaccagcgtcatcacggcgtccatcagcagcacggcgatcagggtgagggccagcacccccagcaccttccccatcaggtagtcgatgcgaggaaccggcttgcacaggatggtgtacaggatgcggtcttccgcgtccttggggataatcagggccgtggccgccacgcagaaaaagaggccgaacacccgcatggcgccgtaagcggagtttttcagcagaacgagttcattgattcccccggtttccggccccagcaccgcgctcaggcggaaggagctcagggccagcagagccacggcaaagaggcccagaaagagaaacaccttcatccgcacgagctgcgtgaaggtggtaccggcgattacggccatgcgcctgggcgaaggtatataaccggaggtaatccatgccatgcggaccatcttgccgtattccggaacaaataaaagagctttttatttcatgtgctgaactccttccgccttgaagaagcttccctcccgtgttctcatggggcgcgtatgagtctacgatcccagttggaagaattgcttccggaacttttgccttccgacccggcccaggccatcaaggggaccgaactcatccgcctggtgcgcctgaggctgggtgaggagtattcagacgcctccctgcgctaccatttctccttcatggcctccgagccggactcggaaatcgccaaggtggagcgcggccagggctattacaggcgcgttcgggaccgggacggcaagccggcggccagggggctgctgcccctgtttctgggggaaaacgaaccggacgcgctgaactgccgcgccaaggcgctggccctggccgtgcgccagtatgataccacgggccgcggggttttcgtgttcagcaccagtgaaacgggaacctcatgggtgaagccggacctggccgtcgtggaatggccggatggggaatgggaggggaacgcgctggtcttcgaccaaagcgcgctccagcgccgccgcatgatcggagcgcccatgatgggcatccgcagcgtctgcgtggcccgcatgcccggaggggaagacggcaggagggagtttttcaggaccctggccacgtcccgctgggcgcagtgcggggaactggtcatcgtgggggaacttccggatgattccgaatgcgccgccctgcgcggactggccgccgaattcggcgtaggcgtcgtgtgcctggaaattgcagacgaacgcctgtgcgaactgccgggggcggaagagattttcaaggcaggggacgaggaatgcgccgccctgctggcggagctgacgcccgtgcgcctggcttccagccgcctgaaggcgctggaggccgataccggggaaaccctgggcggggaattcggcgccctgttcgactggctggccgcctgcctggaacgcggcagcgtggaggaatatgaattccgggtttcctgttattgaatacggcagagagattcttgacagaacttgcgtattgaattaaagattttcccggccccaacccgccctcccccctgacatggaacaagaaaccctggtttacccgcttgcgaacaataccgttctgcaagacaagtatacgatattgaatgtgctgaacgccggaggcttcggcattacgtacctggcgctggacaatccccattcccggtacgtcgtcatcaaggaatgcatgccggacgcctacgccttccgggacatggaaaccggcttcgtccacccgcgggacgaacaggccgccgtcaacttcgcccagagcatttccaactcccggcaggaggcttccgtcctggcccagctcaaccaccccggcatcgtgcaggtgttcgacatgtttgacgccaacggcacctgctattacgttatggaaaacatccaggggcagaccctgttcgacctgatgaccaccatgcacgccaccggacagagcatggagccggcacgggccacggaccttctgttccgcctgctggacatcctgcactaccttcacgccatgggggtttaccattgcgacatcaagccgggaaacatcttcatccagccggacggcacgcccaagctgatcgacttcggcgccgtgcgcaccaagaccctccagcaccagggcctcgtccagatcactcccggctacacgccgccggaattctaccccggacgccggagcgaaatcggcccctggtgcgacatgtacgagctgggcgccacgttctacgaattgcttacgggccaggttccccacccggcggaccagcgttccgtggtggaccgcaacccgaaggtgaccagttacgcggccctgcggaagacataccccatgaacttcctttccgggattgacaaggccctgtctccggatgaacgcagccgcttccattccgccaaagcatggaacgattacatcaacgccatggcggccgcaggaaccctgcaagccggaggagtggcgcggaaagccctgcccaaggccagaaagaaatcttccgcaggcaccgccttcgtcatcatccttctcatcgcggcggcggccgtctggatatgctggaagcagggcctgatcaatttctgacccccacctcccgttcatgctggacctggcggaagaactgaaggcggcggccgcggaggggatgcagctcccttccctgtgcgtggacccggcgtccatcctggccgtgatggtcaatgaagtggttccggaatgcccggcagacgatttttacgggaacgcccccgcgccgctgtacctgtccaccgccctgcccctgttccgccggagcgggctcccagcctcttccatccgtgacgtgacggaagccggcatttacatcaccaacgccgtcaagaggcccaaaagggaaagcgcggtgccgcaggaaatgattgaagagagcctccccgtgctggaacgggaattgtcccttttcccgaatctccgcgccgtgatgctgatgggggatgtagccaaaaaggcgttcaacatgattgcccgcagcaagacggggaagagcgccattcccgccggctccacctacaagctccgcaggacgccctttcatgccatggggctccgcattttcccgtcctacatcatgacggggcgcaatcttctgattgaaaagtcaaagacggccatggccgcggaggacatccgcgccatgctcgagtttatccgcagccaggagcgctgaaggcgcttgcggccatgaaaccggatggagaggaagagagccctcttttaaaaacagatgcggcctttgtccgcattctgatcaggttgccgcgcgggcatatgcggcgctcctgcaaacgccgggagaaattccgccatcaattaataatctaaggtattctattgcgccagggagtgaaggagcatttcagattcatttgccctgcgggcttgaaatttcgctttccgttctaccgggcttgtccggatttccggcctcttggccgaatccctttccgcagcgcagcaaaggggatttttttacccttttcatgttccgttcggagccgataagggcggcagccccttatttccagcaacgcgacagtgggaaaaataacgaaggaaggacatatccccggcatgcccgctgcatctttccacgcaggaagactttcatgacggcaagggccgaaccagacggttcagcccttgcaaatggttgagaactgagaaaaggcgcttacaggctttccccgaagtcctggcggtacttcgcggccagtttttcaggccagtcgctcttggcgcggagcttgcccatgaagaagcgcaacacgggcggttcctccacgaattccaggccgccgatcaggtcgcggttgtcgtagagccacttcatgcggtccgccacgtatttgacctgggacagcgtgaagacgcggcgcgggaaggccaggcggagcagttccacatccgccagaatgtcgtcgccgttttcgtcgcggacgctggagagcgtgccgcgttccatcccgcgcacgccggaggcgatgaagaaggccgccgccagggccccggcaggatagtcctcctgcggaatatggggcaggaagcgcccggcgtcaatatgggcgcccaagccgcccgcgggggtcacgcagggaatgcccatgtccaccatctggccgatgaagtattcaatgaaggaggggctctgggaaatcacggtcaggtccgtggtttcatacaggcccacggccatggcttcaatttcacgcacggagatgccgccgtaggtcaggaagccttcaaacaggggaaccaggtgctccattttcttggcgatggagcggtcgttcgtgcagatgccgccgccgcgggaggaggaaaccttgcgggcggagaagtataccaggtccgccaggccgcacatggttttcaggatgtcagcgcaggaggagtccttgaactcgtcttcacgcatcttgatgaagtaggcgttttccccgatcagggaggcgtccagcaccagcatgatgccgaattcgtcgcaaatgccgcggatttcacgcatgttggcaatggagaaaggctggccgccgattaaattggtggaggcctccatgcgcacgaagggaattttgtcctccccatggcgggcgatgcagtcgcgcagcttggcggggtccaggttgcccttgaaggggttggtgctgaccgggttgacggcgtcatccgccaccagttcctcaatcttgccgccgttcaggtcaatgtgggcgtgcgtggtggtgaaatggtagttcatgggaaccacgtccccgggcttcacgaaggtgcgggcgatgatgttttcacaggcgcggccctggtgggcgggaagcaggtattccttgccgaagacgtcccatacggcctgcttcaggcggtcaaagctctgggaaccggcataggcgtcgtccgcacggaacatggcggcgatctggttgtcgctcatggcgttgacgccggagtccgtcagcatgtccaggtaaacgtcgttcgtgctcaactggaacgtgttgaacccggcttcctgcgcggcttccagacggcgttccacggggacaagatgcagcttctgcaccacgcggactttatgcagttccaggggaatttgttccccattgtaaaatttgacaacgttggatggttctgaattcataaaataaaaggtgaataaaagtgtagcagaatgagtcctttccgcaacataaaagacatcccgcttctttttctccccttccggaaaggcaggaatgccgctggcaggaaaaatgtggaacttacgggaggaaacccctagcgtgaactcctatgaaagaacactggaaattgattcaacagcatctgggactggatgcggacggcatccccggtccccggacggcgcaggccctgatggaaaaactggacatccgccagccggagcattcctggcccagccaggaggaagtgcgctccgggaagtccgtcttcggccgcgcgggggatgaaagcaacatgaccagcatccggctgccatacatcatgcggctggcatgggagaggaacacgaccgtttccaccatgcgctgccacaagctggtggcggaaccgctcctccgcattttccgggccaccctggaccattacggcatggagaagatacgggaactggggctggacctgtacggaggctgcttcaacaaccgctccatcatcggcgggaaggccacgtccatgcatgcctggggcattgccgtggacatggacccggacaggaacggcctgaacatccctgcaccgaaagcggtactgtccggaccggagtacgcggccttctggcagttcgtggaggcggagggggccgtatccctgggacgcgcacgcgattacgactggatgcacttccagttcgctactctttgaccggagcggacgggtccgtgcgccagccctcctcccagcggcggcggagggctgcccagtccagcccttccccgccatgccccaggaaggagcgttttttcagttcacggaagttttctccgggcagatggagcagctccccccggtcataggcgtcctggtcgcacatgccgttgaagaggggcgtccactgccagcggcgcacgcccaggtagttcttgaacgtatccaccagctccgtcgtgcagttggcggtgacggtgttgtagtaacgcgggcgttcgtggaggctgttgattttttccgcaaagcccaggaaggcttttttcaggttttccctgccgatgttgatgcggtacaggtacatgtcctccttccggtagctggtgcgcaggccgaacaggtcttcctcatccgccagaatgtaaatcacgttaaattgcttgtagaggcccggaacggtcccctgctccaccccttccggcaggcgcgtctccacggacagggccaaatgcttcccatcctcaaagccgaaggagagcatggtgtgggccacaaatcccatgccgtcccagtggctcacggcgaagtccagcgtggccagcttgtccaggtcaaagcggcgcgtcacgtagcgcgcgtcaaagtcccgctccgtccggtaaacgaagctgcgcacgtctttcaccacgatttcattcccgttgatttctacggcgggcaaccggctccaggacggctgccactccttgccgttcgtcgccggaatgcacaggtaatacacaagcagcagggccagcacaccccaggaggcgcgccagaatacgtgccgcttcctgcggaaaacaaaagcgcaggccatggcggctacgtaaagccataccagaacggcgccgccccatacattgtaaaacaccaccccggccgcccacacggacaggccgaaccacgccgcaaacatcaggacacgggtagctatcaggcccgcatggcgcagggtaggcaggtgcatggaagatgaaaaggaggccgcgcgttccggttcatgaaacgcgcggcccgttgacgggggttatctgaaggaaaggccctttaccttgtccgccagggctttcagcacgcgctggtgcgcggcgtccacttccgcggccgtgagggtcttggccggatccctgtacaggaaggtgtaggcaatggatttgcggtccgccgggagcttttcaccggaggggtccgtgaatacgtcaaagcaggagtagctgacaagcagtttttcccgtgcggcttcaatggccttcacgatgtccgcattgggcgtggaaaggggcagttccatggccgcatcacgggaggagccggggaactggggcagttccgcggccttcacgggagcggtaaggatttcctgcatcttgcggaggtccagttccgccacgtacacgggctggtccaggcccagctcccggcagcgcgccagggacaggcgggcgaagtagccgcaggccttcccgtcaagctgcacgtccgcccccagggcggcctgttcgcgcggtttggcgggggtcagcgtaaagcggtggcccggagccagcgcttccatgacggccagcaggtcttcaaaggaggcctgttccggcctggggtccgcccaggagcgcgccgtgcggtccccggaaagcaggatgcccagcgtatccgtttcaatgtccctgcccttgccgccgcccgtattgcggaagacgcggccaagctcaaagaagcgcaggccggagacgccctggttgctgttgcgcacggcggcggcaatcaggccgggcgtgtgcgcggggcgcagcacggagtggtcctcgctgagcggcagggacacgcggatgaggtcgccgtcctgcagggggcgcaggggcagcgcgtccttcacctgggcgatggcgccgtcagcggcttcagaggcgatgagcttgatggtctgggtttcatagaaccccagggacgccagcttgcggcgcaggcccatctggaagttgtaggccacgtctacgggggattccgtgacgaaggggccggagaagcgggacgggatgccgtccagcccgaagacgcggacgatttcctccagcaagtcgcaggggcgcgtaaggtccaggcggtggggggggatcagccagcattccggggcgtccggaacctgcatcaggcccagcgccgccaggatgcgcgcgccttcctcgtgggaaatggaaccgccggacatctggtccagagccttccagggaagcttcacgaagcccagttcattggtcaccgtggctcccttcccctgcttcagggaagcgaacgcggaaacggggccgtccggctccccgcaggaaggcatgcaggcatgggccggattgggaacgggagccccggccacatacgtttgggaggccgtgccgcccgccagctggagaatcagttccacggcccgcacggaaccgcgcaacacgttccaggcggaggtgccgcgttcaaagcggtaggaggagtcggaggacagggccagcctgcgggacgtggcgcgcacggaggagggcttgaaccaggcggattccagaataatgtccgtagtggcttccgtcacgccgctttcctccccgcccatcacgccgccgatggcgagcgccttgccggactggtccgcgacgaccaggtccgtgcagttgagggtgtattcctgcccgtccagggccttgaaggtttccccttcgtaggcggtgcgggtgacgatgccgccctgcaccttcgccgcgtcaaacgcgtggaggggcgtgcccagttcatgcaggacgtagttggtgacgtccacgatgttgttgatggggcgcaggccgatggccaccaggcgttccttcagccattccggactttcctgcaccttcacgccgctgattttcacggcggtgtagtacgggttcaggtccggctggtccagccgcacgaagtccccggcgggttccagctccaccccggcgtcatcaatggaaacgggcctgtactcccgtccggagatggcggccagttcatacgccatgccgttgtgggaaagcaggtccggacggttgggcgttacttccacttccaccatcgtatccgccttgacgacctgggagatcggcgtgccgggttccagctcctgcggaagaatccagaggccgtgctccttgtcgggcagccccagttcggaagcggagcagagcatgccgcgggattccaccccgcgcagcttgcccaccttgatttcaaagttgccgggcagcaccgctcccggcagggcgcagggcaccttgtcccccaccttgtagttctgcgcgccgcacacgatctggtgcagcgtgccgtcgcccacgtccacttggcagactttcaggcggtccgcctggggatgctgttccgcggcggccacgcgggccaccaccacgtacggggagtccacgccctgctggcggatgtcttccacttcaatgccggcaaaggtcagcatgtccgacatttcgtccacgctcagtccggccaggtcaatatactgggaaagccagttaagggaaattttcatatctgggtaaggtaaaaattattggaattgggcaaggaagcgcacgtcgttctcaatcagggcgcggatgtcccggatgccccagcggatcatggccaggcggtccagaccgatgccgaaggcaaatccggtcagccccgtgtagcgggcctgcaccccgggttccagccccagttcgcggtccacggcttcaaagacgttcgggtccaccatgccgcagccggcgatctccacccagcgcggttcctggccgtccaccttcagcttcacgtcaatttcaaagctgggttccgtgaacgggaagaaatgggggcggaagcgcacttccgtatcggagccgaagagggcgcgcaggaagtattccagcgtccctttcaggtcgcccacggaaacgtccgtgtccacatacaggccttccagctggttgaaggcggaaaggtgcgtggcgtcaatctcgtcacggcggtaggcggagccgggggaaatcacgcgcacggggggcgtctgcttctccatggagcgtatttgcacggtggaggtgtgcgtacgcagcagcttgccggaatcaaagtaaaacgtgtccttctcattgcgggccggatggtcctccggcgtgttcagcgcgtcaaagcagtggaactcgtcctcaatctccgggccgtccgccagggcaaaacccatgtggcgcagaatgcggatggcttcatcccgcacgatcgtgaggggatgcaggccgccctgcggcagggagcgggccggaagcgtcaggtcaacgccggccacggcggccttgtccgcctgggcctgtacttcctccagcttggcgtccagcgcttccgtaatagccttgcgggcctcgttaagcaactggccgacggcgggcttttcctccctgggaacgtccttcatgcccgtctgggccatggtcagttccccttttttgccaaggatggctacgcgcgcgtcttccacgccgcgcctgtcagacacctgggcaatgcgcgccagggcatcccgttgaatgcgtacaatctcttccttcataaaatttgacgggcaagagcttacccgtcccccccgccagcgtcaagcccttcggacggcggcccttctccaaaaaacaaaaggcaggaagcggaaagaagaaggggaaaaccaccgtccccctccatctaaccgctaattcttaatatctaacatctccctgaacatatcacacataccccggctgggcggacatgcggccggaaatcatgccgagcacgcagaaaaaggtataaaccaggcagaacggcaggaaggaaccgccctggtggaggaaggaggtgaacagcaggctcagggcggcgcccatggtgaagccgatgccctgggacatgccggaaagcctgatcgcctccgacggggttctggcccgttccaccatcagcgccattccgcggctgaaaacggttcccgtcgccaggccgaacagaatggccatccagacagcccagtccagcggaagatacaggatgccccagcaggaaagagccgccagggccatggccatcacgatgagaaggccccggccccccgtggctttttccagagcgtgggcggagagcgtggcgggaagctgggcaaacatggctacggaaaggatgaaacctgcgtccacgtagctcatgccgcgctgcctcaggaagatgggaatccaggtgtaaaagaaataggctgcccccacccggctcaaataaaagatggtgacctgccatgccttgctgctgcgcagcaggttgcggccggaagaatccggatcgcgctggaacactcctaccggatgcttgaggaagtacgcgccccacaccagcattcccagcaggatgggaataatccatattcccagcccaaagcgccagccgcccagcatgttggagatgggaacggacaggccggaggccaccgcgctccccacgcctatcatggcgctgtaaatgcccatcatggcggaggcgtggtccgggaactggtgcttgatcagtccgggaatggccgctccggcaatccccatgcccagccccatcaggaccatgccgccgtacaggcccgccacgccgtcccagctgcgccagaaaatgccggccacggccagaagctggaaccagaaaatgatcttccacggcgtcagccagcgcgccacgcgcggagaaatgggcgcggccacgcccagcacaaacacgggcagcagggcaaacagccctgaattttcaagggaaaggcccatatccttttcaatcgttcccaacagcgggtccggagagtcaaatccggtccgcagattgaaacaaatgatcaaaaaggccacaagcagcagcatctttcccttcatgcttccggaagttcctgccttatccatcccatgttatacagccgttcccccgcccccgttcaaaagtaaaaaacttttccggctggacgcggcagggggcccgggaaacggtttgcgcggctggacggaatgcgaagcatgaaccccgcagaatgagggaagccgaacgtggaacaaatcaccctcttgaccccggcaccgcagccatcaggaaaggcagaggaagacatgttcccgcagtttgaacgaaacaggccgcctgggaatgaaggcctcccggccttggggaatccatccggggagcgcagcaagccaagctctggaaacgcagccatttatatctctccttttccagtttttccactcacatctaaaaaaacaccatcatattaaaaaagaatgtcttacggattgtctgcattttatattcctataggaatatttggaattaaactaaattcccttgacgatgaatattttcagtattacaagcggatatgcctactacatgcccgttccctgaaaaatgcctccgatacgccgagaccgtccaacggttcggcatcaattttctgagagtagccgtcttcatcgtctttgcctggattggcggcctcaaggccttccagtatgaagcggacggcatcgttcccttcgtagccaacagcccgatgatgagtttcttctacgacaagaaggctcccgaatacaagcagcacatgaataaggagggagccgtggtgccggccaatatcgcatggcacaaggaaaacaacacctacggctttgcctacgggctgggaatcctgatcgtctccatcggcacgctcgtactgctgggcctctttttcccgaaggtgggcctcatcggcgactgcctgctcatcatcatgaccgccggaaccttgtccttcctgataaccaccccggaaacgtgggtgcccgacctgggcggacccaaccacggcttcccctatctgtccggggcgggacgcctcgtcatcaaggatatcgccatgatggccggaggcttcatcctgctgggcacggatttcaagcgcatcctgaaggcgcgcctcggttgcccaaggagcggggaatcctgctgcaagaactgattctttccgtcaccgcctctgccgaacggcagaggcttttttatgcgttaatgttccatatgcagccgtctggagcggcttaacctcttgcgtcaattgaaagaaaatcaagcgtcagcgaaggaataattaaaaagggcgcagtccctggccgcattccgttcagaaaccgcagaggcctgcggcgccccgggaaccgttcctcctgtattcagagcgggagcacggaacagccgcctgttccgctaaatttctcccggcagggaatggaggtacatgtacagggcgtccgtgctgttttccagcacgtccatggtgagctgcaagggttctgcgtaaatttcaggataatccgcttcccctatttccggcctcacgcggaacgcgagccgttccttctccaaatccatctccgcccggatgccctctttattgcccctggcgtcaagtctgatccacctgcccggatcctgcagaaaaaccgcattcagggcatggatgcagtacccgcttcccggcgtattttccagcgtcagccgctggtagcatatccccgccgggatgccgcaggctctgagcagggccgcaagcagattcgccttagcccagcagatgcccgttttctcccgcagcacgtctgacgccgaaaccgtcactcttttatcctgcgcatcccatgaatggcttatttcatccctcacgaagcggtaggcgcctgctatccattccagctctcctttacctgcggcgcggagccgggcggccctgtccagcaccagctcatgcttccagtcaatataaggactggttttcaaatattcactgagatcgttgacgatggcggccatgcttgcttcttcacctcttaccggaaaaccggaaggaagtacaggcggaaaaggccacgcaggttccggggcaagatggagcttcacgatgaagaaatcagccacggtgtcctgggcatgcagcaggcctgataagagcgaaagcattccggttttcgtacctgaacttatcccgagcgcggcaaagggaaatttctgtgtttgccgttcatggttttgcaaggggcgggagcccttgttcccgggacgcggccataaaaatacaccggagaagacgtatggggcggttattcacctggccgctttcctgtggccggagggccgtcatggagcgagaacactcccatgaaaaagcgccgccgttccggagaacggcggcgcccgaacacgctaacctcttaagcttttatttggcgggacgcttgccgtacgccagcgtacgcttgccatcccaggaaacggcctcaatccgggtggagccctccggatagggaaccgtggtggaggagttgtccttggaatccgtccccaccatggtgatgcggaccatttccttatccttgtaggtttcaaagacggcggcgtttttccacacgtcatgggagatgatgcgccggttgccctgttccgtgatgccctggttgcaggcgccccggacgggcaggcggttcttgtacgcctccacgctgttgacggaaaggtagtaaataacggggctttccggcttcttgtactttctggcgtacgcaatcaggttcttgcaatcggactccgtgatggtcatgcgggcgcaggtgtagtcgtccagctcctggtcaatgggcttgagcatgccggtcttctggaaaaagtccgtcaggtcctgcttggagacgtcgcaggcgttcttcatgaacgcgagctgaagctcgccgtccttcttgcccttggtgtccatcttgatggccttgtagaagatgtccggatagaagtcgggattgcccttcccggccaccttgaagtacagctccaactgccacaggggagccagcttgacaaagtggtcgtgcaccatcgggcggttgtcccctccggaacgcttgtccgggccagcctggatgagccagttttcccccttcaggatgccgttgttcaggtaggcgttaaagcggccgccgatcatgttgccgtccccgccgttgatgcgttcatgctccaggcgcatgctggagggattcagcatgtagttcacgtaggcggagtaaatgttgttggtcacttccccggtggatacccatttcatggcggggcgcacctggttgacatggccgaattcatgggcgatgccccaggcgctgccgggaatcttgtccggattgcccacttcccccatcgtgccgttgtggaaggcggcgcccgtgccgtccgcgtgcatgaagccgttccagatcacgcggccgaacatccggtttttaggcagcatcttgtacttgtacaggcccatgatctgctgctccatgccgatgatcttgtcatacagggcgatcagttcctcccccttgtccgggcagaatttcttgagttcctccaccggataaaccaggtgcacgcggctgccaacgatgtccaccacctccgtgggggaattttccagcatcttcttccagtcgctgttcttgctcacgcctcccacgaacacgccgttcaccttgccggacgggatggagagccgcaccttgggagctttcttgtagttgggcgtgaagtattcaatgtagcccagccccttgtttttcgccttgatgatgttgattcccgccttgagggggtaggagctgcggcctccgtcacgcccgaagttgtggatgaccaggttcagtttttcccctttggggtcttccatgaccagcagcacgtcctccccttcctcaaaaaagatgccggtggggttttcaaacttgctgtactggctggtgcgcaggcggtccgccaggtccttgaccggttcgtacggttccgccgtgatggcgcgcgccttgcggtcatattttttctccgccatctggcgggcgagcccgcgcacgaagggatccttgattttggcgatgcggtcacgcgtgacgttgggtttcagcgccagcatgaagtcattggtgaagacgttggaatccagcgccttcaggcccgcttccgtaatcggaacggacccggtctcctgggcggaaagcacgccgccgcccagcatgccgcagagagcgagcaaaagggctccctttttcaagaatggtaagaggatcatgtttataaaactatactgatcagtttcctgaattgtttcaaggaaaaatcctccggcagaaacatggacggaaaaaggccgtttttgtgacatggggcgttcctgccaccgcttaaaaactgtccatccccttgacgaggtccctataatggcacccgtaacacatttttccatatgaatacagaaacgcatcaattccaggcggaagtccggcagctgctggacattgtcatcaacgccctttacagcgaccgggaaatttttgtgcgggagctcgtttccaacgcctccgacgccctggagaagctgcgcttgaaacaactgacggattccaacatctaccagccggaaaagcctctggaaatcaccatcaccacggacaaggacaacaaaaccatcaccatcgcggataccggcatagggatgacggaagcggacctggtggaaaacctggggaccatcgcccattccggcaccaagaaattcatggaggccctcaagcagaagcaggaaggcggcgcggacctgatcggccagttcggcgtgggcttttacagctccttcatggtggcggaccaggtggaggtctttacccattcctgggagccggaggcggcctccctgcgctggacttccaacggacgggagggctacagcattgaaacccttgacgaaccgctggaccgcggcacccgcatcgtcatccacctgaaggatgaatatgaggagttttcccaggaataccgcgtgaaagagctcctgcgccgttattccaacttcgtaggcttcccgatcaatttcaacggagagcacatcaacaccgtccaggccatctggtccaagtccaaatcagacgtgaagccggaggaatacgacgagttttaccagtttatctcccacacggatgaaaagcccctgtcctacatgcatttcagcgcggacgcccccatcatgctgaatgccctgcttttcatccccaagcgtaatccggaaatgttcggcttcggccgcgtggacgccaacgtctccctgtactgcaagcgcgtgctgattgacgccaagccggaaggcctgcttccggaatggctgcgcttcctgaacggcgtggtggacagcgaggacctgcccctgaacatttcccgcgaaatgctccaggacaattccctggtgcgcaagatcagcgacattatcaccaagcgcttcatcaagcacctggacaaacttgccagggacgaaaaagaaacctataaggaattctacggacagttttcccgctacctgaaggaaggggtggtcacctcctggccgaacaaggaatccctgggcaagctgctccgttttgagtccaccgccacggatgcgggggaaacgacctctttcgaggaatacatcacccgcatgaaggaagggcagacggccatttacgcgctcaccggcccttcccgctcccacctggaaaacagcccgtacctggaagccttcaaggcccgcggatacgaagtcgccttcttcacggaccacggggacgagttcgtgctggactccctgtccagcgtggacggcaagcccgtcacgatgatcgaccgcgccgacgtggagcttcccgagctggaagaggaacagaaggacgccctgccccaggaagaagccaccgccctggaagaatggctgaaagaactgtacccggacaaattctccaaggtcaccctgggcaagcgcctggtcagcggagccgccgtggccctgcaaagcggcaatgacatgggcccggaaatgagggcgtacatgaaagccatggggcaggaaatccccgaaagccatccccagctggagctgaacccctccaacccgctggtgaagaagctctccgccctgaggacggaaaatccggaactggcccagatggtggcggaccagatcgcgaacaccgccctgctccgcgccggcatgctggacgatcccgccgtgctggcccagtcctcccaggccctgatggagcagctcctgcttaaataaagcctccggcggaaacggcctctttcacaagccgctccctgccccgggggcggctttttcctttcattccccgtcatgaacgcgttccaccacatgccccggcacttcctgttcctgaagctggcctatcaaacgggcatgtgtctgctggccctggtcgccgtgacgctggcggccattgacctgacttccgaggcggcggaatgggaagtgacggcggaccggatcatttactggattttcgtgctggattacgtggtccgcttctccatcagcaggtccaaatggctcttcgtcaaggaccatgtctgggacctgctggccatcattccctttgacgtgctgttccgtctgttcaggttcgcctcccttggcgagattctgcggctcgccaggtacctggacctgttctcctacgccatgaggttcaccacgcgcatcaggcgtttcttcaacacgaacggattcaagtacatctgcattgccgccctggtcatcatcctgctgggggccgtgggcatccatctggcggaaggcatgagccttcccaacggcatctggtggtcctttgtcaccgccactaccgtgggctacggagacacctacccggtcaccactcccggaaaattcctggccgttttcctgatgctcacgggcatcggcttcgtgggaacgctgaccagcaccatcacctccttcttcctgcatccccatgcgggagaacccatgccgtacagggaggaggaaattgaagccatcaagaagaagctggacggcctctcctccatgacggacgaggacatagacaccatggcggccctgctgaaaaccctgcgggacgctccgcacgcatcttcccctccagagctggaaactcctgcctccggccccggcactttaccgcaaaagccggaatgacccgaatgccggatgcgtctctgcccccctcctgccgtcctcccttctttttgcaccaagactgacaaaaatccgtctggcattgcacgggcaaaggcggacaatccctccgtaccggggcagcgtgccgcccctctcctttttccaacctctccgcctttctccatcatgccagtgaccagccccccccgcgcctgggccgaaatcgacctcggggccatccgccataacctgaacgtcgtcaagcaggcggccaagggtgaatattacatgcccgtggtaaaggcggcagcctacggtcacgggctggaacaggtctgccgcaccctggattcggaaggcatcgccttcttcggagtcgccaacgtgggggaagcgcggcgcatcagccaggcggggtgccgcacccggccctatatcctgggtcccgcctttccggaggaacgggaggaaatcgtgctgaacggctggcggtccttcatctccaccatggaggaagccgtgcactacaattccctggcgcggctgtacgggaagacgcttcccatccatatctccgtggatacgggcatgggccgcggcggattcctgccggaccagcttgaagaattgctctcccgcctgggggaactggacagcctgtacatggaagggctgggcgcgcacctgccctgcgcggacgaggaccgggaactcacgctgaagcagatcgcccgctttgaggggatggccgcccgcatccgggaaaaactgcccctgaagtactgccatctggccaacagcgccgcttccctggattatgagattccctccaacaacatgtgccgccccggactggtgctgtacggcttttcccccattccctctccctgggccgcgcagttgaagccggccatggcccttttctcccgcctgacggtggcgcgcacgctgccggaggggcacggcatttcctacggaggcacctttgtaacggaccatcccaccagggtggctaccgtgggcataggctatgcggacggctatctgcgctccctggcccacaagggcgcccgcgtgatggtggacggcgtctcctgcccgctgctggggcgcgtgacgatggaccagatcatggtggacgtcagccgggtgccgcacccggaaccgggcatgaccgtggagatcatggggccgaacattcccgtgacggaactggcggaaaaggccggtaccatttcctgggaaatttttaccggaataggcccccgggtgccgcgccactacatccactgaaccctctgccggagaagcggtccgcccgtgttcccttattccgcgcggtgccttcattcccgattgacgggcagcctgaaatatcgtttattgatccagtatgatgaaggtttccaccagaggacgctatgcactgcgcctgatgattgatcttgcccagcacaatgacgacggctacatctccctgaaggagatttcagccaggcaggacatcaccgtacggtatctggaacaaattatcgccatcctgctgaaagcgggcttcgttcagagtttccgggggaagtccggcggctaccgcctgtcccggcatccccgggaatacaccacggaagacatcctgaaactgacggaaggctccctgctgcccctttcctgcacggcttcccagaacagcccgtgcccgcgggcgtcaagctgcgccacgctgcctttctggcgggggctgcaaaaggtcattgaggattacctgggccgcgtcacgctggaggacctgtccgagcagcagaaggaaatcggctgcgactacggagcaggcatttaaccggagcacccggcctgaacattttttcgccccttttttgttttggccttatgtcccactttttttacccggcacttgacatcccgtcccgctttaactatctattccctactttcccgataggaatataaaaaatatgaataagaaccatcgttttgaaacgcgccagatccacgtgggccaggaaaatccggacccggccacggatgcccgcgccgtgccgatttacgccaccacttcctatgtcttcaaggactccgaacaggcggccgcccgttttgccctggcggagccgggcaacatctacaaccgcctgatgaaccccacggcagacgttttcgaaaagcgcatcgccgccctggaagggggagcgggcgcgctggcggtagccactggagcggcggccatcgcctatgccgtccagaatattgcgcgcgccggggaccacatcgtttccgccgccaacgtgtacggcggcacttacaacctgtttgcccatacatttgccgaatccggcattgaaaccaccttcgtggacggcagcaatccggacaatttcgccaaggccatccgggaaaatacgaaggccctgtacgtagaaagcctggacaacccgaactgcaacgttgcggacatagacgcgctggcggaggtggcgcacgcccgcggaattccgctcattgtggacaataccttcgcctccccctttctgttccgccctctggagcacggcgcggacgtggtggtgcattccgccaccaaattcatcggcggccacggaacggcgatgggcggcgtgattgtggacggcggcaagttcgactggacgcagaatgataaattccccggcatcagccagcccaacccgaactgccacggcgccgtgctggcggaaatctgcggccctctggcctacatcatgaagatccggaccaccctgctgcgggatacgggagccaccatcagcccgttcaattccttcctgctgctccaggggctggaaaccctttccctgcgggtggagcgccatgtgcagaacgccctgcgcgtggtggattacctggcggctcatccccaggcgcagaaggtgaaccatccctccctgccggaccatccggaccacgaactttaccggaaatattatccgaacggcggcggctccatcttcacctttgaaatcaagggtggcgcggaaaaagctcgcaagttctgcgaaagcctggaactattttccctgctcgcgaacgtggccgacgtcaagtccctggtgattcatccggcctccaccacccactcccagatgacggaggaggaactgaaggcggcaggcatctcgccctccacggtgcggctttccataggcacggaacatatcgacgacattctcgaagacctggaacagggcttccgcgccattctctaacgatttaacggctacaacgctcttttcctacaagccatgagaatttacagaaacattacagaactgatcggcggcactcctttgctggagctgaccaattacgaacgcaaaaacggcctgaacgccgccatcctggccaagctggaatacctcaaccccgccggcagcgtgaaggaccgcatcgcccgggccatgattgacgccgcggaagcctccggagagctgaagccggattccgtcatcattgaacctaccagcgggaacacgggcatcggcctgacggcggtggccgcctcccgcgggtacaggatcatcctgaccatgcctgaaacgatgagcgtggaacgccgcaacctgctgaaggcctacggcgcggaactggtgctgacggacggcgcgctgggcatgaagggagccattgccaaggcggaggaactggccgcaggactccccaacagcttcattcccggccagttcgtcaacccggccaacccggaagtccatttccggaccaccggaccggaaatctggaacgacacggacggcaaggtggacatcttcgtagcaggcatcggcaccggaggcacgattacgggcgtaggcaagtacctcaaatcacgcaatccggaaatacggatcgtggccgtggagccgtccgcctccccggtgctgacccagggaaccgccggcccccacaagattcagggcattggcgcgggtttcgtgccggaaacgctggatacctccgtgtatgacgaagtcatcaccgtcaccaatgaagacgccttcgccaccggcaaggagctggcgcgcacggacggcgtgctgacgggcatttcctccggcgcagcgctctgggccgccacgcaggtggcacagcgcccggaaaacgcaggcaagaccatcgtggtcctgctgccggacacgggggaccgctacctctccacccccctgttcacggactaatccttcccatcctccagccatgaaagaattcagcctccatctctacctggtcactgatgaagcggccaaatgccgccacagccttctggaaaccgtccagagggcggtggacggcggcgtcaccatcgtgcagtaccgctccaccaatccggacgcgggcacctgctaccgggaagcgctgcccatccgggacttcctggcgtcccgcggcgttcccttcatcgtcaacaaccgcattgacctggccctggcgctggacgcggacggcgtccacatcggccagcgtgacctgccggttcctgccgtcagggccatgatcggcccggacaggattctggggctttccgtctccaacgcggaccagctccgcgccgtagacgccgccctggtagactaccttgggatggggcctgtctttcccaccatctccaagctgaacgccccgcccgtgctgggcgtggacggcttcgccgccctggcctcacagtctcccctgcccgtcgtcgccatcggcgggctggacgcggagcgcgcccggctggtgcgcgctacgggagcggccagcggcattgccgtcgtctccgccatttgcggagcggaggatccggaagccgccgcacgggcgctggcctgaccggctgaattccggaaacaagcgggcagcaaaacattctttcaaacgccatgccttcaccaactgacctcatccatgccgtctccgccgatctggaaaaaatccgggagacggctccgttggttctctctctgaccaactccgtcgtccagcccctgacggccaacctgctgctggccgcaggagccgttcccgccatgcttaacgatgcggaggaagccgtggaaatgctccgcggcggaacaggcgccctgctggtcaacctgggcaccgtgacgcgcgaacagggagccgtcatgcagacggcggtgcaggaagccaaccggctggacatcccctgggttctggacccggtggccgttggagctctctccctgcgtacgcggctggcggaacagttgaaggaacggaagccccgcatcatccgcgggaacgcctctgaaatcatggctctggccgggtactcctccgtcacgaagggaccggaaagcaccagctccagcgcagacgccctgcaggcggccagggaactggccctgcacacgggagcggctgtcctcgtcacgggccgcacggactattccacggacggccgccaagtgatctccacggaaaacggccatgccatgatgtcccgcgtcacgggcgtgggctgttccatgggcgcgctggccgccgcctgcgccgccgtctccacctcccccttgcaagcggccgtctctacggccgtattgatgggcatcgcgggggaaatggcctttgaacagagtcccgctccgggttcctttgccgtctccctgctggacagcctgtactccctttctccggaagaagtagcgcggagagcgcgcattcttcccttttaaaccgttactcctccttcccgtaaccgcggaaaagcagcgcgccgcactccctccggaatgcggcgcgttgaatttacaggccttttttattcgttccgcggaacggaacggcgcaggaacaccgctcccagcgcagccatcagcagcatgcatgaggacggttcaggaacaggagcaggcgccgtagccgtaaacgccgatgccatggctgaagaagcttccggagccgcattcggcgtccacaccatgctcacttccttggaatcctcgttcttctggaggctccactggccgtacgccgcgtaatctccggcggaagacgcatccagcgtgaaattacccgtcagggtcgcgttcgctcccccctcaatgaagttcaggatgtgggaggttccccagaagtcggtggaatagtcgaggctcaacgccgccagcttcagcttggcccccgcgtcaatctggaagacgccggactggagcatcaggctgttgcacgccagctcgccccccgcggaaccgcccatggtcaaggtcagttcaaacacagccccggtttccatgaccgtgtttccggacaaggtggcggaaccggaaaggatgcctccgttcttcaccagaatattattccccaggctgaccgtgcccgcatccgtccccaagcctcccagtaccaggcagccgccggaattgaccgtcgccatccccgtcccgagagcctggttggaggccgctgccagcgttcccccattgacggacgttccgccggaataggtattctttccggataaaaccataatcccctctcctgtcttggcaacggagccctttgctccggagtaattgacgatgttggctgatacttttaaatccgcctccgccgtgccgcgctccaccgcaaagacagcaggactgcctcccctcagcttgacattgaccgtcctgatttccgaggccctgtccgccgcccttacctggaaaacggtatccgtccagacctccatgcttcccttcgccacgccgtccagcgtccctcctgccagggtgacggtcatgttccggaaggtctggttccttgtatcactctggaacagggttcctccgttaatttccacatggctgacgcaggcctcatttcccgaattgccgaaacagtccaccccgcgcagggaaaccgttgcgccccggttgataaccagccctccgcggatgataccttcctcacctcctgaaataagcatcagcgttccttcattgaccgtagttcctccggtataagcctggcgtttctgcacggcgagcattccggaaccgtttttcacgaggcggcccgtcccggatatttgcaaattaacggagccggcgcggagcgaattgaaagcgagagttccattgttgacaatcgttcccgtacccagggaaccgtctttttccccgtcacccacggcgagcgtccccgcatcaatgacggtaccgccggaataggaattggccccggtcagcaccagcgttccttccccggttttcacaagagagccggttcctgaaataacgccggattccgtcgcggaaccggagtccacttccgccctcatgacggctccggaaccggatagagccacgttcccgctgtgactgccgccggaaagaatggcatacgtccctccgtccgccacgttcacggaagagccaacttccgcatggcctcccgccgtgaaccgcgcaccgctctccacattcaccgttccggtggcaaagagggccgtctcccagtcgttctcatccacatagccgcccgcgtgcagggcatgcaccccggctaccttcacctcacctccccgcaccgtccacgtcccggtattgaaaatatgcccggacaggttccagacggaaccttctcccgtgccgggcgcgtacaccacatgaagctggccgtccttcaaggaccctccgtccatgaagcctccaagatagtcctgcgccccgtgccccgtaaacgtgaatgtcacggcggtattcgcacggaaattgccgaagcaggctccggaatccagatgcgtgatggcattcagcgtcaaattatgcccgtacatgtccaccacgcccccgcggtggccgaagatgaactccccggacacttggttttccccggcaaggcgcaccattactccgcccccgttcagcttcacgttacgggccgcgtagccgtccctgtccaaaatcagatttccgccgccgcccacgttgatgtccgccgcattgttcccgtggccgctgacgatcaaatcgccttccccaatcttcctccactcgtctccggaggctccggtcagcaaggtggtgaccgcagctcccttgttcaccacaaagcccgccgtattcaggcggcgggaagaatcgcccccgtcgctcagcacataatcgcggttgaaggtgagggaccccgctccggtatccacggacccctggagcacgattgtgccgccggagccgtcaaaaatcagattattgcaggcgttcaactgctcatttgtagcttgtgtacctttcgtggaggtgtccccgcgtaatccggccgccaatccggtgtaatccgtagtcacgcctccctgcacaaaggtcccgttgccgtccgcatccgtcacgttccacagtacgtcaccgctcgccgcaacgcttatggtacggttgaagctgtccacgtaatcgctggcccactggttgccggaacgcatctgggtaaactgtccatacccgcttccactggcagactgtgccgcacctacccactcccacttgccggaattctcattgtacacatagcacgggcttccactatcccctgacaatccaccggaaggcaatggattggactccgaaggcttcttgaaattgtaccagaaccggtaagccggataggtcttggcattttccgggtccggctctcctgttcccggagcgctggcctgcccctcaaaaacaagggttcctccggtcaaatagccataagaggcatcaatcttttcctgtttgccgtttcctgtggcgacagcctgaactccggaaccagctctcatgaccagcctccctttcatgttgtccaggtattccgggtcagtcaggtaaggtgcgtattccgcctccgtcacgatcttgctcaatcgctgcacacggtagtcgtatgtcaaatcggacttatcaccccatgcatcctttctcgtaacgctgcggtaggaatcgtaaaaaggagttccttgcttggcaccgaaacgaaccgtaaaggaaacgaaatggttataataatcatgtgatacggtggcgatgaagccgggaccgcccaccagcgcggcctccccgatgtgggcatccgccacgccgtcaaaattcatcattttggggatagttcccacgtaattgccattcttgtcgtagatggcgacgtctttggcattcacgtcaaaaatgccccggttttccgcgaaatcacggtaggtttgaacatcaaacgagtcagacatcaacccgccataggcgggagtgaggaggcaggccgcccccagcagcccggaataatgataaacattcataagaaattgaaattaagttatgattaaacaaggaacaggcaagtctgccgcacttcccatcttccagtccagaccgttttcacgaacatccggcagggcttcgggaagtgcggcggggttcttcatcaggcacgccgcacacggcggcggaagatacacgtccccaggcctgccagcaccagcagcgcggaggaaggttccggaaccggcgcaggagacggagccacgagcaacgccgcagtttccgaatggtccaaaacggcctcggcattgggagtccagaccatgttcacggttttggaatcctcatcgccctggagggaccaggacccataggagccataatttccggctccggacaggtccagcgtaaacgcccccttcaaactggcgttcgcgccgccttctatcaggttcaggatatgggaggtcccccagaagtcggaggaataatccagagacaccgccgccagcttcagcttggctcccgcgtcaatctggaaaacgccggactggagcatcaggctgttatacgccagttcatccccggcggcccctcccatggacagggtgaatcccagcatggacccggcattcaaggtagtattcccggacagggtggcggaaccggaaagaatgccgccgctcttcaccagaatatcatttccaagagaaacggaagccaaatccgttcccaggcccccaagcgccaaacgtgcgccggagttgaccgccgccaaaccggttcccagagcctggttggaggccgctaccagcgttccccagttaaccgtggttcctcctgaataggtatttctgccggaaagcaccatgatcccggcccctttcttaatgaaggagcccttcaccccggaagagttgatgatgttggacgagacattcaggtcagacgcagacttgccgcgttccaccatgaacaccgtcggattggcgtcccgcaacagcacgttgatgttcctgatttccgaggctttgttcgcggctttcacattaaccacagccttcgtccagatatccatgcgaccgcccgttatgccgtccacaacgcctccggtcaggttgaacaccgtattctggaacgtctggttcttgttgtctccaaaatacagggttcctccattgatgttcacgttcttgacggaggcgttccctccgaaataaccgaagctgtcaccgcccttcaatgtcacctgcgctccctcccggatggccaggttcccgcgaatcatgccgttggcgcctccgtagcccaccacaaggacacccttattcacggtggttcctccggtataggaaagcatcttctggatggtgagcgtgccggaaccgttcttcacgagcgagcctgttccggacacattcgtgttcagggcaaccgaatcagacctgttgaaggcgagcacgccgttgttgacgactgcaccggcgcccagggaaccgcttgtaccgccattccctatggtgagcgttcccgccgcaatggtggtggttccgctgtaggaattgttccccgtcagcgccagctcaccactccctttctggatcaggctgcccgtaccggaaatggcattcgccgccgtcacgctgtccgtcctgttgaacgccagggttccttcattggcaacggctcccgttcccaggctgccggaggttcctccgttccctaccatcagggaggctccggagaggatgcgcgtttcaccggaatacgtattgccagccgccagaataactcctccgccagtgcccatgctctgggtatccaccgtcagggaatgatcaccgccaagcgaactggctacggtcagcatcccgtttccgccgaacaaatatccctgcgttccggctgtcacggccccggacaaaacagcctgtccgtcagccccgatgcacacggaattcagtcccatgccgcccagattcaaatccgccgtacgggttcccgacaggagcagaacgccttcggaagcattggaaacatgcgccagggcggcatccgcttccgccccaagggcaaaggatgttccgtacttgacgagcacattcttgttctgcaccccgagggagcgcacgtccgcgtaggtgaggttcactcccccattcagttcaataaccccggagaaagcagctccaccctccgaatcactgttgtgcgcgttggcaagcactacggttccggtattggaaccgttgccgatggacagggtgccggagccgctgagcttcaagttcaccgtcagcgttccgccgcctccgcccagggtccagcccccatccgcggtccagccggaaagcaggccggtcgttccccgtgttcccaaattcacctctcccaatgcgccgacggacaagtttctgaagccgttcaggccggaaatcgccgcctggtcttccagcagcacgaacgttccggaagacgcctggtccagctttccggcaatagcggaaaaaccagtgccttccacagccagggctccggcggcatccagcgaccagacagcctgcccgagagccccggcggaagaggcgcgcaccaggccttcttcaaccgtggcagttccggaaaaactgttgttcccgtttttcagaagcagggttccttccccggttttcaggagggaaccggctccggaaatcacgccggactccgtcgcggacccggaatccacctccgcacggaacatggatgcggttccggacaacacaacgtttccgctgtgatttcccccggccagcacgccatacgtgcctccgtcatccacctgcacggcagacgccaccagggaatggccgccggtggtaaaccgggcgccgctgttcacctgcactgttccagtggaaaaggaggccatctgccagtcgttctcatccacatagccgcccgcgtgcagggtgtgcactccggccaccttcacctctcctccctgcaccgtccacgttccggtattgagaatatggccggccagattccagacggacccttccgccgtgccgggtgcgtacaccacattcatcagtccacgggaagcggcctccccgtcccgcaaagcccccaggaacgtctgttccccggagcccgtgaacgtaagcgttacggtggaattgccaaggtaattggcaaaaacggctccggaatccaggtgagtgatggcgttcagcgtcaaattgtgcccgtacatgtccaccacgcccccgcggtggccgaagatgaactccccggatacttggttttcccccgccaggcgcaccattactccgccgccgttcagctttacgttgtgcgccgcgtagccgtcccggtccagaatcagcatcccgcttcctcccacgttgatgtccgccgcattgttcccgtggccgctgacgatcaaatcaccttccccgatcttccgccactcgtccccggaggttccggtcagcagcgtcgtcacggttgcccccttgttcacaacgaaacccgccgtattcagacggcaggaggcatttcctccgtcgctcaatacgtaatcccggttgaacgtgagggaacccgcccccgtatccaccgagccctggagaacaatggtgccgccggagccgtcaaaaataagattgctgcacacgcctatctgcgtgtccgaggcccgcgttccctgtgtggaggtatctcctcgcaggccggaggccagcccggtgtaatccgtgctgatatctccctgaacgaaggttccgtttccgtcgccatccgtcacattccacagaagatccccacccccttccgacacgctgacggtgcggttgaaactgtccacgtaatcgctggcccactggttgccagagcgcatctggctgaactcgccgtagccgctaccgccctgggattgaccggcccccacccattcccatctgccggacttctcattaaatacatagctgggacttccgctgtcccctgccaatatgccggaaggcaggggattggattccgaaggtttcttgaaattgtaccagaaacggtaggccgggtaagtcttggcattctcaggatccggctctcctgttcccggaacgctggcctgtccttcaaaaaccagggttcccccggtcaaataggaataacctccgctgaccgtgtcctgtttaccgttccccgtggcaatagcctgggttccggacccggcacgcagaaccagccgtcccttcatgttgtccaggtattccggatccgtcaggtagggggcgtattccgcttccgtcacgatcttgctcaaccgctgcacgcggtagtcatacgtgtaattcgtctggtcgccccaggcattcttgattaccacgctccggtaggcgtcataaaacggcgttccttccgtggctccaaaacgcttggtaaacgtaatggtctggttattgtaatcatgggacacggtggcgatgaaacccgggccgcctaccaaagcggcttccccggcatgggcgtccgccaatccgtcaaaattcatcattttggggatggagcccacgtaattgccttccttgtcgtaaacggcgacgtctttggcattgattccaaagatgccccggttttccgcaaaatcacggtaagtctgaacgtcgaaggaatcagacatcaatcccccataaacgggagagaggagacaggccgcccccagcaagccggaatgatagaaataatgtaaattcatggcagaacgagctttaggttaaaataattcaaatcataaaaagtactgctattcaaaatgttttttaaaggacgctccaggaatcgggaactttatttcattcccaataattttaattattcttcattttgttagagtttgaaaacaccatttgttttcaacaaacgactttacattccacccacaacaagaactggcgcgaataccaagctttgcatgacacaaattatttcttctttttccttgcttcaaataaatttacctgaaagttcgccttttccggcactccgcctcatctcttcttcatgccgcgcaagaatgaaacctgtttagtattgtgaaatatcccctgccttttataatgaagggcaacccatttcagcatggcaaaccacactaccacgcaaaagctctgcaactggttcattcagcaggcgaatgcaaaaaaccttcctctcacgcccgtcaaactgaaccacctggtcattctggcggactggtggcacctgcaccatcatggcgatttcctgatcaacgaacgggcggaagcatggacctgcgggccggtgctcccctccattcatcacgaatacaaggaccagccgccctgctccatcattgaacgccccagccgccgccagccccctctggaagaggaaacggacatcatcccttttctggaacacatctggaacgtctatggcaaatacacggcccagcagcttggccgcatcaacacagcgccggcctccccctggcagcaggcgcagggcaggcacggagaagcggaacaccagcaaattgcccgggaacacgtgaaagcctacttccaaaccctggctgaatgaccccgggagaaaagccggaccgcccttttttctccgcattcattttttctattcaaaacacacatttgagtgaaaaaaaacttgcaaagaacagccggttccgctttaattcgcccgcaccgcaaaggtgcccgttacatagccctatagtgtaatcggtaacacagcggattctggttccgtattttggggttcgagtcctcatagggctaccacctttaagaaaaaggccgtctctccggaggcggccttttttacttttaacgttcctctgggccaggaaaaagtccggaactttccagcaactgcggagcccttcaaagcgtggacggcacctttccaaataatccctctgttgatctgaggacacggacagtaagaacgcaaatgcacattttttccaccgtcaaccgtaagggaatattcccggacctggaaaaacggtcaaatagccgctaacagcgccagacgaaccatgggaaaaagacaaaaggccttccctctttccggcccttcctctttccctgaaaggaacttgtgtccggaccgccgggatgccagccccggtaattcctgagaaacattttgtcaaagggtccaccatatcctttcagcgggcatgaagcatattccgccgcgtgctcatgaaggagcaaatttttgaaagattctctcccggcacggcttatactgaaaacatgacaaggctttttccactcctggccggattgctgctgttcccggtatttcaaactgaagcagcagaaaaatacagcattattccggagccggagaaaacggagctgaagcggaacgccaccaggaccttgaagctcctctccgacaaaacctctcctgccctgggcaaggacgcctaccgcctcgccgtcaccccgcagggcgtccaccttgcctccggcgggaaagagggcaggatgtacggcctggtcaccctccagcagctccaggaccagctggcggcacagccggagggcatcccctgcggcgtcatcacggacaagccccgctacccctggcgcggcatgatggtggaccccgcccgccacttcatccccatcaaggacctgaagaaattcgtggacctgatggcctactacaaattcaacaagctccacgtgcacctgacggacaaccagggctggcggctgcccgtgccgggctaccccagactgcaaagcgtcgcctccaagcgggaggaaagcttcggagacggcatcccccatgaaggcatgtacaccaaacaggagctgaaagacctggtggcctactgtgcggcgcgcggcattgaagtcatcccggagatagacgtgccgggccacaaccaggccctgcatgccgcctaccccgaattcttctgcttccccaaaccggacatgaaggtacggacagtggccggcaacagcaaggaactggtatgcccccagaagccggaggtctggaaattctacgccgccgtcttcaaggaactcaaggacatcttcccgtccaataccgttcacctgggcggcgacgaagcccccacggaactctggaaaaaatgccccctgtgccgggaagcccggaccaaggcaggcatgaaagacgaacaggaacaaatgagggctttcttcgccaaaatgacagccctgctcgacaaaaacgggcaaacgccgcaattctggtatgaagggaacgccggcatctaccacccgggcgaaacagtttacgcgtggcggcaggaccaggcgcgccaggccattgagaaaacaaaaaaggccggcctgaacctgattatggcgtccaatgaatattgttatctggatttccctcaattcccgggacaatacaactggggatggatgcaaaccacgaccttgcagaaatgttatgaactggatccggccttcggcaaatccaccgcggaagcaggccacatccggggcgtgcacgctcccgtgtgggcggaacaccttctggacctgaaccacctgctttaccgcgtctatccccgcgccatggccctggcggaagcgggatggtctcccatggaggtgcgttcctgggaaaacttccagaggaaagtggccgaccaccgcccctttgtcctcaagcgctttaattacgacttgaaacgcacgaaggacaatgagccgcccttccggtgggaaaacaaaaagtaattccgccgtttttccttatcactcctgattctccatgatagaatctcttctgaaaaagccctccgtcatgtttaaactgatctacctcctggcctgcacagctttctctgcatccatggcgtgtgccgcaccagcagaaaaatacagtattattccggagccggagaaaacggagctgaagcggaacgccaccaggaccttgaagcttctctccgacaaaacttctccttccctgggcaaggactcctaccagctcaccgtcaccccgcagggagtgaacctctcttccggcgggaaagagggccgtatctacggactggtcaccctccagcagcttcaggaccagctggcggcgcatccggagggcattccctgcggagtcatcaaggacaagccgcgctacccgtggcgcggcatgatggtggaccctgcgcgccacttcatccccatcaaggacctgaagaaattcgtggacctgatggcctactataaattcaacaagctccagctccacctgacggacgaccagggctggcgcctgcctgtgccgggctatcccaaactgaaaagcatctcttccaaacgggcggaaagcttcggcaacggcactccccacgaaggaatgtacaccaggcaggagctgaaagacctggtggcgtactgcgccgcgcgcggcattgaggtcatcccggaaatagacatgccgggccacaaccaggcgttggccgccgcctatccggaattcttctgctttccagaccacaacacgaaagtcagcacgaccggcggtgtgggcttgtacctggtatgcccccacaagccggaaatatggaaattctatgccgccgtctttgacgagctcagggacatctttccgtccaccatggttcacctgggcggcgacgaagccccgctggaaaaaacctgggaaaaatgccctctcagcgtcaaataccgccagcagaagggaatgaaggacgtccacgaggaactgaaggaatttgaagcgaaaatggcctccatgctcgccgcgcgcggcaaaaagcccatcttctggtatgaaaagccgtgggcccaggccagcgtttaccgcaagggagacaccgtcttcacctggcgcatgggcttgacgccctccaccatcacggaaacgaaaaagcagggccttcccctcatcatcgccgccggggaacactgctatctggactacccccagattcccggccaggacaaccggggctggatgcccaccaccacgctggagcaaagctacaagctgaaccccgcctacggcaggccggagcaggaaacagaccatatcatcggcgttcaggccaccatgtgggcggaacagctccccaccctgaaccacctgctttaccgcacctacccccgcgcctgcgccattgcggaagcgggctggtcaccaatgaacgtgcgttcctgggaaaacttccagcgcaagctggccgatcagcgccaatttgtcctcaagcgtttcaactacgatatggagcgcaccaaggaaaacgaaccccctttcaaataatccgcattctctatccatgagcagcactaaatttgcacgtccgcaccgcccctccgtagaagaactggcccagggagtcctggccgggaaccgcgccctgctgggaagggccatcaccctgatagaaagcaacgccgctaaagaccaggaagcctcacgggcgctcatctccaagctcctgccccattcgggcaatgccgtccgcatcggcatcacgggcgttcccggcgcgggcaaatcctccttcattgaagccttcggcacctacctgtgcaaaaaaggcttcaaggtggccgtgctggccattgacccgtcctcttccgtttcccgcggttccatcatgggggacaaaacccgcatggaagaactctccggggaggaaaacgccttcatccgcccttccccctccggcggctccctgggcggcgtagccagaaaaacgcgtgaaaccatgatcgcgtgcgaggccgcgggctttgacatcatcctcattgaaaccgtcggcgtcggccagtcggaaactaccgtccgttccatggtggacatcttcatgctcctgctcatcaccggcgccggagacgacctccagggcatcaagcgcggcatcatggagctggcggacatcctggtagtcaccaaggacgacggcgacaaccgccagcgggcggcggcccactgccaggaactgaaaatggtgctccactacctgcaaagccccacccccggctggacgccctccgtcctcacctgctcctccctggaagggcgcggactggacaccattgaagaaacgctcttccgcttccgggacagcatgaaggaatccggcttctggtacaaccgccgccggaaccagtccctctcatgggttcaggccctggtgcatgaagccctgctcaccgcctttgaacagcatcccgccgtggcgtcccgcatgcccgtcctggaaaacatggtggccggggacaagatggaccccgtctccgccgcgcacgacctgctgaaccacttcacttatcccgtgcccggacattgaagaaatccgtcagcactctggcgtacacctccttcttgaactccggcagccactccagcctgaacccggccggggctatccacctgtaggcgcagaactcccggtggtccaggctgggctccggagcgtccgcacgcagccggcacaggaaatactcctgctcctgccccacaaaaggctgctgccgcttttcgcggacatactccagcacctccggcggataatcgtaacgatagccgccccgggattccacaacatcatactgggacggcaggaaccccacttcctcccggacttcccgcttcactgcctccgtggcagtttcccccggatcaatccccccctgagggaactgccaggcccctttctgcctggaacgttcgcaaaccagcagctttccgtcctcccggaccaacagccccgccacattgggacgatacaatctttccatgccttcttacctagcacaacattccctgcatttccagccatgttcttccacaaatttgttgcagtcatgtaaaaatgactcagatacagacactttattctccccgccaaccaactccggatataaatcacaacccatcagcaggataagtaatataaaaaaacaaaagacaccctccctggttgtggaatttcctgttaaatatccagaaaactctggtagtcaaacattaacatactgccattttccgaacattgttctttaacggcaagtctattttcctgcaaggtgaaaactggctgactggccgctcttttacttttcacgtcccgttaagaaaaattgaccatgaaaataaaaatcaattatttcgctgccatgttgctggcaatgttcgcagggggaggcataggcgcccagggcgcggagcagcctaaaaaggcgacaagccatactattgaatacaaccaaaaatttctcggcgctcatggcctggacgagaacgacaaacaagactttcaggatgctgaaaagggattcatggcaaccctcaaggacccgaacattaaaaacaaggagggacggacagtctttgacatctctgcctttgactttaccaaggacaaaccggcccctgatacggtgaatccgagtttatggcgcgtctcccagctcaatgccaaaagcgggctgttcaaggtcatggacggcatctaccagattcgcgggtttgatctttctaacatgaccatcatcgaaggaaaggaaggcctcatcatcattgaccccctcatctcggaagaaaccgcaaaagcggggcttgacctctactatcgggaagtggaacagccggagactgggaaacgtccggtcaaggcagttgtatacacgcactcccatgtcgaccactttggaggggtcaagggagtagcatcggagcaagacgtcaaatccggtaaaacgcagatactggcgccggagggattcctgaaagaagccgtttccgaaaacgtctatgccggcaatgccatggggagacgctccacgtacatgtatgcagcgccctttaacaaggggccggagggtaccgtaggctccggcctgggcaccgccagctccagcggaaccattacagtcattccgcctaccgatacaatcaccaaaacaggtgaaacaagaacgatagacggagtggagatggaattcatgatggctcccggaacggaagccccttctgaaatgctgatgtatctccctcaattcaaggcgctttgcagtgcggaggacgcgacccataccatgcataacctttataccctgagaggagccaaagttcgggacgcaagcaactggtggaaggctcttgatgaagccatccagcgttatggagacaaaacggaagtcttattcgcacagcaccactggccgagatgggggaaagaacgcatcagccagttcctggccaaggaacgcaacggctacaaatacatgcacgaccggacgttgaacctgattaacaagggatatacgcctgtagaaattgcggaaatgatcaagctgccgccggaaatcgacaaggaatggtacttccggggttattacggcacgctgaaccacaacgccaaagccatctatcaacggtacatgggctggtatgacggcaacccggcaaacctgtatgccctgccgcccgtggaagcggccaagcgctatgttgaactggcaggaggggccgacaagatgatagacaacgcccaaaaagcctttgacaaaggagactaccgctggaccgccgaagtattaaagcacgtggtttttgccgatccccaaaacagcaaagcaagaaatctggcggcggacgctctggaacagctcggctaccaggcggaatccggcccctggcgcaacgaatttctcgtcggagcctacgaactgagaaacggtctgcttcagaaccctctggatcttgtatccaaggatattctgtccaacctcacgccggaaatgctgtttgactacatgggcatcagtctcaatgccgagaaatccaaagggaaaaagctcgctttcaactggatagaccaaaatggaaaaccatacggcttctgggttgaggatgaagtactgatgtaccgagaaggaaaaccggtcgatcatcctgatgcagtaattaccggagacaaattcaacttcacccttattgccatgcaggccatgcccttgaaggaagccctggacaagagcatgatcaagatcgaaggcaatacggacaaattcaaggaactgatcggatgcatggacaagttcaatggaaacttcaacatcatagaaccctgaccttctatcgttattctaataaaaccgcttttctggagtaccgggaaaagcggttttttgtgtatgttccagaacagggtaaaacacgctcttttgcgttttagtgccagctcgccagggcgtagctttagtacaatgtatcgaaatgattatatttctatcgtataattctcactctttcatacatcaattgaagctatttccttataaaaaagaattcatcatgaaatgctatcttttttctccttatctttaactcgaattattgaaaaaatccgtcagcattttcgcccatacccctttcttgcacttcaagcaaccatttcaacctaaatcgtttgaaacttggttccggagcatccgcatgcaacctgcacaggaaatactcctgctcctgcctcacaaaagactgctgccgcttctcgcggacgtaatccagcacctccggcggataatcgtaacggtacccgccccgggactccacaagatcatactgggacggcaaaaaacctacctcttcccggacttcccgcttcacggcctccaaggcagtttcctccggatcaatccccccctggggaaacttctacccggaacgttcgcaaaccagcaactttccgtcctcctggaccatcaaccccgccacattaagacgatataattttgccgtgtccttctatctaccagaacttcaccaccatttccatatatatttgagaaagattaactcattaaataaggagatatagttacccaatctagaagaatcataatggacgaaaaaatcgatttcaatgggatgaataaataaaatgagatatttatgaatttcatataaactattaattcacattttatttaccttgaaatattcttaaaacttttttaaagaaatgttcaaaagttaatttcgttgtttgactaatacctgcaagtattttctttctttccttctgtgataattgttttaacgcaaacaagatacctgaataattgattgtttcttctaaatctaaatactttttaagataaatgtaatcttcagtagaaatcatttcttccattctccgcttatcatttttattatcagcctcaggaagaagtaaaaaatttcgactctcaatagggccaaaaacatttaaagcttctttataccatttccgtccttccttatcgttatcccatattgcaacataaggaatttgatatgctatgagatactgaatattattgagtatagaattagcatttcttcctggcaatatcctaacgttttcaggtatttcacaaaaaagttctaaacaatatttatcatgtataccctcaacacaaataattctttcatcattttttattacttgatattctggaataagtaaagcatcataaactgcttgcatgaccgttgttgttttagcgttaccatgttcattgctaatgggggtaatttgtatatgaccctttgatgttttttttacaatttgtatattattaaacggaataacttctggattaagtaattgtggcgcatgcgtacagtagattataataccttcattttgagatatttttcccaatttttgacacaatgattcttgagctttagcatgtaggtatgatcctggttcatccagaagaaatatagtgcttttctttgctccagtttgtttaggattaaaaagaatcttcataatgaaattatagtaccatataaagcccttacttctactggttataagaaaatgtcgatctttatctcctttacgctctactatcttgatgtgcaattttcgcccctcattttgctgatttgaaagatttaatttaattgtcaaactagccttttcaggagaaaacttcttccattcattagttaattgtcttgtaagataggattgaacatccgaaaggatagaatcttgtagttcgggatcttcattaaatatattatcccaacttgagtctattcctgcatccttgaaaacacgctcaaaaatagacctccattcgctattaccaggtattgaattacctgatggaataagattgacttccgatacaggtcgatcattgaaatcatcattgtagagaatataaggacacaatgctacaatgttttcacaaatatctctttctatatcaagaatattttcattatatggaaaaagatcgcttgaataataatttcctgatttttttaaatgtctcgttatatttacttgcccatggaaatttttagctacttcttgtgctattgagatttcttcaggagtatatacagattcattataattatcttttaacgcaatattatcttctacaatttccttaaattttacaatagggcattctattaatgcagaaatcgtagactcttcggatttttgagtttcatatagatttatggtcttctctaaatgagaactgttccctatttgatcgtttgattgatcaaaacataatattgcttgaagaattgttgttttaccacattcattaactcctacaagaggtataattctttttgacaaatcaatagtaagaggtcctgatatagctctataatttttgatggtaaaacttttgtatctcatggcttgctgtttgatatcatagttttctataaaatgtaaataatgaaaagaaaactatacatacttataacaattttttcatgcatattcaaacaaaaaacaacatattactaaaatttgatgagaaatagagtagattccagctcctaaaaagactctcggccaatgattgagctatctcagaaacttagtaaagaaaagtaggtagtccattggaagtcctctgatagatttttcttcccacagcttagtaactgatattaaatagagccatgaaacgttttttcctttctgctttgacgctgtgtgtttgtgctacggctcctctttctgcccagtccaagacgggggctcctgctcagtctacggatgattacaatcagagccagttctggatcggcaattttccggaggggcagtatgtggtgcatctcagccggattgtggcggtggcgcagcacaagtacattctggacaatgcgtgcatggtgtatgaggtgactctggtcaccctggggaatacgcccaccaagttttattatctggagacgctggggcagaattccggcatcaatgccattaagaatgtgaccgaccgggcgaaggagctcggttccggagccgtcaaccgggcgacgggaggaagcattgatccggatactaccgtcgccaaggcttacccgaacacgaataccgtcgagttccgcgtagccactctggaacagctcaacaagatgtacgcctccctgctcaaggcgtggcaggacggaaaagggaggaccttcaagccttgaaggtagtgatgagagtttagagagtagtgattagattttaaattcgcggactgcaagtccggattttttacactaaaccctcatctctaaactctcatcactattaaatgtatttcctctccatcatgtgggccttcaaggggtccgcggcgaagaggtgcgtgaggccgatcgccagggcgtccgcggcatcggattccggcgtttcccggagttccagcagggcgcgcaccatgaaggcgacctgcgctttttgagcggccccccgccctacaacggagagtttcacgcttttgggagagtattccatgatccgcagtccggcttccgccgcggcaatgaccacggccgccttggccgcgcccatcgtgatggccgtctgatgggactggacgtagatgatgcgttccaccgccatttcatccggttcccatttgtcaatgaggttgcccaggtgctgcttgatggcaagcaggcaaccggactgggacacactccggggaatggagagcgttccgtagtccagcgcgcacgcccggcgatggtcgccctccaccacggcatagcccgtgttgcggatggccgggtctatggcaaggatgcgcatgggatgatattcattcccgcagagagaaccttgtcagctcccccttagcgtctgcggcgcttgggaccggcgggtttgaccttgcggacggatttgacgggcttgtcttccagcagggcggtgtacgtgtagtcgaagccgtccagctttttgcgttcaatgggctttccgatgaagttttccacagccgtggcaaagtccacttcatccgccgtcatgatcgtgaaggcgtctccggaggcttcggcacggccggtacggccgatgcggtgcacgtagtcttccgcattttccggcacccggtagttgatgacgtgggtcacgccgctgatgtcaatgccgcgcgccgccacgtccgtagccaccagaatatcatatttgccgctcttgaagcccttgagcgcttccatgcgttccttctggggaatgtcggagtgcatgacggccacttccccgcggtagccatgctgcttgagcatgccgcacacggcgtccgcctccttgcgggtacgggtgaagatcatgacggaatggaagtccgttcccttgagcagggccagcagcagttcgtcccgctggtccagcgccaccgggtaaaaggcatggctgatggtggcggccacttcgcgccgggcgatggtgacttccgccggatccgtcaggcaccatttggcaaatccggcgatgaccgggggcatggtggcggagaagaagagggtctgcctgccttcccacgggcagaggttgacgattttacggacgatggggagaaagcccatgtccagcatgcggtccacctcatccagcaccagggccttgacttctccgaagcgcatggtgccgcggtagaagtggtccaccaggcggccgggcgttgccaccacgatgtccgctccgtttttcaggtcttccgtctgcttcccgtagcccacgccgccgtacagcagggccactttcaacccggtgaattcgccgtattcggcaaaggcttccgccacctggtccgccagttcgcgggtgggttccagcaccagtatctggggcttgccgatgggttgaagctttgtcagcagggggagggcaaaagcggcggtttttcccgttcccgtctgggaggctccaatgaggtcccggccctccagaatgatgggaatggcctgctcctgaatgggggtgggatgttcataaccgcatttttccaccgccttcaagacgggttccgataaacctaattctgaaaataacattgatcttgtatgcttgctagagagtggaacacgtccccgcgcagcggcgcgggaagcgtggtcaggagatgaacggattggtcagcagttcattcttcacggtggtgtacggtccgtgccccggaaaaatcatggtcgtggcgggctggttgagcactttcttttctatgccctgtttcagcaggcgcaggttccctcccggaaggtccgtccgtccgatggaaccggcaaagataacgtctcccgtgaacatgattccctcgtccggcaggtcgtaaacgatgctgtccggagagtgtcccggcacctggtgcagatgccacagcaggccgccccagtttgccgtgtggatgtccggcgtgagtatttcatccaccacaaacggctgtacgttgaggggaagcccccaggcgtcgcgcgccattttttccagcgtcaagtcttcagtgtaaggctgtccggcgtgaatgcggcagccgaagatctggcgcatgcggcaggcgtcttccacatggtcaaagtgctggtgcgtgatgagaaggtccgtgatgatgatatcgggctttttggagtatatccagtccgcgaagccggacggagcgtccaccgccacgtaagagttatccttcgtcttgaagagataaccattacaggaagctactccacccgtataaacgcgaatccgatccatgagcagggattgtagtgagatcgtccggaatatccagtataaagacggtttccttcaattgctttctgtcatcttcccgcgggggtggccgtcacaccaggctccagggaatgacgcttccggcctccatcggcaccactttctgtccatgcccctcgtaggcgtccggcaccagcatttcccgccgctgcaggcgcaccgtcctggcaggaggcttcagtccgtacagggaacaggcatggccggaaacgaagccctgcaaccggtccagggcgccgtgtccgtcaaacagggccgccaggcgcggcagggcgatgggagcggtgaacacgccggcggcgcagccgcacgcttccttggcgtggacgggatggggggcggagtcactgccgaacatgaggcgcggatgtccggataggacagctttcaacagcgcttcccggtcttccggccttttggcgatcggcttgcagaagaggtgggggcgcagcatgcccccggccacgtcgtccagcgtgataagaaggtgctggagggttacggtagccgcgaggttttcaaattcatccagcagccgcacggcggaggccgtggtgatgtgttccatgcagatggtcagccgggggaagcgggtggccagatcacggtaaacgtccaggaattcggcttcccggtccatcacgaatccgtggctttcaccgtgaaccagcagcggaatgcccatttcctgcatgagggacatggtgccctccgcatccttcatggcccttacgcctccttcgctgttcgtggttgctcccgccgggtacagcttgatgccgaataccagttccttgagcgtagccagttccttttcggaataggagcggaagaacgccgtcatgtacggctggaagacgtctcccccgcaagcgtccagcacccgctgccggtaggcctgcaccgcatccgcatccgccacagggggcaccaggttgggcatgatgaccgccccggcaaaggaggcggagctcaggggtgcgaccagtttcagcatgtcgccgtccctcaggtgaagatgcatgtccagcggggagtgcagttccagaatcatgcgggtatcatgggggaagattgtggcgaaatcaagcatggtcccctgctccgcggaaaggaggggtttggcggagagaaggagaagggagaataagagcctccgctcccggctggatgcctttcattcaaaccgtggggatttatgcaaaggcaccacctctgccgggatgcgtcttgggaaaaaacaggcaaacgaacaggtgccggagaaccggacaatcccagggcacaaaaaagccgcccggaggcggccgtttcttctttgaaacaaggtggcgaagcggacggggctcgaacccgcgacctccagcgtgacaggctggcgctctaaccgaactgagctaccgctccctgaccttgaatgttgttcctgccttgcggcgaggacgtggaggcttatacacgcctttataccccagtgacaagaaaaaaagactttttttgaaacttccgcaacctccggcggtttgtatggtgaaggagccgtgatttttcatttttccgatttatttcgacacggcaacaaattctcaactttatttgttttagtttgacaacaattaaccggttttgacataacagccccatgcttcaacctgccgtggatatcactacctccgttcacaagttcgagaccatcctttaccagtttaaaagagataacttgaatgaagtggaccagagccactatcagaagatcatggggctctccgtccggcagatgaatgccctgggcgccctgaaccggttgatgaccaaccgccatgaaggcattcccctgaagacgctcgcccaccatctccgcatgagcattccctccacgtccctgctggtggacagcatggtgaagaagggcctgtttgaccgcaaggagaacccgcgcgacaggcgttccctgtgcatccgcctttccgaggaaggggagtccaggttccagctgctttacaacggcatgaagcaacggctggacaccctgttcagcaccctggcggaggaggacaaggagaatttctgccgcattgtggataccctttacaaccacgtttacagtaaataataccatatgaaaaaacatacgcaccaacggaaggttcccctccgcctgctggccggatccggcctgcttttctctctgcttgttccgggttattcccagggagcgccgggaggggccgccaagcccagtaccgtactcgtcgagaaagcgaccgccatcgacagcgcggtgaacaagaaatacatcggccaggtggaagccattgaccgggtaaccgtacagccccgcgtttccggcaacatcgtggccacccgcttccgggaaggcaaggtggtgaagaagggagacctccttttcgagatagaagacacgcgctacaaggcggccgtggaggaagcggtggccaagaaggcccagcttgaagccaagctgctttacgccaagaacagctttgaacgctacaacaggctgctggcctccaagtccgtttccatggatacggtggaaaacgccaagagcaccatgcacgccctggaagcggagatccagtccgcagacgccgccatcacggtagcgaaggatgacctcaattacaccaaactgacggcccccatcacgggacgcacgggacgcgtcactttttccacgggcaattacatcacgcccacctccggttccctggtgaccatcacgggcattgacgaggtgtacgtgaagttccccatcagcgaacgcgatttcctttccctgttcggcacccaggagaagatgaagaaggacgccctggtgtccgtcaacctcgccaacggcaaggcatacgaccagccgggcaaaattttcatgacggacaataccgtccagccgactacggacaccctgaacgtctgggctaggttccccaatcctgaagacgtgctgacgcccggcggcgtggtcacggtgaatctttccaagaagaacgtggaccgcttcccggctgccaacatttcctccgtgatgcacgacgcctacaagagctacgtttacgtggtgaatgaccagggcgtggtggagcgccgcgacgtcacgctgggcaacacagtcaataatgaacagtgcttcagctccggcgtgaaggaaggggaagtcatcatcatcgacggcatgcacaaggtgcgccccggcgccaaggtgaatccggtgtattccgctcaaaactgatcctcccatgattgcggacctgtttatcaaacgccccaaattcgccatcgtcatcgccatcctgatgattctggcgggcggcatctgcctgaagcagctgcccattgcggagtatccggaaatcgcccccaccagcatcaacgtgcaggccacctacacgggcgcgagcgcccaggtggtgatggagacgctggcctcccccattgaggaggaattgaacgggctggaaaacctgctttatttctcctccaagtctgacaacaccggcggttattccctttccctgacgttcaagagcggcacggactcggacatcaacatggtgaacgtccagaacgccttgaagcgcgtggagtacaagctgcccaaggaagtgacggaccagggcatcaagatacgtaagcgctcctcggacatcctggggttcttcgccttccggtccaccagcatgagttccctggagctgaacaacttcgtcaagtccagggtgaaggatgaaatcgcccgcgtgccgggcatctccgccgtcaacctgatgccggaaaagaattacagcatgcgcatctggctggacgccctgcgcatgtccgccctgaacatcactccggatgacgtctccaacgccatcaaggcgcagaatgtccaggccgccgccggttccatcggctcggaaggggaaaacaatttcatccagtacaaggtgaacgtcaccgggcggcttcaaaccgtggaggagttcagcaaaattatcgtccgcacggggcaggacggccacgtcacccgtctggacgacatcgcccgcattgagctgggcgcggaaacctacacgggcagcagccgcaacaacggggaggattccgtgaacatggccgtgtaccgcctggacgacgccaatgccctggaagccatgaacggcgtgaaggatacgctggtgaatttgaaggaccgcttcccggacggcgtgagctacgtcgtcagctacgaccccacgcagtatatttccgccaccatggcggaaatcgtggaaacgctgattatcgccctgattctggtggtgggcatcacgtacgtgtttcttcaggactggcgcgccacccttattccggcgctcgccattcccgtctccctgatcggcaccttcgccatcctgctgccgctgggcttttccatcaacgtgctgaccatgttcggcctgattctggtgatcggctccctggtggacgacggcatcatcgtggtggagaataccatgcgcattctggaaacggaggacctgaccccggaagaagccaccaagaagagcatgcaccagattacgggggccatcatcgccaccacgctggtgacggtggccatttacgtgcccatcgcctttttcggcggcatggtggggaacatttacatgcagttctccgtgaccatgtgcgtggccctctgcctttccgccatcaattccctgacgctcagccccgccctgtgcgtgctgctgctgaagaagaagaaaaggaagcagagcaggttcagccccttccgccccttcaacgccacgctggaatgggcgcgcaagagctatatcaagtgcgccggcatcatggtgcgccgcgcgtggctcacgctgattctgctggccgccgtgctgctcggcaactggaagctgtttgaaaccgttcccaagtccttccttcccccggaagacaagggcaccgtcttctgcgacatccagctggctccgggcgctacgctgggccgtacggaacaggccatgcgcagcgcggagcagaagctcatgagcattcccggcgtgcgccaggtttcctccacctccgggttcagcttcatgggcggcaacggggaaaacctgggcatgtgcatcgcccagcttgactcctgggacaagcgcaagactccggagctttccctggattccatcatgcagaaggcttccatcctgtgcgacgagattccggcggccaaggctaccgtgttcagcccacccgccatcatgggcctgggcctgacgggcggcgtctccttcatgctccaggccagtggcgaggaaactcccaaggacctggaacgcgtgacgaacgaactgctggacaagatcaacaagctgccgggagccatgtacgcccgcagcgcgtatgaggcgaacacgccccagcttttcctgaacatcgaccgtgaaaaggcgcagagcatgcacgtgcccgtgaaccgcattttcacgacgctccagagcaagctggcctccatgtacatcaatgatttcaacctgatcggctacacgttcaaggtgaagatgcagtccgcggcggaagaccgcaccagcatcaacgacatcatgaacacctacatccagaacgaccagggccagatggtgccgctcagctccgtagccaccctgtcctacatggtcggaccgcggcagatatcccgcttcaaccagctcatgtccgcggaagtgaccgcccaggccaggccaggcgtcagcagcggagagctgatgaaccagattgaggcccttccgctgccggagaattattccatcacctggacggacatgagctaccaggaacggcagaatgacggcaagatcatcctgctgatgggcatggccctgctcttcggctacctgttcctggtggcgcagtatgagagctggacggtgcccatctccgtcatcgtctccgtctccgtggccctgctgggcgccctgctgggcctgatcatctgcaacacgcccctgagcatttacgcccagctggggctggtgatgctggtgggcctggccgggaagaacgccatcctgatggtggagttctccaagatggagcgggagcgcggcgtgcctatccaggaggcggctctggaaggggcccggcagcgtttccgcgccgtgatgatgacggccatttccttcatcatcggggtgttccccatggtcatcgcctccggcgcgggcgcggcaagccgcaaggccatcggcatctccaccttctacggcatgattcttgccacgctggtgggcatcctgttcattccggcgctgtacgccatgttccagcgctaccgtgaatgggtgaaggccctgttcaccggaaaggcgcaataacgggagaaaaaatccctatttgggagacgggggggctttgccgctccgtcttttttgcgcttcatcccatatccgcggagaatgcggaaaagaagccgtccctttccctactcgtacaaatacaggtcaaagccttcaaaccgttccttcagggaggcatgctccagcttgtcctcaaacggcgggaggaacgtatccgccggatattcatccttcactttggagacccacatgcgggacatgaacggcatcatgagggaaaagatttccgccccgccgatgaccatgacctccgggtccatcagttccaattgttccagttcctccacggaatggatcacctgcaccccttgcgccatccaggcggggtcacgggtcagcacgatgttctgcctgtcggggagcggcttcccgatgctctcataagtcttgcggcccatcagcacgggatgtcccgtcgtgatgcgcttgaaggtcttgaggtcgtccggcagtcgccagggcaacactccccggtagccaataccgcggccgggggccatggcgactactcctgtgtaagtaacgggctgtgacatgatggatcaaggggtggaattctagacggaaatgggcgccttgatgtgcggcaggggatcataccccacgagttcaaagtcttcataccggaacccgtcaatggttttcacctccgggttgagcttcatgaccggcagagggcggggcgtgcgggagagctgctcccgcgcctggtccagatggttccggtacaggtgcaggtctccgaaggtgtggatgaattcccgcacctcatacccgcatacctgcgccaccatgagcaaaagcaatgcgtaggaggctatgttaaagggaactcccaaaaacaggtccgcgctgcgctggtaaagctggagggaaagcccgtgcttcccttcccccggctgggcgggaatcacgcagaactggaacagggaatgacacggaggaagcgccatgtcatccaccagggccacgttccacgcgctgacgatgtgccggcgagaccacggattgttcttaaggccgtcaatcagtctggcaatctggtcaatgggcttgccgtcgttccccggccagcagcgccactgcgcgccgtacacgggtcccagctccccgttctcgtcagcccattcatcccagatgctgactccattgtctttcaggaacttgacattagtctcccctttcaggaaccagagcagttcgtaaatgatggagcgcagatggagctttttggtggtcaggcacggaaaaccgtcgcgcaggtcatacctgctctgccgcccgaacacgccgatggtgcccgttccggtacggtcttcccggcccactccatgggtcagaacatcctccaaaagtgccaaatactgcttcattcccttaatttacgcttttctaatccctgggcccgtgataatacgagcatgcgccactttagtaccatctcctgcctcaaaagccagccttttcaccgcttcccaccgttttccccctcagcatcttttccggtttccgttccatgatcatccctgaagagccatatttgggatttgccgccctctgccacatagcaggcgcattctgcctgattccggccctgctccacacgcgcacgccgcagggaactatcgcgtggctcatctccctgctggcctttccgtacattgcggtgcctttttacctgattctggggcggcgcaggttcagcggatatgtggaaacgcgccgccgccagacggatccggaatcctcatggggggaactgacggataaaatcacgaactgcatggccccgtatgccgtccagtcctccgatacggtgggaaagatcatgcacacgctttccaacatcgtgcgcctgcccgtctgccgcggcaattcctgccgcctgctcattgacgcggaccacgccttcccgcgcatttacgacgccatcaagaacgcggagcactatattctgatcgaattcttcatcattaagaacgattccgtggggcagaacctgaaagacctgctgattgaacgcgccaggaccggcatccgcatctacatgctgtatgatgaaatcggctcccacaagcttccccccggctacatctccgccctgcggaaggagggcgtgaacattgagcctttcaacggaaaacgccacttcctgagcaacatcctgcggctgaacttccgcaaccaccggaaactggtggttgtggacggggccactgccttcatcggcggcatgaacattgggcgggagtacctgggcaagggagccctgggctactggcgggacacatttgtgcagctggaaggcccctccgtccagcagacgcaaatcagcttcctggaagactggaactgggccatgctgaaatccggtccctcctccctgccctgcctgtgctgggaaattacgccccagcgggaggatgaaaccgtgctgatgcttccttccggcccggcggacgtcatccccgcctggaaaaccgcgatcatcgccctggcgaacagagcccgggaaaggctctggatagccaccccctacttcgtcccggacgaaggggtgatggccgccctccaggccgctgccctgcggaacgtggatgtgcgcatcctgcgtccggaacgggcggaccacattctggtgaagctgtcctccttcaccttcctccgtgacctagacacgtacggcatccaggtctgggcctatcagaaagggttcctgcaccagaaggtgatcctgatggatgacgacatcgccaccgtgggcaccgccaacctggacaaccgttccctggccctgaactttgaaatcaccgccgtcatccactcacccgccgtctgcgcggaggtgaaagccatgctggagaaggattttgcttcctccaaaaaggaatccctggaggattacaacaacaaatccctgggcttcaagatgctctgcaacctggcgcggctgatggctcccgtgcagtagttcttacggtgaatccgttgttgtacgcttgacctgaaagagaggctgtgagaaaatcatcctcaagaagccacctcttcaatttttaacaatagttaactaaataatgaatcctgttacattcaattgtaccgttctgcgcgacgggcaccagtccctggcagctacccgcatgaagacggaagacatgctgcccatcgcccccattctggactccatgggcttcagcgccctggaaacctggggcggcgccaccatcgacgccggactgcgctttttgaaggagtggccctttgaccgcctggacgccctgaagaaggccgcccccaagacgccgcacatgatgctcctgcgcggccagaacatcgtgggctacaccaactacgcggacgacgtggtggaagccttcgtcgccatgagcgccaagcacggcatgaacattttccgcattttcgactgcgtgaacgatccgcgcaacatggaaacctccatccgcgccgccaagaaggccggagcccaggcccacggcaccatctgctacaccacttcccccgtgcacaccacgcagagcttcgtggacatgggccgggaactggcggacatgggggcggacgccatcgtcatcaaggacatggccggcctcatccccccttatgtgacccatgaactggtcagcgccctgaagaaggacctgaatatccccgtctggatccacacgcatgacaccgcgggcctcggcgcctccacctacctcagcgccattgatgccggggtggacgcgtgcgacgtctccatctcccccttcgccaacggtacgggccagccggactgcctgcgtatgctcgccctgctgaacggcaatccccgcaagccggattacgatgcggacaagctcattgaggtgtccgaaatgctcaagcccgtttatgaaagcctgggcaagttcacctcccaccgcaacgaagtggtggactccgacacgctccgctaccaggtgcccggcggcatgctctccaacttccgcacccagctcaaggaacagggcatggaagacaagtttgaagaagtgttcgcggaaatccccgtggtccgcaaggccctgggctggattccgctggtgacccccacctcccagattgtgggcgtgcagtccatgctgaacgtaaagttcggccgctggaagaacatcactccccaggcggcggacatcgccctaggctactacggccgcaccccggccccggtggacccggaagtgcagaagctctgcgcggaaaagatgggcaaggaaccgatcacctgccgtccggcagacctaatcaagcccggcatggaagacctgcgcaagaagcttgcggaaaagggactccccacagacgacgaacactgcgtgatttacgccatgttcccgcagcaggtggaagacttctacaagaagccggaaccgaaggaagaagcccccgtgcaggtgaacaccgctcctgccgcgccgtccatgaccgtcatcgacaacggcatcaccgcccaggtgagcggcccctccggttcccgtgacctgaccatcgtcatcaacgggcagtcccactccgtgaaggtggaacgcgtcggttaaaaatctccggcataccggataaaaccacttgcgggcggtcccctccatgaaagggaccgcccgctttgccgtttacggattcctgaaaatccatccgccgcggcgctaacctacttggtaaaaaccagcatctttccagccaatttctggctgagggcagttgccggaattttcttgacggaaccgggcttgagctgatgggttgcccccagggaatcaaccgccgtcgtgctctgttccgagtcacaggaataatactccagagcagtactgtccttgtctttgccccaccaggattccagcacgtcctgaatggcgttattgctggttcgtaaaacatccaggtcaaataggaattttgcgccccaatggtaggtgtccgccaatttcctggacgcatgggccacgttcttctgcacaacgcaccaatgagcgcgaattcctgaattatcgggtttgccagaggcgtccacgcagaaaggaaccatgcagaggcctccgccattcagcgtttcaatgatggcagtgacgtcacaggcaacagactgacacttgattttggtggactccagacccttgatataatcggccatggagggagtagcgtcatataattctccaataacggttttcccgttctttttgaatttgttcctcagggattcttttgttttgtctccgtctgccgtggcaggcattttaatatcatagagatattccaggacaaaggacaaggcgtagagaccgcaagtcggcccccgctggtccttgaattcaacattccggccttccggattggtaactgtaatagacataattcaataatgatggcgtggggattcatttccctcacgccgccattacacttccgaaatgccgagggcgcaccttccaccatgcctccgggcatctttactttccgggacgccgtatcaacccgcggaaagtaaatgccccggaagatcagttttcccggggagacaccattttaatattgggaatgatcagggtaaagatgacgaaggccgccaggtaggcgcttccacagaccatgaagatgatgtcgtacccatgggaggcatttccctgggcggcgaaccaggacagggtcaggcccaccgctgtctggaacagcacgctgccgatctgccccgccatgccggaaaggccggtaatggaggccacgtccgacttcgggaacatgtcggaacccagcgtgtacacgctggcggaccacgcctggtgcgcgcctcccgccagccccagcaccgccacgatggtccacatgtcaaagtactggacgaagatcaccggaaccacgcagcacgcaaagatgagcatggagattttcctgaccttgttcaggctccatccacggtttgccaggaatttggtcagggtgccccccaaaatgctcagtacggtcaccagggcgtaaatgacgatcagcggcagggcggattccttgatgttatagccaaaatgcttgctgaagaaatccggcagccagaagaggaagaaccaccagatggggtccgtcaggaagcgcacgaggatgaggctccaggactgcctgtaagccagcaatttcctccatggaatggaagcgctgacttcctccttttccgcctgcgccagggcggcggattcctccgccagcttcatgcgcgggttcttcggcatccggagccagaatatcacccagataaagccgagaacgccggctgcaatgaaggcggactgccagccccacgcggcggcaatgaacgggatggtggccggagccaccagcgcccccacgttcgcgccggaattgaacagggtggtggcgaacacgcgctccccggaggagaaccagttggtcaccgtcttgatgctcgccgggaagttgccgccttcccccaggcccaggataacgcggctgaggcccatggatttgacgcctacggcaaaagcatgggaaagcgcgcccacgctccaccagatgatggaaatggcaaagcccatccgcgcgccgtatttgtcgataatccacccgaacatggtcaggcccaccgcgtaggaagcctggaagatggacatgatcatgccgtactgggcgtccgtccagcccagttcttggtccagaattggtttcaggatggagagaatctggcggtccaggtagttgatcgtcgtcgccgcaaagagcatgaagagaatcatccaccggaaggagtcctgccttggttgttcctggagcatgggtaaaatgcagttggttgttaaagggcgtctgccttcaaggctttcagggcttcccgcgtgcgcctgcctatttcctcccagtctccggcctcaatgaggggagattcgcaaatccaggaaccgccgcaggcggccacttccgggatttccagccaggagacgatgttgcccgcgttgatgccgcccgtgggcatgatgcgcacgcccgtatggcggaacgcggccagcagggatttaagcatcctgacgcctcccgcggcctccgccgggaaaaacttctggaacaggcagcccagggaaagagcctggctcatttccgaggcggtggagacgcccggcacaaacaggaaatccagctccgcggcggctttcaccacctgcggatcaaagccgggagccacgccgaacgaggctccggcccggcaggcggcctctgcctgttccggcgttaggagggttcccgcgcccaccagcattccggggacttcccgggaaatgcgggcaatggcttccgcggcggcgggcgttctgaacgtgatttccatgcagccgcagccgttgtccagcagcgctttggcaaggggtacggccttgtccgcgtcatggatgacgacgacggggacaagcctgatggcggataatttttccagcagtgtcttcatggtttaaaagttgaagtattgtttggcgttcctgtaggagatgtccgccgccatggagcctatcatctccatgcggtccggaaccaggccatgcgccatgtcacgcccaaggatgcggcacaggatgcggcggaagtattcatgccgcgtataactcagcagactgcggctgtccgtcagcatgcccacgaagcgggagagcatgccgagctggctgagggtttccagatggcgggtcatgccgtccatctgatccaggaaccaccaggcggccccgtactgcatttttccggccgtgacgccgtcctggaaactgccgcagagcacggccagagcggcgttgtcccgcggattgaggttgtacaggatggtgcgcggcaatgttccctgttgagcggaacggtccagcaggcgccccaggggggcgatgtatgtgaaatccgctatggcgtcaaagcccgtatccggccccaggtcccgcagggcggctccgttcgggttcctgagcgcgcccacatgaagctggcgcacccagtttttcgcggaatccagctccgcgaagtagtccatcaggtagttggagaaacgggccgcatccccggaggcgatgtcaccgccccggagagcggaggcgaacagggcggcggcttcctctccggacaggctttcctcgtcaaacgcttcaagtgagtggtccgagagcttgcagccgtgacgggcaaaaaagtcatgccgggaggcgagcgctttcctgaaagcggccaaatcacggatttccatgccggaggcctgttccaggcgcgccacccactcccgccacgcactgccctggtggacggcgcgcgccttgtccgggcggaaggtggggagcagtttgacggaatccccggaagaggcgtgcctccggtgggcggacaggtcatcgcaggggtcatccgtggtgcagacggtctccacgttcatccttttcaggatatccagcgcgcccattcctccggactggagcatggaggaggttttttcccacaccccgtccgccgtttccggaccgaacagaatgccggaaatgccgaaggggcggcgcagttccagatgcgtccagtggtacaagggattgcgcagcaggcgcggcaccgtagccgcccaagcgtcatatttctcccggtccggagcgtctccggaacagaggcgttccggaatgccgttcgtcctcatggcgcgccatttgtaatggtccccgtccagccagagctgggcgatgttggagaactggcggttgtccgcaatggcggcggggtccaggtgggaatggtagtcgatgatcggctgtccttccgcgtactcatgaaaaagcgtcctggcctggggagtgtccagcaggaaatcgtcgttgataaacatggcggcaaacgttggcggttatactccggaataggccagaaagcccccgtccacgggaatgatgacgcccgtgacgaaggaagcggaaggagagaccaggaagcggagcgccccgcagaggtcctccggctcaccgaaacggtgcatgggcgtcttggcaagcaccttgcggccgcgcggcgtgggggttgccccgtccttttccatcatcaggaagcggttctgctccgtgatgaagaacccgggggcaatcgcgttcacgcggacgcccagcggggccagatgcgtggcgagccacttggtaaaattgtccaccgcggccttggcggctccgtacgcgcccaccttggtcaggggctggaaggcagccatggaggagatgttgacgatgcacccgccggaggcggccagcagttccccgaacacctgggaaggcaggatggtgccgatcatgttgaggcggttcacgtactcaaagccctccatgtccatgccgaagaagccttgatccgccggagtgtccggcatgcattgctccgccgggctggttccgcgcgggtcattgccgcccgcgccgttcaccaggatgtccagccttccccattcttccttcacgcgggaacaggcctgttccagagcggccctgtccagcacgtccgcagccagcaccagcgtccggcccagaccttcctccgccagcttccgctggaggtcttccagcttggagcgggtacggcccaggagagccacactggccccggccttcagcaggtcacgggccatcacggaacagagcacgcccgcggccccggtcacgacagcggtttttcccgccagcagacggaaggactggagccccatcgccaggccgcgcagttccgccaggccgatcacgcggccgccgtaggaatacccggcatagcagtgtttttccaggtcaatgtccatcagcttcccgtggtccgggcgcaccggaatgcgccagtccggccatcccgcggccctgcggcgggcttcctcgtccagcaggcactgcatggcataggccatgtccgtatggccgcaaaggtgagaaccggattcccggaagctttcatgatccgcgtcaaacaccgtattgcggaaatgggcgaaatacaccctgtccgcaaactcctccatcagcaggtgcggcgcattggaataaaggccgcccagggagccggtgcagagcgtgaagccggaatgcatggagggaacctcccgcaccagttggcgcatgtcctcctcatcactcatgatacggggaaggccgaagatgggccggggagggtcatccggatgaatggccatgcggatgcccgtttcctcgcacacgggcatgatttcattcagaaagtcatacaggttccggcgcaattgcgcatcgtcaatgccctcgtagcgtttgagcatttccctgaactgctccggcgtcaggtcatccaccgtgccgggcaggcccagcaggatggaatccgccagcgccttgcgggcgtctccgtccatggactggaaaagttcgcgggcgcgcgcaaccgtttccggcgcgtaatcatccgcagcccccgccctctccagaataaacaggtcaaacgcggccacgcggacggcgtcatacttcaaaacgctgctgccgtcctccagcggaaaagccaggtcggaacgcgtccagtccagcacgggcatgaaattgtagcacaccactttcacgcctcctgcggccaggttgcggaggctctgcttgtaaacctccagataatgcttccagttccccgaacacgtcttgatgtcttcatggacggcaatgctttccgccaccacccatttcatcccggcctcttcaaccatccgcgcgcgttcggccacggcctcccgcgtccagagttccccgcacttcacttcatgcagggccgtcacaatgcccgcggctccggcctggcggatgtccctcaacgtcacaggatcacttggaccgtaccatctccagctttcaatcatgtcaggaagaattaaagggttaacggtccacgcgggcggttccgcctttcatcactttttccacttccgccagcgtggccgtggaggtatcccccggagtggtcatggccagcgcgccatgggcgcagccgcagttcacggcgtactggggtcccttgccggacagcaggccgtaaatcaggccggaggcaaaggaatccccgccgcccacgcgatccaggatttccaagttcgggaaggaaacggaatcataaaattcaccgtcgtaatacagcatggccgcccagtcgttcagcgtggccgttcgggccacgcgcagcgtagtagccgcggccttgaagccgaactccttcacggcacggcggatcatccggcggtaggactcatggtcaatgcgggaaaaatcctccgtgctcccttcaatggaaagtcccagggatgcctggaaatcctcttcattgccgatcatcacgtccacaaagggggcgatggcccggttcacctcctgcgcacgggcctgccccccgatgctcttccagagtgaggagcggtaattcaagtcataggaaacgacggtcccgtgcctgcgggcggcctgcacggcttccagcaccacggcgctggtcgtttccgaaaggccggcgtaaatgccgcctgtatggaaccagcgcacgccgtgcctgccgaacagggcgtcccagtccacctccccgggcttcatctggctggcggcgctcaggccacggtctgagcagcccacggcggcgcgcactccatagccgcgctccgtaaagttcagccccacgcggcagtcacggccaatgccgtcaaacggtttccaggccacgtaatccatgtccaggccgccctggagcatgcagtcttccagcaaacgccctaccgggttgtcgcaaatggcggtgacaatggctccgcgcatcctgaagcagcgccttagtccgcgagccacgttgtattccccgccgccctcgcacacgcggaaggaacgggtggtatggatgcgcccttctccggggtccagcctcagcatcacttcacccagggaggcaatgtcccagcggcattcctgttctgatttaatagttaacgacatataaaagcatcaaatggtacggttctgcttagtataaaagaactgtttttctccacaagggaaaacggcagaaaaagaccagacatgcggcagaatattgctattgaaaatgttccaccctgcggaaaatgtctttgctgaataccttggggaatattcttcatcccgtccaacgcctggcaaccttctacggcctccacgtttccaggccttcgcccctcaaaaaatgggaatcatttttccacgcccatcctccggcaattccttccacccatgaaccaatgccttaactaacagtccgtttgacggatcatcttctttcctataccatcctgccgtgagccgccatccccgccccatccgttccccggaaaaaattctgtccgcaaagcttcaggcgggagaggaaatcctgtggacggcacatccggaagaacgcctctggacctggaccgtcgtaaaacggctgctgcaagggtgcatgctgctggccgtgttcatgacgggaacaagatgggtatggtcacactcaggcctggcgttcctgcttctgctcctggcctcacttcccgtttcctatattctcctgattttcttaattaactttctggcggccccgtggctggaacgcccgcgcagacggaacagcctttatgccgtgacgaaccggaggctgatcaccatcatcaagcccaacacgctgttcatcacggagacagtccggacctatcctatccgtaaattgaaatacgtgcaccagaaattgcacaaaaacggcacgggccatctcattctgggatacggcaggcgcaggcaattcattattgaggacgtaccgcaacccggagaggttgcggacctgctgaaaaacagaatcaggaagggaaatcctccctcctgattgaacactgttttttcctcccctgcctattctccttcctgcctcatcagggcgaactcccgcctggtggtccgccttacccgccagagcagaagcacggcagccacggacaagccgatgatgaaccctatccagatgccgcgcgcgcccatggccggaacaatccagttggtacgggccaggatgtagcacaccgggaacccgacgatccagtaggaaaagaaggtgatgacggtgatggaagccgtgtcccggaagcctctcagcaccccgacggagagcacctggaggcagtccggaagctggtaggccgccgccagaatcagcaggacggaagccgtgctgacaatcatctccgaatcattgtacaagtgcacgatctgctcccggaacagggtgatgccgccaaaggtgcacaggcagatggtgagcaccagcacataagaggacaggacggcggatttggtgcccgccaggtccttcctgccgtggtggtacgccacgcggatggaggccgccagacctacggagagcggaagcatgaagaccaggccgcccacgttcccggcaatctggtggctggccacctgcgtttctcccagcggggccagcaccagcgcggccgcgcagaagagcatcacctcgcacaactgggaaacgccgatcggcacgccgagccgcatgaggtgagtgatgacggaaggcgtgggacgccgccaggaaacgatgtgcctgcggtacggcctgtgcttgggattgaggtagaccagcaagaacatcagcaggaattcaatgtagaaaatgaccgccgtggccgcgccgcaccccgctccgcccatgcggggaaaaccgtacaggccgaagacgaagatgtagttcagcgggatattgagcagcaggccgcacagccccacgtacatggcgggccgggtcatgttggacccctcgttcaggctcttgagggccacgaatcccaggttggcgggcagtccccacatgatggcgaacatgtaggcggaagccatctggcacatggcgacgtcatcggaaatccagccgaatacgtttctcagcacataaatgaccggcatggaaaccaggctgagcatcagcgccagccacaggccgtggttggtcatgtaacccacgcggctttcatggcttttcccccgcatgttggcaatcacggggccgatgatcatcagcacgccgcaggcgaacagcgctacaggcagatacacggaagaccccagcgccacggcggccatgtccgtcactccggcgcgcccggccacaatggcgtccaccgctcccatgcccacaatggagaggttgaccaccagcaccgggagggccagcggtatcagttttttcatctccttcaaattccacgtcttattcatttctttctttccttccatgcattcctccttcagggagccggaacatgccggcaaacaagccggaccggagcggcaagctccaacccggcttcaaggttaagggtatcaaccggaccggggcctcctgccccgtccggacattcagcggtcaagcaccacacgggcgcattgttcagccacctggcggaacgcggcggaaaccgggttctgctcagggtcttccagagctacaggacggccttcgtccccgccggagcgggtggcgatgtccagcggaatcttgccgaggaggggcacgcccagcttggcagcttcccgctcgccgccgccttcgccaaagatgtggtaaatcttgccgtcggaagggcattggaaataactcatgttttcaatcacgcccagaatgggggtttccacccgttcaaagaggccgatggccttgcgggcgtcaatcaacgcaacctcctgcggggttgtgaccaccactacgccatccagttcagccgtctgcacaatggtcagctgaatgtcccccgtgccgggaggcaggtccagaatcaggaaatccacgtccccccacgccacgttgcgcaggaactgctgcacgtagcgcgtcgccagggggccgcgcaccgccacaggatcggattcgttaatcagcagccccatggaaaggagcttcacgccatgggccgttaccggaagaaattcgtcattctcattggcgccaggacgttccttggtgccgaacatcagggacatggaggggccgtaaatgtccaggtccaccaagcccacggaatagcccagcttgctcagggccaccgccaggttggcggaaacggtggatttgcccacccctcccttgccggaggccacggcaatcacatgcttggcgccgggaacggaagatttccaggtggaggggtcatcgttgattcccttcttggcttccggggccttgtgctcaatgttgacgtcgcaatgcttcacgtcgggcaaatgcttcatcacgccgtggacgccttcaaaaatgtaacggggaatatccgcattcttgctctcaatcaccaaatcaatcgtgacgttgttttcagcgtcaatgtcgatcttcttcaccaggccgaaggatacgatgtcgcggctgaaacccgggaatttaaccgtggtcagcgcggcccgtatcagctccggagtcaattcctgttgtgtcgtcatgtgtctgaaatactagtggttgccataaacattccgcccccgcgcctccggagcgcagcatgcgccggaatacagagataggggacggcaaaaccgggaagcaaaaatactcccttttttatttttgacaacgcctaattcagacaaaacgactttttgccggccagatattcacctatacggatacctgaaaaatgcgggacagccacagccccgctcgcgttaaaaagaagaaaaaacagggggatttattccccctgctgcttcagcgtttcccggatatcctggagagcggcgatgaaatcatccagaatttccgcgggaaccatgatccggtcccggttggaactcaccttttccgtaatacgcaccactttgccgcgcgcattctgtttgagatcaagaaagaacgtcttgcgttccgcaatgattttttctgtgcaaataatatcgtcctccacggctgtaatcttcctccggttgaatgaggctttcaggatagagtttccctcccggtgggtcaatgttttatttgccatggaatccccgggttctctctttcaacaaatttttatctccttctttcattcgccatgtttcctcatttatacctcttttcagatatccaaatttcgatcgaaagtgattgaaaaggagtcaaattttcccccataaactttaatatttagaggtaacgttcccggcgtgtttacactggtagtttttgattcatggtagtcgcaaccattgaaccaacatcatttcattaccatgaacaacacgttcaacatcggtgccatggacaccgtctacccctttattcccatgtaccccaatggccagccccaaggcaacttcctggtcaacggtctcaccgctcccgttctcgtccccaaacggaccgcttcctcccccacccgtcacgaatggttcggatacctcaaggtcatggctcccgccacctgttttctccaccttcatgcccgctcctccatttccctttccatccccgccaaggagttggaactctccacggagccgggctcttccacgcctctctgccgccagcttcatttcgaacagggctattactggtgccacatcgtccatcaataccaacccgcctcggaggaccaacaggagttctgcattgccttaatatgcgacaaggaaggagagcccgacctggactattacctttcagaggagacgatgcctcccggcaaggtcaagggagaaacggtgcttacgctggtcaatctgtaccaggaagaggaggaagggaactcgtcgagcagttcctcggcagggggaggagattcctttgagtttgaccctaagtcaagcagcagctccagttcttcttccagcagttccagctcttcctcttccagcagctcgtcttccagctcccagcagagttcctgggttcccgagcttccggattcttcttccagttcgtctctatccagcagctccagttcttcctcatcttcttccagcagctggtcgtcttccagtttccacagcagttccttggtgcccgagactccaacttcctccagcagcgctccgtcttccagctcttcctcgagcagttccagcagttcttcttccagttcgtcgtcctccagcagttcgagttcttcgtcctcaagttccttgagcagctcttcctcgtcaatcagttcttcctgctcctcgtcaagttcatcgaattcttctagctccagttcctcttccagcagcagttccagttctctttcctcctcttccagtgccccggaagaggagggatgtccatgcccctgttcctgtgaatgtgacgaagaaactgatcaaaccagttgcgacaagaatggaggagcaaatttcgccggtagccatcccttcggcggcaatcctgatgaagccgacgattgccagggcatgctcgaggtggacggggaaggttcgggagacggcaacaccaacttttttgcctccttcagcttccgctccctatctaagggttctattgggcttcgctacaagcatcccctggagtggacctgtgactggaattctcaaacacgccagttaagcgtcaggcgtcccactgggagttccatctccttccaggcggttgaaggcagtgcagaggctcccgtttccggaaattcccgcaagcttaattacagagtccggctgcttaacgaagacaaatccccctgtaccgagggggaacctacctatctggacatggtccagagcaacggacgcatcctgcgtttctcgaccgtcactggaaaggtcgtctctttaatctcttcttgcggcgtagaaaccacggcggaggactatgctcaaaaactccaggtcaaccgccatccagccaccggagccgtgcaaagcatctggtcccagtacgagggtcttcttcaagccgtgccggaagacggcagacttatccttcaatggtatactccagatcaggtacagaagatatccggtagctttattgaaactggaactccttataaaacggtcaggtatcagacgagtgtggaaaatggagtcaacgtgatgcacatcgccgagcagagggaaggcatgcctatcttccatacggagcggagagtagagggcagccatgtaaccatcattcaaggcgagggtgacgagcgactcatacatacgatagaaagaaacttactgcctgacgggaagtgggaaatgattgagaataaacgcaggatcaatgagaaaactccttcttcctgtacccggacggtcaagaagaataccgagggaggctggctgaccttgagccggacggaaggctacaatacccccagccaacaaacaacgctttacacctacaacgaccagttccgggtgtctctggaactcaagcccgacggcggttatacgcgctatgagtatgacgagcaagggcgggtgactctggaagctactccttgggcgggaggaggtgaaaagggaactcgcacgacatatgccgacctgcgctttaacgacttcagacccgccacggaaaccgaagtggtcattgccgaaaacggggaagaaacagagcttcttaagcgcacctacacgtatgaagatacaccgcaagtcaaccgcactacggtgagagaaaccgctttgggctccgaccaggtccatacgcgcgtggaggagacttatggggaagaagccgaatacccctatgcccgggggagaaagaaacttcttcagggtatcgctggcgtgcagaccgtctacagttatgaagccactacggactactgggccatccacaaattaacaactaccattcaggccaatggaagcatcattccgggacaaagtactagaaatgtacaatacatcgctgaaaacggtacggccaccagaaacgagcagtatgttcataccgggaaagaatggactctggtctcatcggaagactgcgaatatgatgcagaactcaacttgatcaaggccaccaaaggcaacggcagaagcagcacgacggaatggatgtgctgcgggccgttgagggaaaccgacgaagacggcatcacaaccagctacggctacaactcagccaagcagctggtggaaaccatccgctcagctactgagaccactccagaaacaattacttcctacagctatgatgcggcgggaaggacgattgccacgcgccgcgacgtggggcccatgactacagtggaaaggacagagtatgacgatcttggaacggtcgtttcttctacagacatactgggacgtgtgacacggacccattatagtgaggatcggctcactactactgtgattactccttccggagccactttgattactagaaagtactacgatggcactattctctggcaaggaggaaccggccagcgcgaaacggagacccgactggaactaaccggggaaggtatcctgaccaccaccctatccaaaggggtaattctctcccgctctttaagtaatggtttcaaccaacctatacggaaagaacaaccaaatagtcttgggaaattcatcgctactaagaatacttataatgacaaaagacagcttacacgtatccaaatagataatatggcgcccaccgtcattacttacagtgagcttggaatccctttgaagcaggccactcttctagacgagctttatccagatgatcctactaaaaatcaaatctcgaaaagtatcacatactatcgagctggcgaagacgggatttatcaaatagagacatctactaatcacaatgaacaaggactaccccttattcaacacatagaaaatatggtttcgcagctaagtcccattttggaagagaaaacgatcgcgacggatatctacggacaacggagcattcactggacggaatacactgctgctacccaacgcacacaatttagcagcatacccacttccagtgtagtagccgaaactcgcatcattgacggattcactgttagtcaaaccagccacgcaggcatccattcttcacagaaccggtcctacacttccgcgggcatgattctaaaacagactgactccagaggcaatatcacgacgattgaaaccgaccttgccggacgtcccgtcaagagtacggacgcagccggcaatctgacggccaccagataccagccttgctgcgatgctgtggcccgcatcaccgatgcccggggaggtactgcctgttattcctacgacgtacgcggcagaaaaactgccgcgtacggcactgccatccagccggcctgtttcacttacgacgaagccgatcatatggtaacgttgactaccttccgagcagacgaaggcgacattaccaccgatccttccggccgtaccgacggggataccaccacctggctctatgacgaagctacggggttggaattgaacaagacctatgccgacgggtcctgtatctccaaaacctacgacggcctcaaccgtctagagacgctgaccaaggcgagaggggtcgttaccacctacgcctatgctcctctcaccggggaactcgtctccgtctatcataatgatgctactgctggatgggagtttacttataaccacctgggacaaataacctccatccgggatgcctctggattaaaggaactttcttataacaattacggccgcatgacccaagagacttcctttgggacagtagagacctgcctccaggaagaatacgatgccatgggacgttcggaaggctatcgcctgatgctcggaacccaaaccatccagtactcccatcttgactatgactccaaaggtgccatcatcgggatgaatctggaaggcctggagtctcctttcacgtggcagtatgatccaaccagcggctttcttaaccatcttacttaccccaacggcatggtccgccaaaacacctatcatcccgaactaaatctcgtgaccaccatcggttacaagaagggagcggatggtgaattagcggccttccatgagtacaactatgatggtctgatgcgccctacccaacgacaggactcttgggataaagacttactggcaacaatccgagattttacctacaatgaccgcagcgagctggtcaaagaccgtaccagcagaggaggaagctttatatactcctacgacaacatcggcaaccgtaaaactgcccgtgaactgcaaaaagaaatctcctacagagtcaatcctcttaatcaatacacaaacatcattaactcccctctcaactcttcctcctccactccggaacaacaattttttgcccccgtctatgatgccgacggcaatcagatcacgatcaaaacttcaacgggaatctggaatgtttcttacgacgcccatgatcgtcctgtccggtttaccagtaaagatggacgtaccattattgcctgcggttatgactatatgggacgtcgtttcaacaaaaaagtgactatcaacggaagtaccgtcagccacctttattacctataccgtgactacctgcaaatagcccacctggatttaatgcactcccagcccatgttggaaaagagctatctgtgggatcccaccgaaccaacagccacgcgcatattgatgacacaatggaagaatgcagcaaaacaagacgagcatctctacttcatgcatgatgtgctcaagaatgtcacttctatctttggagatgatgcagagagaagaggccgctatgagtacgcaccctttggagacactctgacagctcatgggaaaatagctcaaaataataaattccgtttctcctgtgagtatatggacgaagaaatgggtctaatttattataattaccgccatctcaacccactcgatggaagatggattagccgtgatccacttacagaagaagcaggtgcaaatttgtttgtttttgttaaaaataatggaattaaaaaccaagattatcttggtcgtgatttacagtggtggatagatgggaccaaacacaatgccaatttagtatggcagggaactaagcgtacagcaacactgacttttgaaaaaattaaaaaaatagacagagaatacaaggttgtcaatagagcaacaggggtattacaagtagttggaggaggatttgaagcaactgcaggagcaattggcatttttacccccgaacctgtaacaacagctggaggagtagttctgtttgtccatgggagtgatgtggcaagtacaggtattcgtgtgattattaccggcgaatttgattcgacaatgacttataaagccatagttcaaggcgctgaatctgtaggagttccaacggaagcggcaaatagcattgctgctggcgcagaagtagctttaggagctaaggcttttactacgccagcgacaaaatgttgcccaaaagtattagttgaatctactgagattgaagtgacaacagtctcacgatggggatcggatctaaccccaaattcatgggtaatggaaggcactccaaccgtatggaattatatgtggtccggaaaatggcagccaggtttgaaaaatctatttgcacctgtatggaacgtaagaagctatgtggttcctaaaagttctctttcgtgtcctactggtaaaggacttgatggattcttcaaacggcttcttcctgctaaacaaagaatttacacccctccaaaaaaataatgttaactatgatttacaatataatatatcaatcattattttggtttctaattctcatagggactttagttatcatttataattggattatttttatcaaaagatatatcttaagaaagactaatgcatcatggattcctctggtaggaggtgtgagcatctgcatagcattttccctgccgacttataaaagtcttaatgacatcgcaggaattcctttacttttggactatggatgctcatggggatttattcatacattgattttttatatttacctggctgtaaagggcgtatttaaaatgttgatgaaaaaactacgttaaaatagttttatggcgaataagaatatatctaagcagataaagaaccttaaaatgaacgacaggttagtaaaccttatatatgtttatctagtttcaagagctgttcaatatgacagtattcttttgcaagtatggagcatccactccagaaggtttggttagcttagagggatgttgtttgaggatgtcttatgaatggagggcaggtctttccaactcttaatggcattcatagaactggatgaatgaatcctcaattccctgcatcctcggctgatgttggtgaagtattcggccggttgagtgcctcaacgcgccagtgcaggaggctgttcatcgctttcatttgattctttctataatatttattggataagaagatgtaactatatgtctagaaataacatattatctttcataacggaaacaatagaaaacaatgtaattacttctttctaataaccttttcactcttttccatgggagaaattcttacctcgtttatggaaaagagacagcctccttaatacggaaaatctttcaaagaatttatccaagcaccaatatcaaaacggctttcagctccctggaggacgcgccatccatcagcattccgcgcgccatctggcctgctccgtcttatagagcttgtacgtgacggcgtccgccagggcttccaggctggcctcaatgatattgtaggagacgcccaccgtggtccaggtggcgacgccgtccgaggattcaataagcacgcgcacattggagccggtgccgttttcctccgcggcgtccggaatgttcgtccgggtgggggagagcacgcgcaccttgtagtcaatcaggtgcatctgttccagttccgggtaccagcgcgtcagggcgcggcgcagggcgcggtccagcgcatgcacggggccgaagccgccggcggcggtgtgctccacgttgccgtggacgtccagcttgagggaggcttccaccatcatgtccggatccatttcatggcgggaggtaagcaccacggtgcgcaggatgttgaagtacggcttcagcgcgctggccggcatgtgccgcaggaagagcagttccgcgctggccggggcggccacgtagtcataccccagcgcggcgttttttttcacggcggcggagagcacgtccagaagcgggtcccctttttccagttcaaaacccagggtacgggacagggaaaggatgttgcttttgcctccctgctccgtcatcagcacgcgctgggcgttccccaccagggaggggtcaatgtgctcgtacagggcggagtccttcatgatggcgctcacatgcacgccccccttgtgggcgaaggcggcgttccctacaaagggctgccgccggaagggggccaggttggacacttccgaaacgaaggcggcggtggatttgaggcgcgtcagggaggcgtcactgaggcaggaaaagccctccatcttcaactgaaggttgggaatgacggaacacaggttggcgtttccgcagcgttccccgatgccgttcacggtgccctgcacctggacggccccgctgttcacggcggccaggctgttggcgacggccagctcgcagtcattgtgagcgtggatgcccagggcggcatgcggaaggcgttccctgaccgtccggatgatggaaccgatttcctccggcatggtgcctccgttggtatcgcacaggaccaggcagtccgcgccgtgctcatgggcggcgcggagcacggccagggcgtattccgggtcccgcttgaagccgtcaaaaaagtgttccgcgtcaaaaaaagcttcttccagattctttttaaggaaggagatggagttgccgatgatttccagattgcgttcccgggagatgcccagcgccacttccacatggcgggggcaggatttcccgaagatggcggccacccgcgcgccgctggaaatcagggcgttcagcgtggggtccgtctccggcgtactggacggatggtgcgtgctgccgaaggcggccagcttcgcattcctgagctccacgtccttcatggccttgaaaaattccgtctccaccgggttggcgccgggccagccgccctcaatgtagtccatgcccagataatccagctgccgggcgatgcggaccttgtccgtcgcgctcaggttgacgtcttcactctgcgctccatcgcgcagcgtggtatcatagaggaaaattttggtggacatcgcctttgttcatacatgcaaacgcggttccgttcaagaccggggcccggtttttccccggatgcagacacgaaaagcacaaggcttgaagggggagagggcttccggtaggatagccgccatgcggttacccaggcagtttttccatctccttctcctttttctttccgcggcccttccctctccggcggattcttccacccacccttttctggacaagagccgccccatttgctggaaccgcctgaccccggacaggctggaaccggacatccgggaagcgatgcgcctcacccggtccgccgtggaagagatcagccgtctccaaccggaggaaatgacgtatgaaaacacgttcggcgccctggaatgcagcaatgacctcctcatggaaggcatgcgcaaggcctatgtcctcaaaagcctgtgcgacagcgcggaactgcgcaaggccatggattcggttgcgccccgcgtgtccgccttcctttcctccgtcacgaaggaccaggccctgtggaacgtcctgaaaaccgctgaggaacgcctgcggcagaccaatccgggcccggaacagaaacggtacatggagctgaccatgcagagcttccgggacaacggggcggacctgccgccggacaagcgcgcgcggcttgaggcaattgacagggaattgactctcgcctcacagcgtttcaacaatctgtacatggacgcgcggaagtcctggacctggacggtgcgggacgccgcctttctggaagggatagacaacaacgctcttcaacaggcgcgggaggagttccagtcacgcagcccaggccattccggcccgggctggacgtttacgctggattccgcggcttccgcccgggtgatggagaaggcgcaccgcgaagaatgccggaaggatttatgggaacatctccagaccgtctccacgggagcatgcgatacggaacccgtcatccgggagattctttccctgcgccgtgaaaaggcgcatttgtgcgggtatggaacgtatccggattacgccctgcgggagagcatggcgggaaacggggaaaacgccatgaagttcgtgaatgagctgctggacaaggtaaaagccccctttttccgtgaaatggaagcgctgcgccaactcaaggcccgtctcacgagacaggaaaacgcccgtctgaatccctgggacgtggcgtattacgccagtctccaggcaaaggaacagttccggctggaccaggaggaactgcgccgttacttcccccttccccgcgtgctggacggcctgttttccctggcggagcggttatacggcatccgcgtggcggaggttccggcaggggaaggcgcaggagccgtggggacctggcatccggacgtgcgctttttcaccattgaggacgtcaggggcaaccgcctgggatccttttacctggacctcttttcccgcaaaagcaaaagggccggagcatggatgaacgcgctggacacggggagcccggccacgcgggaaaacccgggcaagccccgcctgggcatggtctgcctgaaccttcatccctccgcagaaggagctgcggtgcttctttcacatcaggagaccaggattctgttccatgaattcggccatttgctgcacctgatgttcacccgggtttccaccccctccctggcggggaccagcgtgccgcgggattttgtggaggttccctcccagttcatggagaactggtgctggcatccggacgtgctgaaaagcttcgcgcgccatgaaaaaacggggctccccattccggaggaaatgctgcgttccctggacgcttcccgcggcaatacgcccgccctcgccctggccgggcagctcctgtacgcaaaaatggacctggccgtgcacacggacccggaacgcttcgccgccggccccctggacgaggtggacgccgccgtagccggagacatggattatttcaaggatttcaaacgaaccggcaagctgcgcacggcgcgccatttgttttcctccccggcgggttatgcctccttttacttcgcctaccgctgggcggaagttctggacaaggacattttcgaagcttttgaacgggccggaggaccggacagggaaaccgcccggaaattccgtaaggccattctggaaaagggatatacggtcccgcccatgcagcagttcatggatttcatgggcagaaaaccacgcatggacgccatgctccgcaagaggcggctggcctcctgaacgaaggcgcggataggatcgccgttccgcctccgcagaggagcatggaggagtcaacatattatacatttgtttaattaaattatcccttcaatatgcaaaggttacggatatttcacaagaatcagaacacatctttgcgttgactttatgagaaaaagaagcaaaatttgctcgctctgccgcatcttccggcaccagcttgcaaccaaccgcatccatttatgtacaacaagcctttgacgattgccgccacaactctgctcctgtgctctccggtgatgattttaacttcctgtgaagggaaaaaggattcagcaggccagatgccggcgctcgttcccgaagtgcaggtgaccaagctggtaaccagggacgttcccatcaggcaggagtgggtgggcaccctgcgcggtacggaagatgctgaaatccgctcccaggtgacgggataccttctttccaaggattacaaggacggcgcctatgtgaagaaaggccaggtgcttttccagattgatccccgcccgttccaggcaacgctggaccaggcccaggggcgcctggaacagtatgaagccacgctgaagaagtacaagctggacgtggaacgctacacgccgctggtaaagaccggctccgtcagccgcaagcagctggatgacgccctgcagcaggtccaggaaacggaggctgccatcgccacggcaaaggcccaggtggacgaagcgaaaatcaatcttaaattcaccaccatcacggcccccatttccggtctggcgggcctggcaactccttccatcggcaacctgctgacgccctccagccccaatccgctgaccaccatttccgccattgaccccatccgcgtggacttctccgtgagtgaacaggacttcctgaactccatggacagcaacctgaccaaggagaagcacctcaagtttgacgtcattctggccaacggcacggaattccccatgcagggcgaacccgtagccattgacagaaacgtggacgcccagaccggcacgatcaacatcgtgggccatattcccaatccgaacctgacgctccgtcccggcatgttcgtccgcgtccgcgccacggtgaagactttggaaaacgccacgctggttcccccgcgcgccatcctctccgcccagagcgccaaattcatcatttatctggatgacaagaacgttccccacatgcaggtggtgaacctcgggcccgtggtggacggcatgcaggtgatcaacatcgttcccatgccgcactcctccttcacgaaggacagccccatcgtagtggaaggaatcatgcaggcggccaagctccagggacagtcccctgtgaagcccctgccctacaagcctgtcgtttcccagcccgtcatgccttccgtaggagcgcagtcctttgaaaaggccaagacgcccgaaggcatgaagcacgatgaagcccagcccgccgccaaataatccccccctctcctgggaagcccctctcccctccccgcctttcccgcgcactctcatgatttaataccatgtccagcttcttcatcaaacacccgaccatcgccatcgtcatctcgatcgtgatgatcctgctcggcggcctgtccctgatggggctccccattgagcagtacccgaacatcgtccctcccaccatcaagatgcaggcgacctatccgggcgccaatgcggagacggtggccaactccgtggcctcccccattgagcagtccatttccggcgtcgtggggatggactacatgacttccaccaacgccaacaacggcatctgctccctgagcatcgtctttgaagtgggcacggaccccaacatggaccagacgctggcctacatgcgctacgggcaggccaccgcccagatccctgcggaagtctcccagatgggcatcaccatcacccagtccacgggcagcccgctggccgtaatcaacctgtattccccggatgacagcctgaacgccatcttcctgagcaactacgcgtacgtgagcctggtggaccccgtgaagcgcgttcccggcgtgggcgacgtgcaggtgttcggcgcaggacgctatgccatgcgcatctggctggacaccaccaagatggccgcccagaacatctccgtgggagaagtccagtccgccatccgggcgcagaacaccgtgattcccggcggccagatcggcgcggaaccggcccctcccggaacggaattcacgtacagcatccagaccaagggccgcctccagactgctgaggaattcggcaacatcatcatccgtgcggacgggaacaagctcctttacctgaaagacatcgccaaggtggaactgggctcccagacctacaacgtatccagtaaatacaacggcagggattccggcgccatcgccgtgtatgccgcccccggctccaacgccatcaatacggtggacgccctggtcaagctttttgaagaccgcgcccgcagcttccccgccgggatggaatacaacgtgacgctggacaccacgctggccgtgcgcgcctccattgaggaaatcgagcacacgctggtggaagccctcctgctggtggtgctggtggtgttcgtcttcctccagggctggcgcgccacgctgattccggccattgccgtgccggtctccatcatcgccaccttcgcgctgttccctctcctgggcttcaccctgaacaccatctgcctcatgggcatggtgctggccatcggcctggtggtggacgacgccatcgtggtggtggaagccgtggaatcccacatggagcgcggcctcacgccccgccaggcggccttcgccgccatggaggaagtgtccggcccggtaatcgccatcgccctggtgctggcggcagtgttcctgccctccctgctgctgccgggcattacgggcacgctgttccagcagttcgccgtgaccatcgccatttccatgctcatctccgcgttcaatgcgctcacgctgtccccggccctctccgccatcctgctcaagcccaaggacccgaacaagggcggcccgctgaaattcttctaccgcgttttcaaccgcagctatgacgccacggccagcggctacaccaaggtgtgccacttcctgacccgcaagctcatcatctccattccgctgctggccctgatcgcctacgccatcttccccgtagccaagcaaatccccaacggcttcctcccggacgaagaccagggctacctgttctccgccctgatcatgccggaagcccgctccctccagttgacgacggccgccgcagacaaggtttcagacctcatccgccagaacccgaacgtgaaggacgtgatcgccatctccggcttcagcctgctgaccggggtgcagagcacgaacaacgccttcttcttcgtcatgctgaagccctgggaggaacgccccaatccggaccagagcgccaaggcggtcaccgcccagctcaacgccctgctgagcaccaaggttccggaaggcatcaccatgtgcttccagcccccggccattgcaggggtgggttccgccaacggcgtcaccttcatgctggaagaccgcgacggcaagggcacggaatacctggcggaacaaacggacatttttgtgaaggaagcaagcaagctcccgatattcgacccgcagaagaacggcggcgtgcgcagcgtgatgtcctttgccgtggaacagaaggacgtgcggctggatgaagaaaaatgcgcaacgctgggcgtcagcatcagtgaggccaacagcctgctccaggcctacatgggctccctgttcatcaactacatcaccctgtacggccagcaatggcaggtgtacatccaggcgcagggcagcgaccgcaccggaacggacatgctcaagaacttctatgtgaagaatgactcgggcagttccgtccccctctctaccctggtgaagattacggacatcaagggaccggaattcctgctgcgccagaacctgtacaattcctccaaactcatggtcacgcccgcccagggctactccaactcccaggccatggaggcgctggaacagacctttgaggccagcatgcccacggacatgggctacagctacgcggacatgagctaccaggaacaaaagatccagaacggcatcggcatcgtgcagatcttcctgctctcctccgtcttcgtcttcctgatcctggcggccctgtatgaacggtggtccctgccgctcagcatcttcatgacggtgcccatcgcggccctgggcgctttcctgggcctgtactggttcgggtatgaactgaacctgtacgcgcagatcggcctggtgatgctcatcggcctggcggccaagaacgccatcctgatcgtggaattcgccgtcattgaaatggaacgcggcaagacgctgatggaagccacgctctccgcggccagaatccgtctgcgccccatcctgatgacctccttcgccttcatcctgggctgcgttccgctggccctggcctccggttccggcgcctactcccgcaacatcatcggtattgtggtgattgccgggatgacgatggcgacggtagtgggcgtcttcctgatcccgtgctccttctacttcatcatgaagcttttccgcgtccgcatcgcccggaagacggtggaaacggaggatccggatgaaatcatcgcccggaagcacctcttccatgaagcccatgaatcactgaaagggtaaaaaccgcccttgaaaccatttaaaaacagacaaaacgccattatgcgaccgaaccaatacatcacacgcgccatcctgctgggcacggccatcacggcttcctcctgcatgatgggtcccgacttcaagccggtggacatgcccatgcccacggcgttcagaggagcctccgcggccacggagtccattgcggacctgccctggtggaaagttttcaagaacaaggatctccaggacctcctgacggatacctaccaaaacaaccgtgacctgaaggccaccatggcgcgcgtggaaaaagcccgccagtacatcaccatcacggaagccccgctcttcccgtgggcggattattccggctccctcagcaagggctccaactacaccagcggcaacgtggtccaaacctccgccgttggcaataccttgacgcccggatccattgacgccggcatctcctgggagctggacatctggggcaagacgcgccggatgacggaagcggcccgcgcagactacctcgcttccgaagaaggccagcgcgctctcatgctctccctgctccgccaggtggccgactcctacctccagctcctccagctggacgaacagcttgccattgtgcagaaatccgtggaatcctattccgaaagcctccgcctgttcgacgaacagcttgaaggccaggtgggcgacaggctccaggtagcctccgccaaggccgccctggcttcctcccaggcacagattcctgccatccaggtgcagatcgccaatctggaaaacgcggtctccgtcctggccggacgcgctcccggccgcatccgccgttccggcagcacccgtgacatcgcctacaacgtgaaggttcccgccggcattccggcctacatcctttccagaaggcccgacgtccgccagagcgaataccagttgcgcgcggccaacgcggaagtgggcgtagccattgccaactatttcccgaccatttccctgacggcggccggcggcctggcctccgcggacctgcgccacgtgcagggccgccgcggcggctggggctttggaaccaacctgaccggccccctcttccaggcgggcaagctgacggcttccgaaaaggcagccaaggccgaattcctggcagccagcaacgactatgaacagacggtgctgaacgccctggcggaagtctccagcacgctcatccagcgggccaagctgcgcaatatcacctccatccagtcagaggccgtggaagcttaccaaacagcggtgaagctctcctttgagcgctaccgcacgggcctttccaactacattgaagtgctgtacgcccagcagaacctgtaccctgcgcagattcagctttcccagtactactatcagcacgccagcacgctggtttccctgtacacggccctgggcggcggctggaacatgagccacaaggctatcatggatggcccgtccaagcgataaaaaacgctcctcccttaaaatcgggagtttccttgactgtttttttcattccccggcaagtacaagcttgccggggaatttgctctccggcggagcggaaaacaggcgcgccgccttcccagtccctggcaggccgggcatctgcggtcttcccgcttccggcagaagggattgatgagtccggagcgggacggtcaatggattatccactgcttgcgccgcttcacggattgccgggcatcgcatctcctgcccacctccttttttccctttccccggctcggtttccgcgggggacggaagcagttttggaattgatttggaaccaattcatttacaatcaagatggcgtaaaagaattgcatcgtgtttttcaggaattaattatccacgatttttctattccataattacgggcaactccatactgctcctgctcttacagctgatttcaagcacctgggcggattcctaatccgtcaacaattaaaaatattaacggtaaatgtattgtttatcataaaatattgatattcatcataatttaaaagatctggtcttttcaggacaattccttttccaatgattctctagcctttatccatgcttgcattggatgggttcacaagcggattaggaattcgataaaaaacggacgttctcttgcgcgggaacatttctccaatccgtacagcaatcaatatgaagaccacatacctgaccctcctggccgccgttctgggaggcagtctatccttcgccgcttccatcaatggaatggattcctcttattcaaagggttacaccatttatgacggaagcaacggagacaccctgaatgtttcctctccctccgtgcccgtgcataccggctccggagccactccatggaccatggccctgaccatttccgacctgggcaccacctcggggacggatgtaggcctgctgtttacctataataccacctccaattacaagaacctggaggggatgggctaccggctgacggagtcgggagacctcactctatgcgcaggtggctttaactacaacggaggcacggcaggcacctccccctggaaaacgcaaacgctttccggctattccgcaggacaggcccttaccctgttttacacatacaatgacgggaatgtcactatttccgccatgctgggggacgatacgtccaccctgaccactctggcctccctgaacggctccggggtcaaattcggcagcgtcaccatgaaccagctcaatttttccgccaaggacggttccggaaacacctggactcctccggacggcgtcaccggggaatataccctgaacaattttgacctgtacctgggagcactgacagaagaccagatgaaggaatacgccttgagcgccgttccggagccggccgcggcctccctcggcctgctgggcctgggcatgctgctggtacgccgccggagagcctagccttttccagccacggccatccctgtccattcagggatggccgttttattcacttttttcaaacatccgttttattcccctgctccccttgatgaaaaccaggctccctctctccctcctggccgccctgccggcggctttcccctccgccatcgccgcccctgcgggcacggacctgggcaacgtcatgtacgtaggcgattccatcacccacggcatgaacagcggcacttaccgctgggccctccataaaatatttgcggacaacggcatttcctaccatgcggaaggcgtgaaaaccggcaactattccggaggcgtcaccgcgggaacctcctacggcggccaggttttcaacagcgaacattcctcccaggcaagcgcaagggcctgggaaatatccggcaggaaaaccggaagcaggtttgacggctccaacatctccaactggctggggctttccgatgccaaagcaaacggagcagcctaccagggcccgaccttcacgggaacggacacaccggatacctttttcgtaatgatcggcaccaacgaccttctctccgacggcgacaattccaccctggacagccgtcttgattcagtcacccgggatcttctggcggacatggatgccatcgtagacaccatgcacgccgccaacggcagcgcgaacgtcatcgttctcaccattccctgctggacccagcattccaacggcaattcggacgccacccaccaggcggtggaaacctataacgcctccctgaattcctgggggcagtccaggcagggcgtcacggtcatcgacgtcaacagagggatcattgacgtggcttcctccaagccgttttacggggtgcggtccatgttcaacaatcccgcggcggacggactccaccccaacgcccagggagacctgctcatggcaggcaacatcgccaaagccatgggctatgcgggccgctctgccggacaactgcgccgggacgccggggaaatggccgtcaacttccaccagggcgcaggagcgcccgcatggaccggagtgcagaacctggcggatgcgggcttttccgtatccaacattggcgtgaacgcggaaggaatcagcctgggacaggcggggacaagttccatttcccggacatggacggagggaacggccctgaaaaacggctttacctttgatttcaacctggtcctgggagacggggcggcaaacggctggaatctctcggaccagttcagcgtcagcctggggaacggctctttttacggcacgctcaacattaacgaggcctatatcaaatggggggataccatcctgtattccctggacatgtccgccaatacggaaaacctgcgcatggcctacgtcacgggcaatgagcaggaagggctgaaaggcggctattacgtctggctgggggacatgctgatcggggaagcgctttccgtcacctccagttccggctgcaacggcgtcatcatccagtatgacggcagcggaaacgccatcctgaaagacctgtccatggacggcacaggatcgtatgccccacccacttccgggctggtcaatgaagagaacgcctttatttccgccggagcggactccgggggctcgtcaggcactccggagggcaacatcgcgtggccggaaactggcttcacgcattacgccgccaaccagaattgctccggcatcttcgatgcccgcgcccaggcggacgcctcctccgggaggctgggaaactccgtgaacgtcaccatcacttccggaaacgccacgcatgtgtatgccagcaccggcaattatacgggggacgtctggctgaccatcgccaaggaagggcaggcctccgcctggtacggggcccatggaaattccggaacactgaacgggaatgccgccctgcgctttacggacgccgccacgggcggaagcaccgtcttcggcgccgtgaacgcctccggcgtgaccggaaacgtttatctggaattctccgcggaaaacgcctccttcggcaccttcaccagcaataacgcctcctccgtggtcggatcctatgctgcggatatcaaggggaacgtggacatcgtgattaactccggctccttttccagccaaatcatgggcggcatttacgcgaatgccaagaacggcacaaccaccatcgggggagccacgcacgtttacgtcaacggaggctccattaacggagacgtgatggggggaggcctgacaggctccatttccggcggttccaacgccaccgtcacgggcggagtcatcgccggctccgtttacggcgcaggcaagggaggctccatccgggagggaagcgcggtacgcgttacagggggcaccatcaagggggatgtgtatgcgggaggctccggcggcaccgttcagggaaatacgtccgtctccgtggccggaaactccgccacgcttcacaacgggaagtcctggagcagtatctccgggggcggttccggcggcgccgtcaacggcagctccatcgtgcgcatccaggatctttcctccgggacggcggcctacggttttgacaagtatgccggaaccatcagcggcggcacgaatgtgagcggcggcagaagcctggtgctggaccatgtgaccgtggagcatttccaggcttccctgagcgatttcacccatgtttccgccgtcaaccagacccgcaccacgctggattccctgggaggagcgctcaccgtgaccattgaagccggaagcggactcgtcctgaacggagtttcagacatgaccacgctcattcttggggaacacgcctccctgaatcttcagggacttaccgcggacaaggtcatcgtggacattacgggcaccagccactacacgctttccctgacggagattcccgccagtctggacaacatcaaattcctgaacaacggcgtcctgtacgatgcggccatgtccacggacccccaggccaattccgccatggtcttcgcccaggcgccggagccggggagcgcttccctgggtctggccggactggccgccctgctgtggcgcaggcgcagaaaaatcttccattaacggccctttgttttcttcaggccctgatggacgaaagaagcccccgcaggcgtatgccgcgggggcttcccatggaaggaaacgaaagaggaggcgcattgctacgcccgccgggcgcttcatggaagcgcaaggcttcaggctcccctgtttttaaacagctccagcgcaagctgggaccaggtttccagcttctcaaacatctccccggacagttcctccggggccacgaaacggagattggccagcgcggcttcattcgcgcgcacccggtccgtatccagctcaaacagatggacgatgcccagatgcacggctcccacgtcattggaatcgtcattgatcacgcctagcacccgctgggtgcagctcccgtcaatgaccagttcttcccggatttcacgctccaccccggccagataggtggaaacgtcgtcatggccggactggcggtccaccggattgatatggccgccgatgccgatggagcccttgtcatgcagccgggcctcaccgccggaaccgccgcgcgtgtaatgcaggatgcggccctggtggcagaaaatggcataggcgatgatctgcttgtgggaggggtcgttttccgccgcctcccggtccatgaaggaggagacccccggcttcatgaacgcattcagataatgatccccgccttcccggtgtccctggaaataacccgcttcttcaaacgtggcgcggggaaccaccagaacctgttctccattgtaacgtgacatggagacaccctacccgttttgaccccgcgctcaacaaaaaaggcgcggaaacggcaaatttgagccccttccggaacggccgagaacggctttccgcctcaggaaatatcccggacttccacgccatggttccggaaccggcgcatgatgctttccaattgatccgtgctcatgagcttgagcggcagccacagcaccagcttcttgccgaagaggaacagcagggcgtggcgcgtcttgcacagggtagtgaagcggtcgtaggggatattcatgggctcgacgtccttgctggagaaagtcatgtaatcctcatggaagacgtaatccttttcctgatggtacatgggcaccttcttgttcgcggccagggcggccttcgccagaaagggaacgtagaaccaggacaggatgatcgccatcagcgccccggccagagacagccacgcgaatatgggcagcgggcgcagggagaaggagtacagcgtcatcagcacaaaaaaggcggtgatggccagatccagcggtttcttccacttggggcgcaccgtattgtaccacatcaccagcacctgggtcgccaagcggtcggaaggcacgggcttgacgagtttgatgacctctgaatcctgcatcatggcggcagggtagcttcattcccgcggaagagaaagcctaaaaacaggccgttccgccgcgtttgtgtcaaaaaagccgcgccggaaaggcgcgggggtcctttttgtccgccccaattcacagggaaagcctccttccccgtacgcaggccagaatttccttgataatcatggttcccttcatagaattaaaagccaaaagcctttagcagacccggtggcagacaatcttcaaattcacgtacgcacgttccagcccgcaaccactcaggaacaggctctggaaaccttgacggattccatggcggaagtccttgacgaacgtcagctaaggcacatcaagaatgcggtccttctgcgcgaggaaacgcaaaccacctatctggaccacggcctggccgtcccccacgggcgcaccagcgcgctggactccatgcaagtcaccgtaggcatcagtccggaaggcgtcctctggccggatgacgcacgcaatgcccacctcatcgtgatgctgggcgttcccaccgccatggtgaccggctacctgaccaccatgcagaagctgctgcggtggcataaaaacgctcccctgggccccaacggggaatggacgggagacgaagccagcctgctggcgtcccttcaacacgccctgcaatgacggacaagaagaaccagcctgcggcgaagacgcgcatttcatggtcatggctgcgcatggcgctgagcctgcgtgaaaaggtcaagctgggtgacaagcaagtcatcttcatctgggcagtcgtcgtcggcgcgctgggcgccctgacggcccttgtttttgaaatgggggtggagctggtgcaggacgtcctgacgggacgcaccagctacaagcaaatccaggtctttcaggaaatggccagccaggactgggcctggtgcatcttcgttccggcggcgggcggcctgctggccggcctcacccttctcttcacccaccgttttgtcccggccaaggccacggaatacatggaagccgtggcgctgggcaacggctatgtgccgcccaagcccagcctgctgcgctccctgtccgccgttttctccgtaggttccggcgcctccatcggccgtgaaggcccgctggtgcaggccgccgccgtggtggggtccgccctgggccgcttcttccatctctccgccccgcgcctgcgcctggtggttgcctgcgccgccgcctccggcatgtcctccgccttccatacgcccctggccggcggcctgttcgtgagtgaaatcgtgctgggcgcgctgaccattgactttctcgcccccctgctggtggcgagctgcgccggatacttcaccatgggcctgttccatgaaccggcccccatctaccagctccagcaggaagtgtccctgacgggcaaccagcatgtgctctggtgcgttctgctgggcgcgctggcctccctggtcgccagcttctggctcctgatcctcaaaaaatcgcgccagtacctgaacgggaagcgccagtggcttcccgtgcgcctgatggccgcagggatgctggtgggcgtcatcgccatcttttacccggaaatcgtggggaacggcaaaaacatcatcacttccctcattcattatgaatttgacgccacgagggccggcatcctgctattcctgaaaatcttcaccgtcgccatcgtcttcggcgtgggtacggtggggggcgccctgacgcccagcctgaccatcgggagcgtctgcggcttcctgttcagcgcggcgctcacccagctcggagttccgggggaccatgccatcgcctattccctggtgggcatggccgccttcttcaccacggcggccaacgcccccatcacctccctggtgctggtagtggaattcaccatggccgggcacatgatgttccccctgatcatcggcgttctggtctcctacggcatggcgaggctcaccaaggcccagtccatgtaccatgattccctggccttcggacccagaagcacctttgacaagcccctggcccaggtgcagctccaggacgtggcgcgcaaggacccgcccgtggtccacccgctggataaattcggcacgattgcctccatgctcatcaagaacccggcgcagcccatcttcgtcacctccccggcgggcaaatacctgggcagcgtggtagcggaagatgtggcggccttcgcccgcaacaaggaactggcccaggccgtcctggccatggacgtgctgcgcagcgacatgcccacgcttcccgcggacatgcaccttccggaagctctgggcatcttctcgcgcccccactgctcggaatccctggcgctggtgaacccgaacaacgatctgctgctgggagtggtcaacaagacggacctttacctggttctctccgaaatcatgcggcgggaaaagctgcaataggagaggcgttttccgggccgcgccctggttccgggaagacccgcgggaagcgcaccaggcccctggggctcttaaaaaatacacggacaaaggcaaccctctccgttaattcaaaggaagccttctcttttctcttcgtccgctggctccctttttcttttccgtcgccgcattgacatgcggcgctcccgacggaattcagggaataaaacaccgcggccttctccggcgcctcattcctccgcagacctttcatgaaaaaagacggggaaacgccggcatggctgcgccgctgccatccgggcaaagggcttcccggtctttcccggcagcatcctgtccggcgttcaccggaagcgggctctccctttccggaaacacggacccgcttaaaaacgcattttttccaccctcttttttcgcaataggggtcaggttaaaaataacaacaaacttgcatttttgacctcatccggtacgcttccggcatgagccgtaccctgagaatagaataccctggagcggtctatcacgtgcagagcgagggcaaccgcggagacgccatttacctggacgacgaagacagggaaacctttctgcgcactttccaggaggcggcccgcagaagcggctggaccgtgtacgcctatgccctgatggccaaccactaccacattctcttccagaccgcgcgcgcgaacctggtggacggcatgaaatggctccagactgcctacacccagcgtttcaacgcgcgccaccgcatgcggggccacctgtttgcgggcaggtaccacgccatggtggtggaagcggaaaacgcccactatttttccaccatcatcgactatatccatctgaatccggcgcggtccggcctggcacgccgccacacgttcctttccggctgcaaatggaccagcctgcccgcatggctggacgcgcccgccaaaaggcccaagtggattcatccggagcgcggcctcgtctgctttggctgcgacgacacggacgacggccgccagaagtacctcaaccacctgatgggccgctttgaagcggaacgcatggacgaacgctcccttctccccgccggccatgtgggccccggcaccgtccagcggggctggtgctacggctccagcgcctttcgcgccagactggtgggcgaacttccccggctggcgcgcagaaagcccgtcacgacgggcatgcgcgcctcggaaataggggaataccaggcggagatcattgtgaaaaacggcctgaaggcgttcgggctctcggaggaggacttgctcgtcacgccctacagccatccgtccaagctcatcattgccctggccgtccggcaaagcacgctggttccgtacgcctggatcagcaaccgcctgcacatgggcattcccaaatccatgggcaccctgctccaccgggccaagaagatggcggaaacggacttgaagacgcgggcatggatcgaacgcctgaccgcctgatttttccctgcgggagcgtccaaaagaagcttctcccggcccgccacatggaaaaatccggagggagggaaccatgccgtccctccggacatcaccccgtgacaggataaagaacgccggagcgaacgatgttatgccctgcgccggcgcaccagcatagaggccaggccaagcaatcccatggatgccgcagccggttccggaacaactgaaaacgccatggccgcaaccccggccttctgccctccgatacggaaatcaagagtatccgccgtcgcctcccctgtccatttgaccagggtcagcttgccgttggcgaaggaaggcgtggacgaaaaaccggtcccgtccgttgccgcgtattcaaaggtgccggtgcccccggtcacggtagtggcccccggagcggccacggtactggaaatgaacatgtaaaatgtcaccgtgtctcccaccgtcagcccccccaattgaatggaggatgtggtggagcctccggcaccgggagccatgtaggaggacagcgcaccgtaatcaaaagaaccgagggtattgaccagatccgtcatcgccgccttgttctggtaataggcgtaataggcagggtcaccctccccgggagttacggcggaaagctccgtgttaaagaaattcccggcgcttttaacgattttaagcgtgtagggagtatcgcttccggaagcgtccgccaaggggagaacagccgcagcattggaagtgtactggttcatgccgtctctgcctgggccatccctgtacacgtccacaaaaacggaagccgcctgggcgatggaaaaagcccctccggaaataagcaggaataatgttttcttcatggtttttgactattctgacaatggaggccagtttaaggattttgaatccggacaatcacgcaagacgcagaaaaccgcctgtttataaaaaatgtcccgtccattcatcacaggcgaattccgtctatggcacagcggcgtttcctgataactttttctttttcattcattccttattgacaccggattcaaaatccgcctccggggaaaaagaagccggattaccaggtatgtcctccggtttccaccccccggaatatgccgtatgaacgaatatccatcgtccataggggtcagtttacaaattacaacatgaaaagatattttctattttcctgctgaccctttacactttccggggaaaaaaatgattgccagtccgcgccgcggaatgataaacgaaaagcgcgtgcgaaaaaccgcgcgtgaagcgtcaacccaaatacaacaacagagaagatggcacagacatattcccagcgcgtgctcgacttggtgaaaaccaggaacagccacgaaaaagaattcatccaggccgttcaggaagtgctcaacacgattgagccggttctggccgcgaattccaagtatgaagaccacgcgattctggaacggatcgtggaaccggaaagaaccatcctgttccgcgtgccgtggatcgacgaccggggcaaggttcaggtgaaccgcgggtaccgtgtggaattcaacagcgccatcgggccgtacaagggcggcctccgcttccaccccagcgtgaacctcggcattctgaagttcctgggctttgaacaggttttcaagaactccctcaccaccctgcccatgggcggcggcaagggaggctccgacttcgaccccaagggcaagagcgataatgaagtgatgcgcttctgccagagcttcatgacggaactccagcgccacatcggcgcggatacggacgttcccgccggggacatcggcgtgggtggccgcgagatcggctacctcttcggccagtacaagagaatccgcaatgaattcaccggcgttctcaccggcaagagcctgaactggggcggttccctcatccgtccggaagccaccggctacggctgcgtgtacttcgcccagaacatgctcgccacccgcaacgacgatttgcagggcaaggtttgcctggtgtccggctccggcaacgtggcccagtacacggtggaaaaactcaacgaactgggcgcgaagcccgtcacgatgtccgattccaacggctacatctacgatccggacggcatttccccggaaaaactggcctgggtcatggaactcaagaacaatcgccgcggccgcattgcggaatacgtgaagcagttcccgaaggcgcagtactttgaaggccagcgtccctggagcgttccgtgcgactgcgccttcccctccgccacgcagaacgaaatcaacggagaagacgcccgcaccctcatcaagaacggctgtactctggtagcggaaggcgccaacatgcccacggacctggaaggcattgaaacctacctggccgccaaaatcctgtacggcccggccaaggcggccaacgccggcggcgtggccacgtccggtctggaaatgtcccagaacagccagcgcctctcctggacgcgcgaggaagtggaccacaagctgaagagcatcatggccaacatccacgcgaacgccctggcccacgcccaggaatactcttccgacaaatccttcaccaactacgttaccggcgccaatattgccggcttcgtgaaagtggcggattccatgatcgaccagggagtggtttgacccccggttgtgacacacttgctgccaacgtaaaacacaacagaagcgccgggttcgcccggcgcttttcttttattcctttcaaggggcctctccggcctggaaattgctttaaatactgcgcccggcagaacgagcaggaacattccacagaaggatttttccgcctgaaaaactattcccgtttactaaaggaacgttcaccggaaattcacggcaacaaatcacctggtccggacctggagacagaatggaaaaacggaaccggcatttcaccggacaacggccacggatgtattttccccattccggttgcgaacccgtttccatcaataaaacggccggcgcaattcttcccggttcaaatcgtcaaaaaaccggagcattactccttcagcagacggcagacggcctgggccgcgtgttccgccgctccgccctgccccagcttgtcggaggcctgcttcatttccgccagcagggcatccctgttttccggaaccagcaggcgttctatttcctcaatcaccttgtccggcgtaaaatcaaactggatcagctccttgactacgggcttctgcgccagaatgttcaccatgccgatgaagcgtattttaataagcatgcgcgccatccagtacgtgagcaggggaaccttgtacaccagcatgtacggaagccggtgcaaggcggcctccatcgtggcggtgccggaagccaccacccccacggcggcgcggtccatcagttcatgatatccccccaccgtaatatggaacagctccggcggcatgccggccttctgcgccatgccgcgcattctttctgcaagcgcctccgtggaagctgcggtttcaaaagacagctccagccgttccccggaaaggcggcggaccacctctatcaacaccgggaaatgcctgtcaatctcacggttccggctgccgggaaagagaccgaccagggacgcctcccggacatcatccttccggatggaagcaatctcgtccaccagggggtgccctacgaactccgttttcagcccggcttcctggaacaagggagcctcaaaggggaagatgcacatcatcaggtccagcatgcgcaccatcttgggaatgcggccgcggtgccatgcccatacctgcggggaaataaaataaatgattttggtatgcgggcagcacttgcgcaccttttccgccagacgcaggttgaatcccgggtagtcgatcagaatgaggcagtccggctggtcctgccgtatccgctccagaatggagagaaaacgcttccggaaccacccgtacttcttgagcacctccaccacgccgatgacggcggcttcatccgcccaatcctccacgccggagcataacgcatgcatgccgtggccgcccagccccctgacctccatgccgggcatcaggcgcagcagattcttcaacagcagggctccgtgaatgtccccgctcttctcgcctgctatcatataaagcttcatcactctctgcaacggcgcgcgccgtatgcctttcaaccttaccagccccttttccaaggtgcaataaaagacttttctttcaaggattttaatgcaagatacgcgccgttatgcatgagttgatctcactttggatgtcctgggtgcaggactggggatatgcgggcgtcatcgtcctgatggccatggaaagctccattttccccgtccccagtgaggtagtcatcccgcctgcggccattctgtccgcccaggatggagcatccatgagcttctggggggtggtggttgccggaacgttcggctcctggctgggatccgccattacctacgccgtagcccgtatcgtggggcgcccggtcatcatgcgctggggcaaattctttttcatgccgcccaacaaggtggaaaaggcggaagtcttcctccagcggtatgaggtgtcaggcgttttcttcgcccgccttctgcccgtcatccgccacctgatctccattcccgcgggcattgtccgcatgggcttcggcgtcttttccctggtcaccgtgctcggcgcgtttgtctggtgcacggtgctcgcctggtacggccaccgcatcggggaacggcatccggaactgctcaagtccccggaggagctgatttccaccgtcaagagcgaaagccttccccttattctggccgtgctggtgctggccgtctgctacatcctcatgctgcgcctgacggactgcaaaaaaccggaagacgccgcagcggacgctcccgctgaaaaggagcagtaaaagaaaacctttttcccatgaacggttccaaggaagaccgggcagcccaggcgctggattatttccaccagggatacaactgttcccagtccgtctttgcggcttttgcagacgtctgcggcctgacggaggaaacggccctgaagctctcctcccccctgggagcgggcatcggacgcatgcgggaggtatgcggcgctttttgcggactgagcatgctggcggggagcctgtatggaaacagctctccggaaaccggagaaaaggaaaaaatcttttccctggtccaatcactggccgcctccttcaagcaggaattcggcacgctttactgcagggaactgctgggattgtctccggaacgcctggctgcggagacggcgcgcccgggagaaagaaccgccgcctactacgcctcccgcccctgtgaacgctgcattgccttctgcgcccgccacggggccgagctggaagcaaaagcccggcatcattaaaatgcccggtcacccatggagggaaaccgggcattttaatcagacggaagattccgtcaatgagcggcctgggaactgcatttgccgtccgggcaggacgccttcaatttgtcgatcttttcattggtttcacccatcccttcatcgtagaagccctgttcgtccggggccagcacttgaaggaggcggaggaattcgcccgcgtgttccttttcttcattggaaatgtccaaaaggacttcctgcgcaagcttgttatcgatggattccgcaagctgggtataaagctggatggcctcatattccgcagcaatcatgaaccggatggcccttaccaattcgtcatgggtaagcatccggtcttctttttgtccactaaatgcatttgtaaattcaggcatgcaggtatgactcaaatcaccactaatgtattcaaaatgtttttgtcatatatttttcgcgacattctttgaactttttccattgaaaacggtctaaggaatccagcatcgcattccggcttttttccataggaggaaacggcagtttttccctcctcaattttcccgctgcgggactttccccactgtcggcatgaaatgaaagaggcgagccgggacacatgcgcggcatgagaaaacgcccggatttttcgcggagaaaaccgggcgtcttgcagtggcggctggaaagccctttaatgggcggcttgggaactgcatttgccgtccgggcaggacgccttcaatttgtcgatcttttcattggtttcacccatcccttcatcgtagaagccctgttcgtccggggccagcacttgaaggaggcggaggaattcgcccgcgtgttccttttcttcattggaaatatcccaaagaacttcctgggccaatttgtgatcaatggatgcggcaagctgggtataaatctgaatagattcatattccgcagcaatcatgaaccggatagcccttaccaattcgtcatgggtaagcatccggccttccttcaatccgctaaatgcgtttgtaaattcaggcatgcaggtaggaccggatgggcaaatccttcattcaatatgcgtttgtcataatttcatggagcttcttttgaacttgcgccatcaaaaacagtgtaagggaaatttctcatctttcttcccaaaacacggcaggagcgacggttgttctgccgccgctcctgctgaaaacgttccgatccggaacaaatacgttacttggcctccgcagtcttgggcgcgtacttcttgaaaaattcaacgtactggacaggagtctggccgggaatataacccgtgcggcccagttccttgccctccgcgtccaccacgaccatggccggaacgccggtgattctatacgtcttggcttccttggacttgctgaaatcagaactgccgaactcgaacttgacgccgatagccacgccgtccatgccctgcttgaattccttcttggaaaggatttccttctccagcttaatgcagtagccgcaccaggacgttcccgtgaaaagaaggacgatgggaaggccggtttcctccgcctgcttctgggcgctcttcaggctcttgccccagcggaatttcaccttcgccgccttggcggtcttggcggcggcttccttgtccgcgggagtgctctgggccatggaaacgccggaaacgctgaatcccaagacggcgcacaacgcaaaaataaaatgtctgttcatcatacttgtgaaatgttcttcccaaattagcaaaaatacaccgcataggaagaaaaatcagcgtcttcctcccggcaggaatgcttcctccccctttcacaaaatggaccgctttcaaaaaaagtattgctctttccgccttaatcgggtaataatccgcccgcacttccaaaacgcgcggttagctcagtggtagagcaacaccttgacatggtggaggtcgtaggttcaaatcctataccgcgtaccaccttcaataaaaagactgtctccaaagaggcagtctttttttattctatctattgaatatcaaaagaattatagagttttttcctatctgcaaattccgctcatttactaggagaacgctaaaatgcgttgacgttttgtgtaaaaaattgtgtaagtaatccgtggctatcatcagacatctacctacgtcccggttctggattgctcaatttgcccgtaaactccctaacggcacatggaaaactatttctcgttcaacaaagattcccattgaaccgccaaccggatctgaacaaacggccaaagaactccgggaaaccgcgcaggaaatagccaacacctacgaacgcaccgccaaccaaaaactaaaggctacccatatccggcgcgtgctcactgacctgagtaacgaaacgctcaggcttccctccgtgcgggaatggattgaggaaagactcgccctcatgtccaaaaccaaaaaagaagccacctaccgcaactacagcgacgcaacgcgccttttttttgaatggctggaagaaaaagatgctctcccgttggattccataacgtctctcatgatggacgaatttcaaaactggctggacaatcgtttccggccctccacccgcaaaaaacattttagtgccatccgccattttttcagtaccgcaaaaaaactgaacctgctggacactgacccgtgcgaagcggtaacgcacctttcatctctctcccgcaccgtctccacggaaatctcccgcagaccgttcacgtccgaggagcttcagcttatcctgaccaacagcaacgaagaatggcacagcatgatactcacctccctctatacaggcggccagcgtctgggagacgttgcctgcctcaaatgggatgccgtggactttgaaaagaataccctgtacatccgcacccagaaacgcggaaaatcccttgtaatccccctgtggagccgtctacgctccttgctggaagaaagataccctcaccgcgtcaacgaatacatacacccctcagcggcccagaaataccagcatgcgggcaaatcttccaccttgtccaacgaattcggaaaaatcctctttgcttgcggcctcgttgacagaaaccctacccttgccggtaaacgctataaaaaacaatacggcacctcccaggacaaaacccgacacaaaaacgccctttccttccacagcctccgctatacggcaaccactcttctccatgaagcaggagtgcccccgatgatcgttcagaaaatcgtgggccacgactccgccaaaatccatgaaggttacgccgccttctccctgcgggaatcggaagacgcattcaaccgactcccgcagttctgacctcaatcgtttccgaccacaccggccagtatcaggccatgcccatgtgctatactcagctccaaggcacgcctgtactgtccatcggttggagccgctatagccacccagccattcccgttgctcatgggaaacggttgcatgcttcctgcgccgcatccgcacttggcgccggtcaaatccacgccgtccatcagcacgctcaccttcggagtgagggccttttgcccgaaaaattccggcacatccatctgagtagttttcagcatggcagtaaacggaatactcttcttcccaacgcaatcataatcacggggttcccaatccatcctttcaagcgtaaactctccgtcccgttccacgacaaggaatagatcatctacagccgtacctgtcgccgtacaggccaacgctaccacagtcccaccaaaatcccagcagaaccaagaggcaagttcttggtccggattatacagcattcccattagcttcccggcatattctcctgattctggtactacccacgccaccggttccggcgcacgttgccacaccatggcgcacacgccgccactcaatacgccgtaggaaaagaccgtcatatctcttgcaaaataaaactcgctatccatggaataactaatgcgcctcaaacgcttgccggaccggtccacaaacatgattgcatccgtagtcatcagcacatcacttgccccgaaactcccgcagttactatgttgctctgctacagcagaagaactgcttaaaatatcagccttaatggacctcacggccacctctccgcacgtggtgccgcacaagagcgcaccgccagaactcgccatccacacaagttcactttgctgactgctggaaagcgtcagcaacatggaatctgcggtattatccccggtacggaaattaaagaaatcatccacggcactgaaccacaaagtaagcggttgcccggacgtacctccgaacaccagccgcccggcatgcaacacgcacgccaccgggaacccgttctgtttctccggcctccttcaccgccgccaaggcacccgccttctctgaggacacagcattcaccgcctctgttcggccagcttccacggcacccgccgccgccgttcccgcttccgtgatgcccgtgatggccgcatctactacttccccgaaaccgctcacctttccatcaatcaactctttcagttcccggatggactccaaatgtttcttaccttcttctgcgaatccccccgtcctccggttcaataaatccaccaatccaacctcagacaattcaataagaatggttccgtccacggcatccggaaaaaccagcgttgccgcatcattaacggaataactctcctgttccaacggcggcatggtccggccagaaacaaccatggcaccgcgcaacaaggcacgctccacattacccgtcaccatgtataaatcaaaactatgccgccccgcaggaagaccagaccagccaaacaacaccttccccccttctactgagcaagcaaactcccgaaggggggccgtattcacggcccccctgaaagtcaccccgtccaactctaccgcactaccggcggagtccgtaagcgtcagctcaaatacctgagccaagccgctcaccgtcttaatgtccatcacggcgggttccagcccggcccatgtatccagctcaaccatactcttatgcctgtttgaaatactcgtcaatagcgcgggcgattgccaagcacagctcgtcaatcctcgtttccaaccggtcacaatccgtcacgtgactggaagcaaaagcgggttccagcattagggcgggcatatccgtttccttgaaataataatacccgcggtcatccttataacgtaccggcttcaatccgcgatccggaagacggagcacctcacacatggccgtctgaatcaactgagccgccttctttccatttttggaagagtaccagtgcaacgtttctgtaccgccgattcccgtatctgcaccgttgaaatgaaactccacagccaaatccgcaccgatttcattacatctgcgggccgcgaaaagcggagttttcccaccagcctcagaccggttgcaaactacggccttgtatcccagccgttccagctcggcctttactctgccgatatgcagtttccagaaaccatattctgaatacttccggttcgttgtcacggaaccgccatcctgcgggctatgcccgatgctcaaagccacggtcttcatttcccgcatcctttccccttgttcttctttttaaccataattaattattttctataatattgcctgttatttaatttccgagtttccgctcaatatcctccacccggagggcaagcaattgaatggccttggccgtttccacctgtgcctgtgtttgcatggtcatcaaatcgcaaagccgatcattatgatggctcataacttcgctgatataccagcatgccccgccgcacactccgccgcaaatagcgagagataaaatgatacaggcaaaaaacggagaagccttggcaaagtccaagaatcgcgcaggaacctcagagagcttacacatgattctatttcttgagagattgaatgaccgggggaacctcttcctgtggcttcgctacggataccactaaggctcccgtctccccgtcacgggaaactaccagcatcccctgattagaagacagactcataccagcagaggtactgcacccgcccaacagcgcagaagccgcataaacaatgcaagcgagaatcacccacaacaggcgttcccaccatttcagccccttgccttccgttttctggtaggcatccttcatgccctgcttcccggcttcaatggccgccttcttctcttcatctgtaagattcttcataatcttcaacttctttttcttgattctcctgttcactttttaaaaaaattaattgtcccggaggtttccccccaggacaattccgttatgcttcgtccggttcttcgtagcaatccacggctaccacgcccttgtcctcaaaccgtacgccgcccaaaccgatagtggtataaatctgtgtacaattcttcttgtccgcacgcttggaaatctccgttcgagaatcttcccaaatcgcaaaatcaatggcttccttcacgtacgcaacgcaagtgcgtttcttcgttgctttatcataaggcagttgctctgtctgtacccatgtaaatcccataaaaggagtcttcaaatcaccttcaattagacccttcacggcaacatactgggaattcgtcgctttttcgtcgcccagcaactccatgagctgagtaacagaaaccatgaaaatcgccgtttcgccgcgtttcatagcctctcctttaaccagttttgcgcgggccagacgaattttatcaaacgtcaacccggtatctaccaactcagccggagccttcccgtaaacggcattcatggcaacccgctgagaattgggaagtgccactggagtcggagctttatcggtcgcctccaaagcatctcccaggcacgcctcaataacgcgcgcgtcaattgtacgttcgcaagcggctacctgagcctcctgcgttttcgtaataatctcatctccatactgagtttgcagatcaatttgccggtcatgaatataaccgtcctcataccaatccgggacaatataccgcttggaaaacgtattctcgttatccggcgtatctgcttttcccccgatagatttggtcaaagttcgtttacctattctgggcacctcgaacatcttgtccctgattcctgtatgcacagttaccaaccctctcagtgttgatgccgtctgttgcagggatgcccgcaacttacggctatactgagtcgtcttcatgtcttctatggtcaattcagtagccatgtccgcaccatggcatgccttcaaaaaaaaagagtggatgctattgtcacacccactccggaaatcacccctgtatcacttccacccggcttattcgccaaaccacttctccgccatcccggccagatgcttcaaataattggcaagcgttgccacccccagactgacagaagtaatagccccgccacgtggattccgccaagccccgaacatggctgccagactccccagcgtccccacgctccggctctgttgcctcacgtcccgccagctatccgcctcaagaatattggtcaaccgctctaaatcttttacggtcaattccacttgagaccccatcaccgccgtctggctctgcatcttcaatcccagccagccgcataccgtatctacggcggaatccgtcaaacttcccagaaacggcaccccgttcagcggccccagaacaatcccaggcaaataattcagaggatccttcttttcgtcgtcatccccccccggcctcattacattattgacaagataaccaaggacttgcatggctaccccctgaatcagccagctccgcaccgccagcctcatatccccgcgcgtcaggtagtgcatcaccgtagcactccgttgtagcgtttcagacatcaaaaaccattcggcagaaaaaatccccttcgttttttcaagcatcttcggcatctggacccagttaataggctgggccgtagaaagcccctcttcaatgacatcacgcgcatattccatggcttccggcttcgtcatgccctgtttcgttccctgccggaaataatggtcaaaggccgcggcaaaactcaccgcattgcttccggaatccagcagaccaaaaatctttccggactggttcgttacctcttccagcagaccgacccggcccccaagctgtttcttgtaacccagaaggacggaatacatgaatccatccttccgcgcctgaaacaaatcggaagagaacagctctttgacgctcaaaacggatttcccgcttgccacccgcgccaagccgtgaatccactccgcaatgctcaaatcacatccatgcagggcattgaataccgccgtcgtctgtttcaggtaacttgtcacctgacccataatcacggaaagggcacgggcgttcatcacctcattcttcaccttctccgccgcatccagttcggcaatggcatccctgcccgcgtgttccagccggttaatcaacacctgaaatccccggtaatccagcccccctatattggtcatcagcttctgagccgttccggggtcactcagaatccccttgtaccgttccacaatctcctgagtaaacacccagttcatggcattcgcgtgatgcttccagaacagggaaagagccccctgagtagtatccagatacctcttatggtcaaaaatacggacggaaagaaaaccgtcagacctccctacggctaccgtcccgtcatctcccagaatggaagccagttcactatcctccttcgtctccgttaccatccagcggagcggagaataattccggcgtttgctgaaaggcaccccgtagcggtcttcataaagcggcctgattttgtcccccacaagcgcatactcttcaaacaggatatttttcagggccatcccttccgctcctatgtactcttccagcttcgccttgtgtttatccgtccatccgcgtctccgcaacggaggcataacatctttcatcttcgtattgaatacattaggttgttccatgcacatcagtacgaacagggcttcatcccggctcagcttcgacatgggcgtaggcttcatgtcgtaccattcctctacctcaaaccacttccgcgcccggttctctccacggccccacgcttcatattcttccctcagcaaatcaatcgttcgttgagtgtacatgtccacgccccaccatggattcttttcacgcctttccaaaagcttcgccgcctggtcaatcgtcagcttcgttctccttactctcttttcagagagggacagccccaaatcttccggagtgctccacatgtgcaggaactcatttaccttccggtcagacttcgtgttcagcagacgtttcaaaactccgttcattttatccacttcttccgcatgaatggattgcgcccggtctgtagctccaatgaactcttttttgaactgggagaaaaacttcgtccccggaccgtcacaaagccgttgcaggaacctcaccggattatccagccagcccatcaccacgccgcgcttcgcccggccagtttcactatccatccccagatcactcacctccgcctgagccagatgaatgcccttctggtctacagccttcggcaattctcccatcagggccgccccttcatttttccacctgttaaccttttccttcaaatgggcttgccacgcttccgcgctccggctgataaaggtgctcaccgcctcatgtatatccagcatccggtttacatccgcagagccggcggcagaatacttgatccaccaattcaattccccgcaaagtttttgtttttctatcaacaagccgccttccacgtcggaaccgtcagttcccagttccccgcaccagaacttgtctgtcctcaacttctcttcaatcgccgcaatcttgccgctcaggtcattcacgtgttcctgcactttttttctgttgcatgcaccgcaggtttgatgactcgccgcaaaaactccgtaggtctggcacccagacggcttaccttgaacttccgggtcttctcgtcaattacggcttcatgttcggaaatcatgttctttacttctttgaacagttcatcacgcacgtacagttcaatcacctcaccgctccgctgatagactttcgataataacctctctaccgtctctcctaccaaatcgtcaaaaaactccggatgcaggtccatcttctggtttgccgccgcaagttgtttttccgtcagggcatccgtaggagaaaaacgccccgtttccagtgcggacatcaaataatccagcagcttttcctgtccagccagcttcccgcgcactctttccggaagcgtggaaatagccaccttcatgatgctccgcgcctccgcaatcttcacccgaacatctcccctattcatctcacggttcatatacatgccatctatgccgcgattccggaacagggaatccaaggcacgcccttctttttctacacgttctactacgtgtctccaatactcgcgcaccgcctcactccgggtctgttctatctgccgcttcatattgccgagaatatcttctcgcacggaaaaggacaccccctgtccgtccttgacatcttccccttcatttgccacactatccttgcggcgttgaggattataaacctccggcgtgccggttccgtcaccggtggacgccgccttcacccaggctgtacggaatgtcagtctgggctttttgcttctccggccagccgtctcaatcacctgttccacggaaaacacctccccatggggatacgccttcacgtaagctacggaggacttgttctgcgcgccctgtttaaactccatccggtcatagccgtccaaaacgtccagcaccagcttcacgtcatccttcgttaaatccaactggtccttgcccttcttcccgtcatgcccgtgctttttcagggcgtgcgctatggcatcagcggaaaactcatgcaccattcccgtgacatcaatccccagacctgtcttaatatcggcaatctcccgtgcagaggcggcccggtactccaccactcccagactggttttatccggaacattgctggaaaccaccatatccacaaaatccatcaccttccgttttccggcatccttccccatttcatccagcttttccttcacggaaaaagatgctccatttccaccctcttttttctgtttattcttgacaaaagacaaaacagtctccgcttcctcaagtgttgctcctttcatcatctggaaaaaatctatcccggcctgagcaaactctctctcgcgcggatgcttgcccttcgcaagcaaatcatccatcacctgcttgcgataagcatccaaaccataccttttcgcatacatgagatggaaatcataatcttccagcaccttatgaggcttcccttttaattcctgtagttgcttctcaaacttctttttagtcaagtcgccccggctttgcgcaaaatccacgcccacggcatcatacacgaaagaggcaaaatctcctttcaccacgccggaatccaccgccttccggaaagctccggccagaccaaccatttccgccaccttgcggctcaaagccgccactacttccaaaaatcgcctcacaggcggcggcaaagccttcttctggtattcccccacaaacacagcctgcatcagcttgctcattccttccacaacggctacccggctcttttcggtatccgcgccgtctgaaaagaaactctcgtccaccagcttccaatttttcactccctgttccctgaaaaccttctgagtttccagcaggttccgggaaaaccacgccagttcccgcccggcagtcatctcacccttcacatacagctccgccacttcttccaccaaatccagaaatgacgcttcaccttcataataccggattaccttctttcccattgacagctcataattaaaagcgggagcatgcaccccttcccgttcggagacagccataacctcggcatccgtcacctctccggaaaaaccttctccacgcgccagttcgccgcgtttcagggcaatctccacgcggtcacggaaattattcggcaggagggccagaaggacatcttcctcataggcggtctggtcatccttgctccattcctctttcttgcttcgttccgctacacgcatcagggcatcatctgccatcctcttcaaagcccggtaggaaatggtcattccttctttcttgaaatctacatggcaccgttcggcgaaaaactctacggaggcatcattcatggccgcgttcctcagagtgaaatcctgattcaaggcccactcctgcaccttcgccgtcaatagccggttccccgtttccaaatccatttccacgaactccttcccgttttccttctttctggctattccctctccttccctgccttccgcgccgccaatctccaccgccgccacatcatacatgcgcaatttgccgttcaccacctccgcacggggaatggctctttcttccatcagagacttcaccagcggcacatccggagtcatcagcacgcctatcggctcgccaacggtttcagcaaccttacccgcaaccttattattcaatgtcaagtcaaaaagtcttattttatccttatcattctcagtattcagaatcgctttgatttcatcatctgaaaaatgcagtcccttcatggtctccggacattccgcacactccgctttaatcccccggatgcgttcatctgcgattgccgcggcccgaaacgggctattctttgcataccgcccgtaccccagcaacagggacatgggaagagccaccagaaaaattcctccatgtcatcgcctcacgggcctccgcatccgcttcatcccagctcttcccgttcccccaggaaaacatgttggaaaccacggaacgcgcgtaaggttcaatcacagtctgagaatgcagaataccgccttccaaaccaacaaaaagaggcccgcgcccccagaagcggtctgtctccaacgcgcgccccagaagtcccttcataccgactttccggccagcccaattcatcaacttgtcataagccttcccaaccagcttgccgcctttaccaagcccccagatattagccgcccacattcccacaccttcgccataagccgcatttttggccgttatcccatgtgtgcctttcgccaaataagacatttccgctgtatcctgagcttctaacaaagaagaaaccccataggtagccacaaagggaaccattccaccaaaacaaccggaactatcttccattaaattcacaaactcattttcagaacgcgccttatactgtcccatccgtatctgctgaatatcctgagcgaccttgttcacgcgctgagcccagtgaggatcagcaaacttctcttcccccttttttaccaaaccggcactctgtaaaaaatccatcatgccggactcaagccagcgggaagccccatgcaccagcccttcattcgctattccggaaaaactattcagcatccggacagcggcattctcttcccccttctggtaatctaccagtccggcaatcgcaccaagagccagctcatacgcccgttcatctttcttgtggagcttcgccagctccaccacccagcggccctcttcatacttggaatagccatacgtcctcaatccgtcaatccctgtctgcatcccctgctccttcggactgttcccatcttccccataggccatttccttgatgaatgccgccgccatctgctggctctccgccagactggccgccccagccagaaactccggactcctgccctgatggtcacgagggtcaagagaaaaatccttcccgctacccgttgcagtcaccatctcaccccacacctcaccgaggtcttttttaacctgttcccgccttgaacgtcctacaccggcctgacggcgcaactctgccgccaccacatgcgcttcatccgtatccagccccagccgttccgccagaaaaacccggctcaaggcaggtgcgccgcccacgaaggactgaacataaccgtccacaagaacctcgtccttctcttcctgtgaaagcttcttgtaaaaattcaccactcccttcccaagagttttttccacgtccgccacctgttccgggttcaaatccgcgccgtctcccatctctgccatcaactggtaagcacggccccgcttcacgtctgcgaccgcggccacattcccggtgcccagcccgcgtttatcccagtactcgtccaaagactgcttcacggtctcataatccggactgtccacagacatcaaattaaaatccgccatgacggaacggtattgccggtcactcgtaataacctgccccggagtccatccccgcccttcatcctccacggcggcggccacattcccggcctgctccccatccagcacattcaactgcacccccggttccagtagcggcctgttcacaataggcggcctcaaatccacatgtccggcttcatcctgcacgtttgctccagccaccccactctgttcattcatagtcaatacggtattcataaaatatttattctttagtttttaatcattactgaaaaagcctcttcctgccttctttggcagctctttccttgtccgggaaatcaaaccggaccgccgccttgaacttgcttccgggaaccagcctcaacgcaatagctgccttccgggaaaacccgaatgcactgcccggcaccacggccaccttctgagggcggtacacccgcccatcggcaagctcaaagctcacatccggcacaaactgctctttcagttgcggataccgtgccagatgttccgttccaataatgaaacactcgtcattccatgccgctttcacgttcgggtcccgtgcatccgccacaggcacgctcatagtctttgtccgcacgctcagtctttcatccgacttcggtagggcaagagcctttttcttcaaatcgttcaatcccttctgggcttcattgcgctggacaaaatccgtatcgtcttcctttacggcatctgcctgttctccgttttgccggaggaggaaatccagcgtggacgcatgccttccggtcagtttgtacgtcttttccttcatggcggtcacaaacttcacggaactcttctctccggggtgtgccgcttgccattccaccgcccaccgcctcatttccatggcattccgcttactctgaatctctgcttccttcttccaccgctccacgttcaattccagaccgcttccgcgccgcgccatctccgcctttttttcaccgcttccgttgacaaaaccggctttctcaatctcgaactcccgcaatgcctcactgtgccacgccaaattccggagagcgtcagcagtaacgaactcgcccgttccttccatcgttttcacaacatcatccacgtcaaagccgattttgtccgtcttctgcccctgcatggacagcacccggttttcaagagtggattccatggagtcctgaaactccttactcactccatgttccttccaccgccgtttcagctcgcccagatacatcatgtaggacggagaccccactcctccatccttcaccagcccgctcacgtcggctgccatcacctcgttcatgctggtcactccaatttcttccgttgtcggcaactgtccctcagccgccctgattctcattaaatcaaccaccggatcagctaccccgctccggaactccggcttcttcttcctgccagaagaaggcgtgcctggaacgaaagagccattcaccgcattcccctgaatgccgccctgtccattcaggccatcttccccaggcattccactttcctcttcgtcatcctcaaacggttcatccaacaaaacccggtcatagagcttcctgccgccttcccccagaggcatcccggtaacgtcatacaggctgaccgtggtaggaaccccggactgcccctgcaaaagccgtccataggcggcaatggccgtattggacagcatcccctgatacttcccgtcaatcaaatccgccgccaactggtccggattctcttcaaaatccttcgcggctctcaaagtgcctatctgcttcttggcagaggccagcatccttgccgccttcatgccgtccacatacacccctaccccggaccccagcacggaatgaacgcgctccatgtccccgctctctaccgcggcggcccaatccgcagaaaatgccgccttcgcccgcttcgcactcacccgctgatgccggtcttttaaaacctctcccccgcgctggaacaaatcttcgatggaggtgcggtagcggcttgccgcttccggagtcatgaactccggctccttcaccagtccccgcttcttttccagcacctcttcccaatttgcgccgttgtcaatctcagcttccgcggaagaaagcaatccacgggcctccgtcagtcccatccggtaattttcgtcatccctcagcacattttccttgtgcattaaatcctgccccagattatctaccgcttggcctacgcgccccatttgcccgaacacgccagccgcggccaacgccggagctgccgccgcttgcccgttcaccgccgccgcccggtatccattatcaccgtttaaagtaactttcataatatctgttaattattccctgttaccattcattttccttttacagccggaacagccgccattccgaaccccgtcagggaaagggccgtccccgccacggaacccagaatcgtccccaaggctccgcgcttggaagcacgcgccgcctgtcttgcctgccactccgtcaaatccgcctgatacagtgcgctactgcgctggttctcccgctgagtggccgcctgagcaatcccgtgttcatactgcttcatcagggtcatttcattggtatttccggtgccagtggacagaaacccggatgccgcctgagccgcccgcgccgtgcttgcatccgcattctgattcatccgctgaagatattcgtcagccagcgcggaatcatacgcgccctgagcttccttccgtatatttgccgccgttgccagccctgccgccttctgaacttttccggcctgatactggttcagggcggacaaggcccctccggccaaactcacaccattgccaaacaaggaaaactctcctgcatggtcacgcatgaacccttgaaaccctgtcgcgcccgtcgccataatctctataatctaactgttaactcttaactattgcccggccattaatttcccaacgtcatccgggtcagctcattcacccggtcctgcgccctcttccaatccggatgagagctgtccatgtaagccttgctcagctcatgcgtgccgctgtaaatggagtcaagttcctgttcagccgtagccacggccgccatctggttcacgttcgcaaatccggcttctttcatccgctgggaaagtccgtaaaagaacttcaccacttccgggttattccggatttccggaaggttgaatacactggtattaaccccgaactctgcggccagattgcacaacgtattatcacatgcctccataacagccttgaacttgccgccgtaagtctgttgtagttccttcaactgctcattgcttgcttcaatgcgttcccgttgaatctgggcctccgtctcattgatgaatgtccggacatctcccatcacggcagacaaagcctcagccggaacccctgccttgtgggccgccgcgcgggcacgctcaaaaagctggtaatccagactttcaggttccaccccctcaagcagggaggtggcatactccgctaattccggcaaagcctcagtaccgccgccagcgggagccgtggacgcaggttcgccggttccctgtgccggaggagtggcagtactgccgccagcgggaaccgtcgacgcaggttcgccggttccctgtgccggagaagtggcagtaccgttgccatcatttccaaatccacccggctgtgtagtcacagccccttcattgttgtttttttgttcttcgctcatagcaaaaatctgatttttagttgttaaagtatgatattgcgtcggtattccccggttcgtgaactttcttccagcttgcgtacatggtgttccagaccagccgaaatgaatcctgtctcatggcatccagcggattccattcaccgttgaaaacacgaaaagccgcctgatggatgccaaactcattccggaaccactcttccagcgccttcatggcttctctgtccagtttcccgaaagcatccctcagcaacctcttttgcttttcggcttcctcttcttcgttgtattccagtgggtccatcattatttattttcagttgttcagttattcccctccggcagggggttgagcttgcattatcctttcctgcatctctttccaggcttcttccttttccttatcgtccctcacaaacgcttccggcacccccattccgcgcactacttcctgagccgcataatcgaaatcaaagcgagcaatcacgctgggatcaaacttcgccatattgccaatcatttcctgagaccctgccagaccggaaatctgaacctgcttcatcaactgggcaaacttggagttgtacacgacatccggcaaagcctgaggattaaattcttccccgccttccggcgtctgtatcatcaattccttcggaatgtgcatatcaaacatccgggcttccagcatgaggcggaaaatcctcagcatcatgggccggaaatcatttaaatgctggcagaacgtaggactgaacgccaagagcctttcttccagccgggcatttacctccgtcgcagtcatttggccggactgtgcgccgaagaggtccagcatatccagatagaacgcagaccgtacttcctgacggtccagttccatttcattcattatttcccggtaatcgcctaccgtagcccattcttgcggatagctaccctccccgtttttaacgacagtctggcccgctggtttgagattcacgcgtcctaccaagtcctgtgatattttcacgcgcggaaaagcctttaactctcccagcatccgggtaactcgccgcgaatactgcaaagacaaaatattagaccagcacagccgggccggagccagtccccacggaccgacccatttgagaaaccgtgaaaccatgtacggaaattcatcgaaaccgccctcttccaatatgtgtttactgttttcctcaacataaaaggaataaaactccttttccttcaaaggatcgaattggtctttccttcctaccgcatgtaaaatcgggaacttcttcttgacacgttccaattcatgcctgtaggcatcctgcatctccttgttcaacttctccacgccgccaagccagcgggccgcctgaacggcattccattcaaatttacgaatgagaagattcggcatgccatgttcatcttccgcaaaaacaaaagaatcgaagggaacgtaggagaacatcagcctgttttcgttgctgatgcctccgtaataacttcctgttccaaacccgcacctgtccagcaacgcttgatgattaaccgtataaaaattgctctcggccagagcttgataggttctttccgcacagtcccgcaaccactttttgacttggctgctcttctgtatgcttgaccccaaagcggcagaaggttcaaaagtgaaccagatctttccggggtcactcaaaaaactctggtgtgccgccgccagccgttgatttgcccgcacagccgtggaatcatgcagatttttcaggtcgacgcccagcagggaaaacttgctcggcaagccggtaggagaaaatggatagacaaacttctttaactccgccgtccagttctctgcatcctgcttctcagttttaacgcttctatacagggaaacaatgtcttcacccttcatcattccaattccttcgatgaattaacccagcgttttccggcttcctgccccgcccgcctgaccgaataccgcgcttccgtttcctcttgccgtaaatgtcttgtccattccgtagcgtttccgggcgcgggctttcacggtattttcccccgtttcactcgtatcaattacttccggagccttgacaacttctttttgttgcggcattggagccgcttttggactgagcatctttcccatgcgcgcaccatgacacaccatcaaaaaaaaagagtgggtgaagttgtcacacccatgctcaaaaaccccccttttgaatcagggcacctccgcgcaaccggcatcttggtactggtctccccccagacgttccatgccgacgatggagctttcaaacccgtcaatcaatccatgacaggcggcttcgatgaacatccggaaagcgtctgcaaagtgggagcagtcatcatggtcaatcttcccgttctggtccacatggtaggattccatgcagtccagcactcccggcaagccctcttcgcttccgtcttctatttgttcgccgcatcgttcatgccagacggtggaaggcaggaaggagcgcacctcacttacggacagccacacgctccccgtcttcggcaccagcctcacatcatggcatccattctcttccagcacctgcttgttcgttttccgatcattggtggaatgatgcccgccgtcgtgcggaagcaggtgccggcttaccttaaacccgaccgatttttcaaactccctcaccttgacaagcatgtcccgcacacaggacttcttggcctgtatcccgccgatgatgcgggtttccccgcccaccttctggaaaaacaccgttgccatgtggtcagctacgccaatatcccaggtacaatacaccggagcatagggatgcaccacaaaccgaacacctatccggccatcacggcgcaattgccggaactgtgcgcaataaatggcatcatccccgattgcatcaaacgcttcatccggaacggaaggatactcttcattcatgttgaaatcagactgtccgttcttccattcccaccatactttagcggagtccggtacatctaccccatgaatctctttgagccggttgaaatattcaatggtttcatccttgaacacatgcccttccggcacgtccagctggtagcggctctcttcgtaccatgggaaaaagaagaatcgccagtccaccgggagaagaggcttccccactttcgccatggcattcttcatcaagttgtaattcacgccgctcctgccgccttcatgcgtgctttctacgatgattgttccgttggttggtacggattcaaagccgccgtttacaacttcccttgcccggtccgggaacctctttgccattttcgccagttcggaaacgtgcatgaactgcgtagttccgccgcggaacgtgttgtccgtataaatcacggacccattccggaacgccagcttgttcgccgttgcggtcagaggcacaatggacccgtccttcttgaccgttcccagacgcttcttcttctccctcattagccacgcaataatgcgccgttcccggttggcaccttccggaacataatctaaatggtcccacagaaactttataaacgccagcttcttctgaccttccggcaatctccagtcaatgatagcttctgtcctgttgttttcccagaaagcttcgtctgcaagctctacgcccgcctccgtggaaattcccaactgccgcgccttcaagacggcgttgcgtctatgttgctgtgcacgaaacttcaactgaacttcattcccctgaaaaagaacaacgtccccgtcaacgttcttaatccagtatagatgctccagcctccagagccggtctctcagtctttccttccagaagttcagaaccttctgatattgtatgtcctccctgtccatcctcaaacaaatcttcaaaaaatattccctgtacgcttacgtcacgcttctccggtgcgtaatcgcctgtcatcttgttatccagatcaatcgccttcatgcgctcagaatgagacgggggaacttcaaacaagaaaccctctcctgaaaacaacgctttcccccgcgcaatctccgcaagcctcagcctcttttcctgtagcgtcaggcaattttcatcacaaagccgttcccggattctccggatttcttccttgatgcccggctccttcatcttccgggaggccgccgcctgtgctgattcgttagaagtgcacttgaaaccggcttccagataagcttcataggccatcagcccggaagcgcatttctcgcaaaaaatcttatctctttcacttaacatttcctaacaaacaattacttgtcaaacacttacatcaaacaagaagagaatcaggcttcccattctctcccttgccgccgtccttcttgcccttcccggactcggcgttctcttcttccggctcctttcctgcatcccccagagccgcggcattctctcccaaagccacggcattctcccccagagcaagccgcgccatcagagcatcagcttctcccagacatcgtttcaaaatctcagagcctttttccgttagggtgtaaatgtattccacctgaccatgaccggaggaacggaacggcctcatatccacatcccccaattgtttcagccgttggagaatctgtctgacggtactacggtcatacccggattcttcagcgatttcaatgcacgtctgttcccggtttgccagaaaaaccataaccgttaatggcccctgattcagggaggttaaatgagcctgcctgaaaaccccgcgtaatacttgtaacaacatgtccatgcagtccacttagcacaggaccgcaagggaaaaatagagtcttatcggcacccttcttcccgaacgagaaaaaaaaatgaagagagagagcatcaaaaccagccatcagcggccctttcccatcacattacaaacgtctaaaagctctcctatttagaaggataaatggataaatcctgatatcgaagcatcccgaaattcataatggactgaaaaataatagaaagggaaaacgctaactgcggaaacttgtcggaaaccttgcggaaatccaccggaaacccactcaaaaaccatcaccgcaccttgcccgcgcccggtcctgcttggcactcgcaaagccccctcagggccttcactcccgccaacctcaaaggggaaaattattttgtcatactccctgaaaacaaaaagggcggccaccgaagcaaccgcccttttgcaatgaattggattgttttctcacaggccgcaggaaaagagctttcccaaacaggcagtgtttcaatccacaccccggagggtgaattctgaaagaacatcagaacaaccttcttttgtcatactttcctcgaaaaaacaattattttctgaaacatgaaacttttctcttgatttactgtcgtaacgatagtataaataactcgtcagcgggagcaatgacccaaagacaaacaactaataatcaactgaaagaacataaatcatgaacaccgaaaacaaaaatacggaaatcgtcaaccaaatcacggcaatagccgtttcctccggtcttgtcaaaatcagaaattgctggaataagcgcgtcaaagtagctccgcaaagcgtttcttttgtcatgttcggagaaacccccgatgccaatgcttggcaagtttcttttaaaattgcctctttgcgctcaccgaaaaagataaataacttgctggaagaactggcctctctgacttcttcatttaaaggatttgaaggctatgaactccgcttcaataaagagcaaaaatccgtgcacatcattcttccggataatgaaaaatatgccgcttaattattaattcccaactaagaaagcatattatgaataactacattgacgacatcccccaggcaaccgcaacgaacgcctttaactggacatacttcaaccctgaaagacggggagaaatagaaaggcagagctacgcagacgccatcgaacaattcaaaggataccttgaaaaatacctcaccggagaaaacgcctcccgcattccggaagaacttgaacgcttccgggaaggacttaaaacacgcactcttgcctatctgcactcacattccaactgtgcatcatccgtcattaccggaggttcaaatttttcctgtagccagaatgatgaagcgttcccgctgggcggatgccaaggccaaggaaatgctggactttgtagagcgtgcgaaaaaatctgtcaaacgccgctactacaatgacccgcatgcccccatcaaatccagtgatgcggatgccgtggaacgtctggaagccaaaatcacctcttgcaaggaaatgcaggaaaccatgaaagccgcaaatgccgtcatccggaaagccaagggaaacaaggaacaagccattgcaggactaattaaaatgggattgggcgaccataccgcaaacaaaatcctcacctcggactgttgcgacagaattggctttccttcctacttgctttcaaataatctcgcagaaataaagaggctggaaagccgccttattaaagtcaaaagagcacaggaaacagctccggaagaaaccgaaacagaatcaggaattcgcattgaaaaatgccctcaggacaatagaatcagaatatacttccccggcaagccggaagaggaaatccgttccttgctgaaagcccacggcttccgctggtccccgcgccttggagcttggcaagcatatatcaactatcacacggaacgctttatcaaagagaaatttagagaatgacaccagagcaattcatcgaatggattcaaaatgagcatggcgcgaaaaatcgcactcgcgccgtgctcatggcagaagaactcctcaaaaaaagtcacctcactatatggcgttggctcaccggcacccagaaatgcccggatgacagcatgattcacatggaaaaaaccgttaaaatccatgagcttgaaaaagaaatagaacgcttgaaaagcaaaataaaaaaattacaatcagaaagaactacatcatgaaaaaaacatttacatcatccccttttcctcacgcaaccggatacactcgccagcaacactactacttgcaaaaaggattagtcatgcagatcgaccatgacggcctcgttggttttggctctctccctgaacagctctattatgtatggggccgtccggattttcatgactacgcagaaattgcctattatgatagattcatcggctgggactccgattttgacggagaaagacgccttgtctacagatgcaaaaacaatggctgggaatttgtcttaccccatgggctgacattggccgattacctcaattattatgataactaccaatttccggaacatcaatctacagacaagggagacgctaatattctgctggcctccggaaatctccctgtcatccaatttgttccgcgcggacaaacggaaatgaaccgtaaaagctttaaaaacttggaagaagccataaaagaattcaaaaacatataaccgaaagaattaaaatgaacgtaaaacaggaacttattaaaaaactcgccaaatacaaggaagaaaataaacatagattccgtaatataacttggagtttcacggaagatgaaaccgacggcgtaaaactcaacgccctgataaaggcaggagtaggaaacatggcattcatcctaatacaaggatttaacggaagaaaaacggctgacccggaactcgaaaaaggagctaaggaaataatagaattacttagtcctctacggacagaagaaccagaaaaagcttttagttccccatgggaagaaaaaagaatcgctgtctatcttaaatatccaaacaaataattgcaaaatgaacgcactggctatcaatcatacaaggaccattaaatattcctataatatccatacgggtaaagcaataagagttagtactcagcgtcaggcaggagcagaaccgggaacttcggcggatgtttttgaagttacagacatcccgccagacgttacagaccagcaagttctgaacctatataacttattcatagattggtggttccaacctataggaatctattcttacccctacagcctacttgaaaaacagcagacaacaggcaagattcagatgcccagcatcaaaaaacatgtggaaataatcatgaaccacaaaaatacaagtccggaaaaagtcataagctatctttctcgtcctcgctacagagaaaaaaccgctgatagaaataccctctggaaatattatgaagccaatgaagctccttgggagatcatgacggccattaactccatcacctgcgacattctggccaaccgcgtctggaacactcaggaaagctaaacaacagtcccctcacgccgtccggcccactcccggacggcgttcttctttttcttgatgacattttcaaaagaggtatcctttccggaacatgaacaccttgctaagctctctttccggaatcatccttctttctgtggtgttattttccggttatgttgtttggaaaaccctcgaatcatctattacggcctttcaaagaggttcaaactgtcccaaatatattgctgtagcctttgtcttcctaggactccttttaatgtggataaatccccttcttactatctttttgtttttaatcatggtcatctccctgactacgttgacaaaaatctatcgccgtaaaactgcgaaactcaaacagcagaatttttcagaaaaatattgaccatcaattataaattgtaatactgctaaataaaattgtcatagtctttaaaaatatataataattatgttgacggtgttaacacctgtgatagtatccagctatgccaaacatgccagacccagacaaacaccttgtcggaatacgcatgccccgtacattacacaagcgtttacaaaaacgtgcacagcaacaaaaaatcaccctaaaagactacatattaggaattcttatcaaagaaacaatcaacaccgtattaactccagaagattatgaacaaatcgccgaagaaacaagaaaagccgcaagaagatacaaaaaccgttagtattcgtatgcctagagagcttcatcataaaatactactcaaaagtcaagaagaaaaaaggagtgtgtctgggcaatgcgttttttttctgcataaggtgttaacaccttctgtagaaaaatctcccaattaatttttttaccctcctaggtgttaacaccaatgaaccaacaagaactcaatgccctagcagaacttgtcacagaaaaactctggggcaagttcgctgtaattggtgcatccagtctcttccagacaatctccccccagccagaagcaaccaatccggccccggccctggaattggatgactacatttccacggaacaaatcacgaaggaattcggttgctccaaacaatggctctacaaccagcgcaaacgctatccccaatgttcccgacttgtcaaaaacaaccctcatgaccagcgtggaaaacgtttctggagccgatcatacatcaaaaaaatcatccatgaatcaccagaaccatgaacggaccccagaacttgaacctgaatctggactcgaaatatagtagacacctgctttccctgccagaaaacgacctccggaaacggcttgttcacacactggaacagctcacgcattacgcatctcttgcggattcggaaatttatcaggaagaccctgtttttggaagcatgctttacgctcaccttattaacgtaggcattgcagagcaaacagacggcagtgttcacctcacccagcgcggcaaagacctcttgttcattcttgcctgctatctggatgcaacaatcacggaataattatccaatccaattttttaatacttatccgtgaactactcccctgtacaacaccatcacacccaaagccgggaattcaagtctgcacgcctttcccagcgcggcatctggataacccttttgcagtattgcactagtcaagaaaataatggcatcattaaaaatttcgctatgtggaaaccttctgaaatccggaaaacattgaatgttgaccccgccgccctcaagcaaaaatccactctctggaacatggtaggtccggacctgcacattttcggttatccccatgacaagcaagccattcttaataaaaagcgtcagacgcttgccaacaataccggcgttcagccggccttacatgcagaaaattacaccacccctgccccatcccataaaaaatctgaaaatagtccggctccactcgaattctgggcgtttctccggaacacctgcgtcatggacacttggcgagacaaagaccttaacccgaaggaatatgccgcggcccggcaagcctatgaacaaacagtcacatgcggggaatacgattggaaactactgaaagcttattaccacggctattacaaaaacggacaaaccagagacagccacaacaacaaatattattgtccggcctcacgcttaaagttttatgaagatattattgacgtgcttacaaaagccgaactatgggccaaagatacccgttggaaacccaagctcaccccggccaactcaccgccgccacagcgcaatcttgccatacgtgccccccacgatgcccccgttacaccggaagaaatgcgaaatttttttcaacgaaataaaccctgccaataacaccgaacaaccgaaaaaatgagatactatatccatccctacaaactccgcctcagctgtctatggatatttgacgacggcattagaagctgttgccgcgttgccgtcaaattcggcatccggaaacggtacgccatcaaaggaacctccgtcatcatgtcccccggagaagccaaacgggaacttgactgcatggaaagaaccctttttcaggaaggatactggcctctctggttttggttattgtgttgtggagcctatgtcttcatgaccgtacacctcttttccctcattctcaatctctggcgtcccatcccatgaacatcattcaggcatttttaaatatcatcaggaatattaatcactatctgccatatcagaaaaacgcctaccgggaaaccgccgtactggcagccatcgcaatcggctacacaactccctcggaaattgaggccgcaatacacatcaaccgggagcaagtgcgaaaaatcgcaaagcaactgatccttgacggccttgttacttgcgagttacctgcaacttggccctaccgcaatcattatacccttacccccaaaggagaaaaagctacaacgaatcttctaaactacaaacgtccccagccatgaattccagtatcaaagaacgtcctattctattcagcgcagacatggtccgtgcactcattcaggattatcacaatcccggccagtataaaaaccagacccgccgcacgcgtggtttggaacgttttaatactcttcctgagttcctgacggaaagaggctgggagatttatgacttcgtggaagaagaacccggcttatggctggctatctccaatgacgaaagcggagagtttccggatatttttaatccgtgggtgaagtgtccttatggaaaagtaggtgatcgtctgtgggtgcgagagtctatttggaatgatagtgattttagctggctttattccgctgatgacatttatttgccaacgccatatcccgaaggatggatatcaaaggttgctcacaagctttctattccttctattcacatgccgcgttgggcatccagaattttattggaaattacggaagttaaaattgaacggctcaaagagattacatggagagacgcacagttagaaggcatcgaatgcgtttggcatgatgattatacctcagattgtctttggaaagactacacgggaaaatccacaggattaatttatgcaagagaatcctttttttccctctggaaaaaaataaaaggtacagactccattaatctgaatcagtgggtatgggttattaaattcaaagtattaactattaattgaaaaatcaaatgaaaaaaattaaatatttatgtgcgttttttgttatattgcttgcttcatgcaataagatttatgaaatcacggttgaggaccaaggaaatcataaagtttattattcagaaagaaaaccataccaagaaacctcatttaatctttttaatccaagagataaatggcgtccgacaggagtaaccattatagaaactattgatggagaagaaataaaagtaatatccggaaccatcactatccgcaccgtaaaacattctaaatagaaaggaacaatcaaatgaacatatttaaatgccccttctgcggaaaacaacctgaaactcactattataatgaggaagaaggccatgatgaattctggatcactggctgtccagattgcgacctcttttcaggcatcacagcggccagtaaagaaatctcacaaaacgactggaatgctcttatctcaaggttcccttctatcatgcgagtacgcataaatgataaagtagaggttcgagaaagtagcaccctttatcattattttcgagtaacagaaattgatattaatgcaggaatattcatgggaacttgccttaaaacagatgaactcgaacagtttaaatttgaagaaattgttacatggccgtgggagcttgaatagaagggaggagaagaacagtgaaaacaacttacgatgttattgtttggattgccacgataaatagagaaacgcacctaatcgaaccgaaagatattttaattgctcacggtttgaaaacaaaaaaattccgctcggaaatacattgaattttacaaagaagaatacgaattgaaaaacaatagatatgaaatcctcatatcagatggaaaggagtccgaaaatgaaaataacgcctgaacgaatagccaaaaagaaaaaaaccgccgtcaaaaagaagaacctgactgttatggataaagtttctttaagaaatcccatcctccgcaagcggagaattcaggcccggatatgggcgtacttggaggaaattgaaaagagagtgccgaagtctctggaagaagccatggaaatatcccggcaatcccggaggtggcggaagcggctggctccgtttaccaaattgaaagcagtggcaatcccaactcacgccctgctggtggattgctggggaaaaaaactcctgctgggagcaggaacccggaagaaaatggaagcccttatagacggcttcgaatcaatccggaatgctggctataaactggtttgcctgagtgaactggcaaagggaaaacagcaggtgaacaagatgaaatttattcaggggaaggaggaacagaacaatgactgagcgggaaaaagctttcgagaaagcaagaaagatttacgcccttgttcaagaaggggtagatggagaaaaggaatccgcaagggtggcttttgaacgcatttgccaaacacatggttttggcgaggatgatttcaacgatgaaattatcggcgagtttaaaatgaagtacaaaaaccagatggaaatgcgtctggttgcccagattgcggctgtgtgccggggttcttacggttcctacgattacaagccttatttcaagacggtgtatctaaaggtttcccggaaggattatgtcagggcgatgattatgtatgatatgctgttaccccatttccggaaggagtttaagaagatcaataacaagtacaaggaaaatttaaagtattggtctgatgcggaggttatcggtgaacatggcgcaagattttgcattttgaggtgcaagcgaattaaagccgaacaggcccgattccgcaagaagttcgcctccgcctttattcaggctcatgatttatatcccaagaaggagaatggaaaatatgctgaaaaagaagacgaggaagatgaaaacgaacggggccagaagctgattggcaagcccggagacaggaagaagacggctcagaaaatcgatattgagcagatgatgatttccatggggattaccaagatagaggtgagggacagagtaaccaacggagaattaccggaatgaaaaagatggaaaacatatatgactttgtggagaaagcaatatccacatgggatgaagaaaaaaaaagaaaatatactcatacatctggtctgcttgtgggcggttgcagacatagccgaaaatcaaggaggcagacgtcatcctctagttgggagtatcagggacatgtttcgttcgtatggcctgaaaacatccgcggaaattgcagaactggaaaagagaaaggaggctagcaatgaaaatgacgcctgaacagaaagtacttattgagtacgggaaagcattggggaggctggaagaattcaggaggaataaccaggaccaattctgtgttcaaagtcaaataatgcgccatttttggagggaagcccatgtgtgttgcggtcaaaaagaaatcacaaacaagcacgtcaaactgatctgtgacgcgtggcagaagcgggctgtatgcaggggaatgcagacggaagagagaaactgctggacctgcgctttcaatggaacttctgcctattatgagccgtgcaacaagtgtttccgctatggttctgacaggcagtttgacaactgggagccgagaaaggaaaaaccataatgaaatatgatgccagaaaaaacacattaacttactacaccgaatattgtaaaaggaatgaccccctcattacaccggaacaattactccatcaggatatgcagaaagcgacgtctcataatggcatctgtatctggacaccaaaccttgtttttcttgcatgggaaacggacgataaaacactctggatagagcatgccataggctacctttcagacatccttccactagccagttcctacgactcgaaatggaaagtcagctacaaacaccgcgacaaaacccgcactcaaaacatgcactgtttactaggcagactataatagattttatgtaaattattgtgtaacctaaatataagacattaataataaacaataaatatattctaccgcgtaccatcttcctaaaatcccgtccctttccggacgggattttttattgcccctccctgatgaatgggatgatgcggtctggcgcctgttgaaaaatgccagcatcaacggacggtttgtgtaaaaattgatggaagctgcctgaataagaataagtgtggaaatactatccatacctacttacggtaaaaggtataagtcatgtcttcctccctcctccatccatacggaaaaaaatatttttccaactttttttgaacgcaagccctgtttcgggacgctaaaggtatgaaggcagatgaaggccccagcccttgaccctccttccctgatgaaataatgaccattaaaagcccggcggaagaattctcccgccgggcttgcttttcaaccaattccgttgctgaaacggcccggacggctaccgggaagtcaaacggtcgtataactcattggcgtatctgtgattgggatggttcacattcatatacgcctcataaagcggatgagagggatccgactccatgcgcatggcttcctctgccggagaaggcgttgcggcccccgaatgatgaagaggagcttcatcaagcaggcgtgaggcctggtacagcaggcggatgacgtccggattggaccctagacccggattgtcaagcagggcatccgcatccactcccgtctcggacgcaagccgctggagtgcggcggtagccctgcccatgttgcgctcataattggcgccccattcctgctgcagggactgttccgcctgcgtttccatctccatccgggaatccgccatctgttcccgagcctcctcatatgcctgggccatcgtttcctggagagcgttcatggcttccggcggtacgccgtaacggtaggccgtgcgggccatgcgttctgcgagccctgcattccactcgctttccggcgtggactccggacgttccaggcggtaatcttcctccgattccggcagaccggccatccggcggaaccgtgccatctgatcctcattctccacgccgggataatgcctcaggcgctccagctccgcataactcttcgccagcgcttccggcgtcttgaatttggaaagggacttctccatccccttcaactcatcaaaccgggcataccaatccggaacaaaaccgccgtcctcccccagaagggaaggaagaggcacggcttgagccgcggcttctgtcaacgcttccgcctccggggaaactgccccggaaaaatccgcctccccggagggagcggccatactattatcaatggaatcaatcattcttttcttctgctgtggattctttaatggctaactgaacttgacggcggatgtacaggaaaacctccctgtaggcatcgcgcctcatggcgtccagggggtcataactccccgggctgccttgaaaaacgggcaaatcagtctggaagcgggcttccagaaaggtcagcgcctcccgcccgtccggagtgtcaaacacccggaaaagctggcgccttctgagacgggcctcccggacggaggcctcctgctgcaatgtcgtatcctggttcattcctgaatcgtggttaactggtcaagcaagggattgagggaagcgtacggatcctcttccgccggagcctgtgcggccccctgctggcggtccgcccgttccttccgcatggcctggacatcggcccagggcctcagcatgctctccggagcgccatccacacgggtggacaggcggaagcaatggtcccagtccacatgatccgccaaatccggagcggcctgcatcatcatattcaggcgctgaaggctgcggtccatcccctcgctctgcaagcgcctgagcaccagcgcaatctttgactggtacaccaccctgggctctccgacggcaatggagccgtccctcccctcccgcagaacggcgcggggaggcctgggaaacttgcccatgcggaacagcagggagaaaatgcgcgtcatggtggaatacagatcactcacaaacagcgtgaaggacggggaaaacatcagcacgcgctcgttctcccgggccatcacctccgtggcggtcatgctgccgcggtggccgctccagagctccagcatgggcaggtaataggcgcgccggatggcgtcctgcttctgcgccagacggtccatcccgacgtcatacctgccctgcgtggcccactcccgcggaaggtggagggaggcggcctccggggtaatgacggttctgccgccggcacgcaggtccacctccccaatctggttggcgagctccagaatgcgtgggaaggcggccacctcccccagcgtgtccagaatgcggttcaggaactgaacctgctggatggcgggaaacaccagcctgccgggcgcgaggccgtacggaccgctgccccacttcaaaaaccgggttaccaggtagggaaactccatatatcccccctcctccacgatcacctggtcgtccagggacagatacacgctttcaaacggcatgtgggcggcctgctccctgcggcggctccggcgggtgcgcggacgcaccacgtgcagaaacctcagggacgtggcgtacggattgccgccgcgttccagcacctcccgcgccctggcccccagggccttcattccgaacatggaacgcgcctggtgggcggtataggtaaactccctgacgtaggtatccacccggccttccgcattctccgcacaggcgaactgaccgcacggaatattggtgaacagcagccttccgtccgaggaagttcccgtaaacaaactgccggtccccaaagccacgcggtccagaaaacactcatggatctccgtatagaaattggaaacggacagctccttcagggcaatctccgaacactgattgtaccaggcctccgcctcgtcccctccccggtcgtccggagccgaccacttgaaccacacgtcatggctgggcgtaatgtaggacatatggccgctggccagcttctggcacgcctccacggcagtggtatccgtcatgcggtccatggcgtccctgttggggagggaaacctccccttcccggttcaggcggcggggcagcacgtaatccctcaggcggtcccaccatgtctcccacggcgcgcgctgggcggccagggacttgtacacggaattcagctccgcaactctctcttccatggcggtgcctatcccagggttttcctaagcagggtccggggattgacctccccctgcccggcggaagaattgcggcgcgccagaatggtggaaatcatcccctgcctctgccgctcccgggcctgataatcttctcccacttcctctcccacgctctccgccttgaccgggatggcctgctccggagctggagtggaaggagtggacggtttcatgaatcccataatctcttttactttctatgcatggtttatactgatggccccttccgcctgccgcacggacgatccatgcggcgggagcgttcgctccccgcggaggaaaagggcggtctcctcacctgcccggaattgcccgggaaggtgcatgcatttatcaaatagatgaattggaggaaaatgcatccggggaaaaaccgggcgcatacgtgccaccggtggcattaaagagggtgttcccaaacgtgatgcattccgcatccgtttccgccaaacatgtggcgttatgatcaatgaatccttacttcagccggacactccctccgcgctggacatctgcaacgcggcgctctccaaaataggggaggctccgctggacgcgctgattgccaatgaatccacggcatcccgtctctgcgttcttcattaccacccggcacggagggaaaccctctgcatggcgcgctggaccttcgccaccacgcaaaccacgctggactccgtctccgcccaggcgcccaactccctgacaccctatcaattcaccctgcctgcggactgcctgcgcgtgctggatgtggaatgcacggaatggaaaatgcagggaaggcgcatccacgcctcccgcgcgccgctgcccatgagctacatagccgacattgaagacgccgaacaattcgatcccctcttcatggacgcgctggctacccgcctggcagaaaagctggccatgcccctgacgggcaaccagagccttcgccagaatcttcaccaggaattccataaaatcattctcccgcaggcggcaaccgtcaatgcggtgcagagcttctccaacgactcccaccccctgctggacctgctgaggaaaatcaagtcgcccgcctgcccggaggaatgtgaataacaggagaataacaaggcagcaacataacaacaacttgtgaatacaagctcatgaaagccctggacttcatacagatattcgcctccaacgtccgcaggctggacttccgcctcagcagcgcccaggtcatcctggccgtcattgccggatacaggcgccacagtaccattacggaagccacgcgcttgcatcccaataccgttaccaacatcctgcaggacctcattgcacagggatacatcaaccgcttcggggacagccgcccttacgtctaccgccccaccgcggatggggaacagcttgcaggaaacctgctggataaaaacaccctccccagcccatgaaagagcccctgctcagcacggaagaaaaacgccgctggctggcccgcgtcttccgggatacggatggagaatactcccaggcggacaaattcaaggcgctggtggaagataccaaactggcggccctccagcaggaagaggaggaattcaaacgccagcgggaagcgggcgccgcaccgcaggaccccattctgaccctgctccagtctctcccccccgcagaactcgatctgaaccagcagcccccggctgaaaaataaacaacgaaacccgaaaaaaagctctccagaccaaacaagcctggagagcttttcatttttaggaagagttacgcaaatccggacatagcaagcctttccgatgtttcaatccacgcactccttgcggagtgcgacttggtttccccgtgagcggcaagcaggtggtctagtttcaatccacgcactccttgcggagtgcgactaacgccgccgccctgggccagcacatgatcggcctagtttcaatccacgcactccttgcggagtgcgactgcgcctgaccatatacattgttattcaacagcgcaaacgatactttgcgccaacctcccgaagaaggccatcatcacctagccttctcttctaagtattcatctgtcaatcttccattcccaatgtattacgccaatcgccgatctcccgggaaattggtgtgagcttggggttggcgcaaaggccgtgctcagacagcttttaaatgatcaaagggccggaaatgtcgaaactcttctccttgcccaattgctctattttatgatgccaattggaccccatgtgataaattctcaggctgtcgctctcgttatcaataatcttaagcagcttgttcctgatgtcaaccaattgggccggagccagctcacattcaaacacggaattctgcactctctgaccgatattttcacaggcgcgggcaacttgacgcaaccgccgctgcccggccttgtcatccgtagctacatcataagtaatgagaatatacatggctaaggagctttttacttgccaataaacggaggatagcagtccaggtctccgcgcaaatgacgtgccagcaaaagggcctggatgtgaatcagcaatccctgtgtcgtcttttcctgaaggaaggggtgcaccaaaacggtcttcttgcgctcctgccaggcattcaatactttcttacgggaatcttccttcaaaaagacggcgccggattcctccttgtcgaaatcatctgcggaaatttgcttgcggttgattagcgtaagagccaggcgatcagccagcggcgcccggaattcttccatcaggtccaaggccattccgggacgccccggacggtcgcgatgcagaaaaccggcggccgcatcaatgccggcgctttcaagagcggacctggcatcatggcacaacagactatatagaaaagatagaagggcgttaaaacaatccttgggaggacgcctgttgcggccttcaaacactaactccggctcttccgtcctctggcaatgggacacgcaggaaaaatatgtttccgcagcggaaccttcaatgccccgcagcatatcgccggaactgcacccgcgggccatgcggcaaaaagcagccagacggtccaccgcctccgacaaatctttcccgtaagttctctgcgctcttaaaagcagactgcggcaattggcaattttggctcctatcatttcccgggcaacgccaacccatcttgcctcatcatcagcccagcggtattgctcccggcgcaacaggatatttcccttcatgaagccctggacgccagccaggaatttaccgtaaggattgcagaaggaaagcgtgatgccgcgctccgcacaggcccccatcaaataaggggaaactcctatgtcccatcccagcgtcacaataccctccaaattatggaggggaacccgcagcaaacatgttccttccgaattgactttcacggtatcgccatccttggacagccagcatccctccagcgtcacaaacaaggtatttaaatgtttcttcataaatcatcagcttcacttgcaccaagactgtcttcaaacacactatccacccgggccttcatggtctgcctgtgctcccggcaaacgttaggaagacaatcattgaccagggaacaggacttgcaggctttggaatacatgggcaacggcgtcactcccccggttaacacctccctggcattcctgataaccccggctgtcagagtacgcagctcttcatcaaataccacctccatccttttctgggtctttccataaaatagaaaaccggaaggaatgtccaccccgaacatttcttccaggcacaaggcctgggcgcacacctgcacttcatccgcacggtgcggtttgggcttgcccaccttgtactccacgggcgtcatggatacgggaatgccgcctttctctgcataaacagcctccacgacatccgcaatgccatgaattccccattggagggaggaaatatgaagagaacgcagaatcctctttcgcccgcggttttccgtcatgccggaatccgcccgttcatgaaatacattcccctccgccgtaaattggttctcttcccatatacactccagataaatcagcgcgcattgcctgggacaatacaggtaatgctgtaatgccgccaggggcactgaaaaaaaggaagaaggcatcttggaaattctgttcagggtaaaacactaaataaaatactaaattaatcaattcatatattgcaaatgatcatatggaacctatgatagtttctcatgtatcaggctcgcccccatcagtctctttccactcacgaacaagaatgtgcccgtacgatgtccaccctgcttgctcccttaggactatcacaatttggggccttgatcggcggcatgcacgacttcggcaaaatgagtgcagactttcagcaatacatggatgctctctctcaaaatatcagtcctccaattccaaaaggcggcatagaccattccactgcaggagcccagtttgtctggaattattttcccatcccggcggactctgaagaattttttatcttccggcaaatcattgctttatgtattgcctcccatcacaactctgctctcattgactgcttccgtggcacgatgtccggagatgacgtattctccaagcgcatggaaaaatccggagagaaaacccatcttgatgaaatcctgtccaaattgacgtttcaggagaaagatcattactactctctcctgaaaaaaacggaactggccacggaattcaagaatgtttacaccctccttaccaccctgtttggccactctccaaaaaaacaagcattccatgccggactaatcgcacggttctgtttgagcagccttatcgaagcggattacaccagtgcttccggaagaggaagctacgaaagcattccggaaccggattgggaaggaatgttaaaaaacttgaatgaacatctcgaacaattcaaggctgatacacccatcaatcaaagccgggcagctatgtcacaggagtgccttcaagctgcgccaggacaagttggcaagtggaaccttacccttcccaccggtgcaggcaaaaccctctcaagcctcagatttgccctggaacatgcacggcggcaccatttgtcacgcatcatctacatcattccctatacctccattcttgaccaaacggccaatgccatccggaaagtgctcggagatgaatataaaggctgcatcctggagcatcattccaatctggtgaaggaaacccttaacaaggagggaaaaatggaaccatggtcaccggaaagaaaaacctggtacatggaagccactcaaacatggaacgttcccattgtactcactacatccgtccaatacttgaatgccttatatgcatccggcaaacagcatgtgcggcgcatgcactccctggcaaatgccgttgttatttttgacgaagtgcaagctattcccccaacctcactacggctttttgaacattcgctggattttctctccggcatctgccacagcagcgccatccgctgtacggctactcctgcggaaactgccacggaagacggaacgcatgctcatctcatcgaaacacctattattccggacagccaagcttacttcgatcaatttagccaattccgtcaatgcgaggttgtctgtgaacggaaaccctccaattactggactgtagaaaaaatgagggactccatcatggagcaagcttcctccaacggtcccaccctcgtcatcgtaaacaccaaaaacctggcctccaaactggcctgcgcctgccgggacctgaatacagagacggacattttccacctcagcaccaacatgtgccctgcccacaggaaagaaatcatcacgaaccgtattgacaaagcatctctggaaaaggccagaaggacgggaaaagccgttgtgtgcatcagtaccggcctcattgaggccggagtggacgtagattttgacgtcatcatacggagcgtggccggcctggattcctgcactcaggcagcaggccgatgcaacagggacgccaaccgccccggaggaagagttatcctgattaatcctgcaggcaatctggaaaaactggattttctaccggaacttgaaatcggaagagaaattgcgatgggaatgctctgtgatcctgaagaaggaggaattctgggaaacaaatctgtttcgctctattttaaggaattctatggcaaactcacccgctcgcataatcatgaccatctgtcctacccgtttacatgctccggcgtcgccaccaacatggaggatgcgctatctcaaaatttcaaactgctgacagtttcccgtcagcagcccaaatatgctcccctccgtcttttccaggcctttgactcggcagcacgccactatcatccgatccaggttgatacaatagctgttatcaccccttatggaagaggagaagaatgcagggaaaagctctggaacatgaatcctcatacggatgaagaatggaaacaatggaatgaatggctccaaaaagccagagcctattccgtcgcgatttccaaccgacttcttggaaaatacttgaatgcgggagacatcatgcgtatacaggaaggagtggatatttatacaacagtcactaataaatatgatccatttctgggctttctcacagaccccggagagacttccggtgcgctgactatttcccagatttaaaaatttcaacagcttcatattcatgcttaatcaaatcgaatttaaggtctacgggaaatatgcgcttttctccgaccctctcacccggataggcggagaaaaatgttcttatcaaatccccacttatgaagccctgaaaggaattgtaaaggcggtctactggaaacccaccctgatctggttaattgacgaggtgagaataatgcgccctatccgtctggttcccaaaaatatgaaactgatcaaatatcatgaagccggggcggatttatccgtatatacctaccttcaagacgtggaatatcaagtcaaggctcattttgaatggaacatgtaccgtccggatatgtccaaggaccggatcgacggcaagcattatgaaattgcccgtcgcatgattgaccgcggaggacgtagggacatcgcgttgggaaccagggaatgccagggatacgtagaaccatgccggtttggagaagaaaagggattctatgaccaatatggaaacacgtccttcggactcatgttccatggtttcaattatccagatgaaacgggaaaagaggagctttccatacgcttttggcgtccggtcatggaaaatggaacgatccgcttcatgcgccctgaagaatgcgaaattgtcaagcatgtacgccccatggcggcatgcccgccaagatccagcggactgaatgatctgagcctgggagaatgaaaggaaaaagaaaaagatgaactggatgcacgccttatacgccacctatgaacaaaaccgtgattatgtgggtcgtattgacaaagaaccggcccacggcaacaggaaagaacgcctcattacccctcttctcccgctgtaccacagcatgcagaatgctcacatcaccatcacactgaacaaacagggagagctaattaatgcatccctcaacaatcagaatagtcaacccaccatcatccccgttacggaagcctcaggaggccgcaccagcggagcctgtgcccaccctttgtgtgacaagctccaatacgtggcaggtgataacgctgactatttccctccggaagaatccccggccaaacggaccaaacaactcaaaacccttcaggaatcctacgaacaatatgaacagcaattatcggaatgggcggcgtttgatcccgataatgtcaaactgaatgccgttctgacctatattcgtaaaaaatccctgatcacggacttgatcaacgggggaatcctatatgcggaagattccaccaacactctgcttcctgtatggaaaggggataaacaggaaatgcccgctatctttgaaattctgggagcgtccacccaggaaaatgcgttcataagatggaagatcaacaacaaggatggaagccctccggaagtgtatgaagaccccgccatgtacgaatcctggcgaatttatacggaatccaaggccaacaaagaagggatgtgctatgtcctgggaaaaacagcacctttggcaaccactcacccggcacgcatcagaaacgccggagacaaggctaaactcatttcttccaatgacagttccggctatacctaccgcggcagattcattgaagcggatgaagcgtgcggagtaagtacggaagtcacccaaaaagcccacagcgcgcttcgctggcttatctcccgccaaggctggtatgatggagatcttgtcgttctcgcctggtctcccggtctgttgaaagttccgtctccctgcggcaatgtgcaggaatgggaacactacacgcccgaccagccaacaccgaatgaccaggtcacccaattggttaagcaatttaaaaaagaactctccggaggaggaaaagagttgctgcggacatcattgaatgaaaacgatattaaaaaccgtgttcttgttctcagcttgaattctgcgtcgccggggcgcatgtccctctccagctttcaggaatttaccgtctccgaataccttaacaacctgctttcctggcattccaaagccagttggaaacaacgccttcctaaagacaaggaaggaaacgaccgatcttatattggcgcgccgtctatctccatgattgtcaaagcagcgtatggaataaaggtagacgataaactacgcaaacacgccctctccagactactaccttgtattcttcacaatcttcccatccctccggacttggaaaagcaatgcgtcatccaggcatccaaacggcatgccatggaatggtgggaatgggaaatgaccttgggagtatcctgttccgtttatctttataaccatccacaaacaaatacttcgtcctcagataccatgagccttgatccaaaaatcacagatcgcagttacctcttcggccgtcttttagccgttgcagaagccatcgaaacatcagcgttaaatatcacgaaaacctcccgccccactaatgcggaaaaacttatgcagcggttccagcaaagaccgtcagaaacatggcccatgctggaaaaaagaattcagccctatcgtaacattttgaaaaaaaatgaaaacaccgtttctttcttgagaagctatgatgcttacatagacaatatcatggaaacattcctcatgggacagttcatggataatgcaccattaaccggagcctacctcctcggttaccactgtcagagagccttcatttacaaaactaaagaagaaaaaaatgctgaactagcaaaataaatcttagaataaaacattaattcaacactataaaaccacatcatgagccttaatcataaaatcgactttgccgtcatctttaccgttacaaacgctaaccccaacggagaccccctcgatggcaaccggcccagaaccactttggaaggactcggagaaatctccgatgtctgtcttaaaagaaaaatccgcaataagctgatggacatgggacaaaacatctttgtccagtcagacgacagacgtgtagacgactataaaacattgaaagaacgtgctactcccatcctgaaacaaaaaggtacgtctgctgaactggcacaaaaagcctgtcaggaatggtatgatgtgagagcttttggacaggtctttgccttaaaagacaaagatgcggcaaaaggcaccggcgtctccataggaatcagaggcccagtcactattcaacctgccttcagcagagatacggtgaatatcactagtacacaaatcacgaaaagcgtcagcaatgacggagacggcagtaaaaaatcttccgacaccatgggcatgaagcaccgggtggacaagggcacctatgtcttctttggagcaatcaatccgcagctggcagaactcacaggcttctcggatgaagatgcatacattttcaaacaagcgcttcctcagatgtttgaaggagatgcctcctctgcacgaccggaaggtagcatgtctattcaaaaagtcatttggtgggaacataactgtaaaagcggtcaatactcttctgccaaggttcaccattccattgaagtctccgaggatggaaatattgtaaagaaatatgatctaccggggttaaccccggaaatgattgaaggcttctgatctgtttcttttcacaaatgtcaaaacacccttcactaaaaatgaagggtgtttttaatgagtgttatagccaactgctccttctcattccagggatagtaggccgttcagtctgcgacatctaaatccacgcacccgtgtgggtgcgaccggggaatcgtcctggctggccaagaagtacgggtttcaatccacgcacccgtgagggtgcgacgtccttgtgccttacttccaactccctaaagctagtttcaatccacgcacccgtgagggtgcgacggcggaaggggatatgcgttgaaagttagtggtacaaatcgctttttgcgccaacctctttcaggatgcatattccttaccgccttatattttattgaagagaatgtcaatctactggtttcaaggacttacaggaatcgccgatctaccggggaatttctgtgagcttggggttggcgcaaacagatcagcggttcagcaattcattttggaattgctgattcccatctggttcaccaacctgtttttaatgctagatggtcagcggcctatcgtccagcaactttttttctctgccattccaaaaacaaaaggccgctccatattaatggagcggccttgaagtgttttgcggcatcagcaaccgccaaaggcgccgttaacgcacacgggcaatgagccagtgcaacaggtccttgatggcgacgcgttcctgttccatggagtcgcggtggcgaatagttaccgtgtccttgagggaggcatcgttttccccaagggtttcaaagtccaccgtgatacagaaaggtgtacccacttcatcctggcggcggtagcggcgaccaacggctcccgtttcatcgtagaaaacgggcatccacggttggagtgttttttcaatttcccgggcgatgcgcacctgttcctcgtttttcttgagcagcgggaagatggcggccttgatgggagccatccggggcacaaagcggagcacgatacggacgtctttcttgcctttgtcatccaccagttcttcttcatcataagcttcacagatgatggccagaatggtgcggtcacacccggcggagggttccaccacatggggaatgaatttttcccgcgtttcttcgtcaaagtattccaacgggcgtccggaacctttctggtgacagctcaggtcatagtccgtgcggtaggcaatgccttccagttcctggatgccaaacgggaattcgtattccaggtcataggttttcttggagtagaaggctcgttcgccgtccggaacgtccagaatatggatgtgttcgcgcggcacgcccacttcgtcatagaagcagaggcggtgttccagccattcatccaccaggcgcagaccgtcttccggccggcagaagtattcgatttccatttgttcgaattcgcgggaacggaaggtgaagttgcgcgggttgatttcgttgcggaaggatttgccgatctgggcgatcccgaaggggagcttcacgcgggagctgtccaggatgttcttgtattggcagaagatggactgggccgtttccgggcgcagccagccagtggcattgggatcgttttcatcggaggtggctccgatggtcgtcttgaacatgaggttgaattcacgggcttccgtcagcagggaaccattggcggggttgtacatggtggagtccgttatggcctccattcgctcgcctttcagttccatttccttgtgggagacgtccttgcctgctagctgggcatagtactgggccgcggtcttgcgggccttgtccgcctgtttttcagagtccaccagcacggagtattccttttccatgctccaggagccgtcctttttagcggctccggtgtagaaaaatcccatgccgctctgggccggcacctggtcggcgcgcaggcgttccttggtcagcagacagtcgcacatcgggtcggagaatccgcccacatggccggatgccaccagtacggagttatgcgtcaggatggaaccgtccatgccgaccacatcgtcgcgctcctgcacgtttttgcgccaccagtattccttgaggttgcgcttgagttccacccccatgggaccgtagtcccagcaaccattcagaccgccatatatttcagctgcctggaagatgaaaccccgccttttgcagaggctcacgattttctccattcgggcgggatctgtattggttctgtctgccatgataatatctataattgggttggctatgcgggttgtattgatgaccgcaatcagcggccagtgaaagcaaaaagcgtgtcttctcaagaatcccaggggaggggaacccccttgagcagctgggagtcatatccggcttccaccagcgtgcggaaggcttgcatcgcctccgcagttacgggctgttccgtggaaaatccctgtgccgggtattccagtatccgctgaaagtcacccaccatggcggagacgaccagttcccgcggcagttccggggtcaagtattcccggaagcttacgggaggggaactgactgtcaccccgggttccggccactgggcctggagcgtagccagggtacgccgctccatgtacggtttttgcagggcaatgagggtggcgggctccggaatgccggcctttttcaggatttcccgggaaaaacggacattttccccggtgttggtggatttattttcaatgagtatcctgtcttccggcactcccgccttcatggccgccgccgcaaagagttccgcctccgtcacggcccattccccggtgaaccgccccaccccgccggaaaacaggagaagaggggccagcttccgagcatagagttccgccgcatattccgccacccgcacgtcattgctgccaaggatgaagatgaggtccgccgggcgcagctcctgcttcacatgatggtattcccacaaaatttctatcgcttcttccggagtcatcggccctatgtacccaagaagttcctttctgtaaacgccggattcaccacagtccgtatttgccccattccagcgcggcccatcccagcaacgcattcgccaccgcatgcatgacgatgacagagcacaggtttttctgccagacggcaagcaggtacgccagggaaccgtaaatgaaggcgccgcagtagtccacaggctggtgcacggccatgaaacagagagtggtcacccagtacgctttccagctatgcgtgccgaaggggattttccagggatggtccaggtttaccatcaggcgcatcagataactgcgccagaagagttcctccaccagcgccaccaccaccacggcacggaagaagcgcaggaccagcgccgccagccagctccaggaatccggagcaaagacgacgccgggatcaaagccttccgggcgcatgtcaattcccagcaggtaccggtaccatggccaggaggggtggccaaaccatgcatccggaccgcccggcagacggtccgccgccatcgtaggggccagccagcacaggatgcccagcacgccgaagaggattccccatgcggcgggtttccatttccagtcccagtcaatggcttttctccaccacaggaccaggacaaagcagacgatggcctgcacagggtacagccattgctccggcgcccttctccaccaggcggcggcggggtggttccattccaggaacggcccgccaagctgccacagcagggtaaagcccatgaacaccgcaaacggcgctacgtacgcccttgttttcagggcctccgggacggagttcatggacgcggaggggtcaggaaagagttttcacgaaacgctccatgcggttgcaggcttccttgatctggtcaaaggcagtcgcatagcaacagcgcaggaagccttccccgcttgcaccaaaagcggtaccgggcacggcggccacctgctcttccatcagtaggcgcgtagcgaattccttgctggtgagtccgaatttggagacgtccgggaagacatagaatgcgccgccgggcaaatggcagtccaagcctatttcgttgaagcgcttcaccaggaagtcgcgccgctggcggtagctttccctcattttcatcatggcggaggttccgttttgcaatgcttcaatggccgcttcctgggaggtgataggagcgcagagcatggagtactggtgaattttcatcatggcggagatgagcggctccggtccgcaggcatagcccaggcggaagcccgtcatggcaaacgccttggaaaagccgtgcagcagcagagtgcgttccctcatcccaggcagcgaggctatcgaaacgtgcggcttgccgtcgtagcgcagctcgctgtagatttcatccgtcagcacgacgagatcgtgcttgatgcagatgcgggcaatttcctgaagggtttccacaggggccacggccccggtcggattggtggggaaattgagcatcagcaccttggtccgcggtgtaatggcggcttccagcaccgccgggttaagggcgaaaaggtcctgcttgcttgtgggcacggcagtagccacgccataggccatgttcacgctgggagcataggagacatagcagggttcatggtaaagaacttcgtcccccgggttcagaatggcacggagcgccaggtcaatggcttcgctcacgcccacggtcaccagcacttcatgcaggggatcgtatttcacatggaagaagccgtccacgtatttgacgatggaacggcgcagggattccagtccatagttggaggtataggaggtgtgccccttttccagggagtaaatggccgcttcccggatgttccagggggtaacaaagtccggttcccctacgcccagggagatgatgtccgtccgtcccgtgaccaggtcaaagaattcccggatgccggaacgggggatggagcttacctgctccgcaattttgttctgccagttcatgatgatttctttcgtgtcggcagggacttacggagcaacagccaggcgttcattctgcgcgggggcctcgaacacacagccgtttttcttgtaggttttcagatggaagtgcgtggaagtggacagcaccccttccagcgtggacagtttttccgccacaaaccgggcaatgtcacgcatgctttttccttccaccagcaccagcaggtcaaagccgccgctcgccagatagcaggaggagacttcgtcaaaacgggagatgcgcatcgccaggcggtcaaagccgccatcgcgttcgggcgtcatttttacttcaatgaaggccgctaccctgctgtcgtgttcgtattcctcatttaccaccgcctggtagcccagaatcacgccttccttttcccactgctcccgctgggctcgaacggcttcttcagtcatgtcaagacgttcggccaattcgccatcgctcaagcgggcttgagtcgccagtaactgtagaagtgatgcagtggacataaaatttcaggcataaaagacccttttatagcgaacgtgtcaagaacacatgttacgcaaggctgacatccgttctttccaacataataaaatacgttctttttcttcaaaaaacagccgccgttccgagaatataatgctattgccttcaataagataaccattatttcaaacatccgttggaattattttcagagaatagttgctctaatccgccttttgtgccatagtaaagtgcatagacctgtagcgtccctttacaaggaacgcttgtttccaatttttatatgacagtctgatattatgagcatggcacttaacccggatagggctaccctgaactttctcaatgcctttccggaagaaatccgtctgcgcggcgagaagctccagaaagacggagcggttacgcaaatctttggcaatcatttgtatattcagggccgtgtggaagatgcgcacggcgtacaccgcgtgaacctccgcctccagggcaacaggtggttcggggcatgctccacggaagacgaggatctggccggagcggccatgtacgccgccatgctggaacgcatgtaccgtggccaggatcttccggagtccccgaacgaacttaacgacgttcccctgctggatattctggaagagaagctgggccgcgaactggacgacaaggaagcggattacgtcagcaagctggagaagcgctaccgccgtttcgccattgagcaggaaatccatgaccatgacatggtgcgcctgaatccccgctgggaaatcgtcagctatgacccgctggagctgtggcccgtgcctcccacgaacatccttgaattctggaattacatcgcctacgccttcaacaagaggcgcctgccctacccggaattcatggaatccatcacggacctggaaaaagttcagcgcaagattcatgagtgggagcgttcccgtgaagtaggcacctggtatgaccgcatccagtccgtgaatgaaaggcccccgcagccgccccgcggagagctgttcatgaggctcgtttccaccatcaacgagggccatttcgaataccgacattccctgaagcaagactggattcccgtccgggaaaagcaggatttggaacatctggaaaacctgcatgaacgcgctgccgtgcgcatggatgcccagacggaaatcctccttgtgtccctgtccgattacgcccgtgcggaagacgccctgacgctggacctggaccaggaagccgcgtgcgccctgatgaacaagcttttccaccagcccgccctgaaaggctacctggtgaacctggatgaaaattatttcaaggtggtggacgaaccgctcaagtggatttgccaggacgaccccattgagccggactgctacgccctccagctcgccacgtccaccggcatcaacgtctcccactccgtccgccagcttcccggccagcaggagctgtaccagtctgacgaaaccgtgtttccgggtcccccccgctggctggagagcacggaagtggaaccccgctattccattcccaagcaggtcatcgacagccttgaaggggtggagttcctccgtaagatcggcgcttccctgccccctagcatggaggaccgcgtggtggacatcgacctgcgcggcacctttgacatgaagatcgtccgcggcctcacctccgcggaaacggaacacgtgctttgtgaagtaagcgccagggacgcttccggctaccgcacggaaaaactcggcaaggacggctgggacgtcgctcaccaggagcccatgaaaaacaaggccctgctgcgcttcatccgggagcacctctatcccattcccggcctgctggaagaaatgggcttctcctatgatccccaggtgggcgctttcaaggcccgcgttacccggcagttccctgaaaaatttgcggagtgggccaagcagctcccggaagagctgaccgtcaacatggatgacaagctcaagacgctgctggcggacccggtggccgccgccgtgcggtttgaagtagttaaccaggagattgactggtttgacctccgcatcgtcattgacgtggaaggcgtccagctttccaaggaacaaatccgcgctctggtcgccgccagaggcggctacgtccgcatggacgacggaggctggatgcgcctggaaatcaagctggacaacgaccagcgcgacgccgtcacccgcctgggcctggaccccttcgacctctccggggaaacccaccgcatgcacgccatgcagcttgcggacccgaaggccgcggaagtgttcgacccgaaggcctggaaacgcatcaaggaccgcaccgcggaaatcaagatcgacgtcaagccggacgttccctcccagcttcaggccaccctgcgcccgtaccaggtggacggcttccacttcctggcctatctggccacgaacggcttcggcggcattctggcggacgacatgggtttgggcaaaaccatccagtccattacgtacgtgctctggctgcgtgaggagttcgcgcgcaaaaacaaatccaagaagaaaatcgccgttcctccggtactcatcgtctgccccaagtccgtgctggatgtctgggccggggaaacggagaaattcgctcccggcgtgcgcgtcctcgtcatccgcagcaaggatcaggccaatctggacgacatccggaagaattacgatatggtcgtggtcaactacgcccagctccgcgtctgcggagaaaccctgaaccagatcaagtggctcacggtcatcctggacgaaggccagcagatcaagaacccggattccaaggccgccaaggcggcacgggaaatcgtctcctacaaccgcctggtcctttctggcacgcccattgaaaaccgcctgctggacatgtggtccctcatggctttctccatgcccggcgttctcggttcccgttcctacttcaagaagcgctttgacaagcgcaaggatccgcagagccagaaccgcctggccgcgcgcctgaaacccttcctgctgcgccgcaccaaatcacaggtggcgaaggacctgccccccaggacggaagaagaagtgtacgccaagatggaaggcatccagagccagctgtacaaggcggaactccgccgcatccagcaggccctgctcggcctggattcagacgaatccgtcaagaaaaacagcttcgccattctacagggcctcatgcgcctgcgccagatatgctgccaccccggcctggtggaccccaagtacgccaaggaagacagcgccaagatgactgccctgttctacctgctggaccagctccgggaggaagggcacaaggtgctcgtcttctcccagttcgtctccatgctggaaattatcaagaaccggctggaagcggaaaacaggccgcttaactaccttaccggccagaccaaggaccgccgcggggaaattgaaaaattccagactaccaaggacccctccgtcttcctgctttccctgaaagccgggggcgccggcctcaaccttacctccgcctcctacgtggtcctgtatgacccgtggtggaacccggctgtggaaagccaggccattgaccgtacgcaccgcatcggccagaagaacaaggtgattgcctaccgcctgctgacgaaggactccgtggaagaaaaaatccgcatcctccagcatcagaagaaccagctcgtcgccaacgtgctgggtgacgagggcttcacctccagcctgggcattgacgacctgaacttcatcctcaaccacggggatgacgaagaaggctaagccgatggcggtgagtagagagtagtgagtagagattaattatttcaacttccggacattggtccgctcattctttccctactctctgatctctcatcattaatcgctataaaaaagccctgcaatttcatgcagggcttttttatttcaccatttaaggctgacagggtccgtatgataaagaatcccggcctcgtcacgcacaagaagagttaactggatgcgcgcagggaggcgcagcatctggaggccgttgaacgcaaatatctgcccctggcacaacaggggacgggaaccgaacagttcatccccttcaatcacctgcgtgccgtcttcatgggaacggacggtccactttttaccgatgatgcgcacggcgccttcccccgtattgcggatgctcacattgtagggcacgggaatgcgcccgtcgtcacggaccatccgctccagcttttcatcccgtgaatacaggctgcgcggcgtgagccgcacttccaggctggtcaggagggggagaaccatacgggaagccggggaggaattatgattccacgggagccagggccgccttcatcagctccagcgtcgtcttgcggatggcttccacgcccgccttggtgggcttggcgtccggagccagcgtcatctgctcctgcaaggtcgtcagaaggttcatgatttttgcaatgtcccggcgttccttcatttccggctccaccccgtccaggatgtaatggaagtattccggcacgtccggctgaaagatgaccttcgccttgtcctccgcaaacttgttatccagcgccgcggtagcggcatccagggcgcgtatccatcctcccaggccaatcaggttcgccatgtcggaatcccgcagggaggcaagctcctgctccacgtcggactgaatcagggccagattattcttgaaactgctcaaatccccgtcttccgcatttttcagcaggctggcggcatggcggttcacccgttccccggctccgatggccttcgcgtagctggagaggtccagcgcaatgggcttcacttcattcatcttgccgcactgcacgatcacaaagccgtccgccatcatgccgccaagctggagagccagggagcagcggtccatgggggggcgttcgggacgcgcgcgcagcgccacgttctccggaatttccggcagcccttccaggtcttcaaaaatcttgcggatggacggcgcggtaaattcgttgatgcccagctcctcattcatgtgggagtcgtccagcaggcgttccggaatggccggctggccctgcctgtcctgcttgccgggcggcggcgtctgcacatccagtacggcttcctccttctccggggcgttttccttcggggcggcaaacgccattccccccgtgacggatacagccgctgccagcacatacaatctcttcataacaacactcaaaaaggttaagcaaaacggaatatgtcttgactctcgccctatggtgtcttatacgggcgtcacgtcaaggaaatcccccgcgcctgacgcaaaaagataccaaacaccctttgcaaaccccgcatgtctttaaattacaattttatctggctcctgtgctatcttctggttctcgtcggcctggccggatacggctttcaccgcctgagcatcgtttacctgtactggaagaaccgcaacaacaagccccagcccaagtcccgcttccaggaactgcccgtcgttacggtccagctccccatgttcaatgagaagttcgtcgtggaccgccttctggaatccgtagccgccctggattatcctcaggacaagctggaaatccagattctggacgattccacggacgataccacggaacagtgctaccgcaaggtggaggaactgaaggcccgcggctttgacgccgtctgcatccaccgcacggaccgcacgggcttcaaggccggcgcgctggaagcggccaccaaggtggccaagggcgaattcctgctgattctggacgccgacttcgttccggaaccggaccttctgcaaaaaaccatccatttcttcacggatgaaggcgtgggcctcgtccagacccgctggggccacatcaaccgggaatacaaccttctcacccgcgtgcagggcatgtacctggacggccacttcgccatggagcagacggcgcgcaaccgctccgggcgtttcttcaccttcaacggcaccgccggcatgtggcgcaagtgcgtgatcggggatgcgggcggctggtcccatgacaccctgacggaagacatggacctttcctaccgcgtccagctcaagggctggcgcttcatttacctgaacgatgtcgtcaccccggcggaactccccgtggacatggacgggttcaagtcccagcagcaccgctggaccaagggctccatccaggtttgccagaaaatcctgctggacatctggcgttccaaggctcccctcaaggccaaggtggaggccaccacgcaccttacctgcaattattcctacctgctcctggccctgctctgcttcctggtgtaccccatctgcacccagcgcattccggaaaatgaaacggtcttcatgtggttcgtgaacgtggccctgttcttcatgaccagcgtggccgtctgcatcttctacatgagcgcccagatcgtggtgcgccccaaatcctggtggaaggagctgccctacctgccgcttctcctcacgctgagcgtgggcatggcggtcaacaacgccaaggccgttctggaagccatcttcggccatcagtccgccttcgtccgcacgcccaagtacggggtggaccagaaggaaaacaggcagcatgtctcccagctcaagcgcaacggatacagggccatcaagtccgtcgtcatccccgtcctggaaatcgcctgcggcaccttcttcctgaacctgatcatcatcatgatccgccagggccattacctttcccccatcctgatgattcccttcctgggattctactacacggggttctgctctctgggccgcatgatctccaacctgctgcccgccaaacaaactgccaaagccaagaactgacacctttcccatgcctgcgcctctctcgcaagcagtacgcctgattcaactcgccggcgccgccttcgcggtgttcggcgccttggtatcctgctcccgtccggactaccagcccaccgccatcgtcaaggatggcgccgtcgttagcgtcagggaccagaaaatggccgtcatgcgcaacggacacgtcgtaaaaacctaccccatcagcacttccaaattcggtctgggcgacaggaaggggagctgccgcactccgctgggcgcccaccgcatcgcctccaagatcggcaccggacagcccaagggcatggtgtttaaaagccgcaagcccaccggggaatgcgtggcccccaattctccgggccgcgaccccattgtcacccgcatcatgtggctggaagggctggaaggccgcaaccggaatgcccactcccgcctgatttacatccacggaacggcggaagaacgcaccatcggcacgcccgcttcctacggctgcgtgcggatgaaaagcaatgacgtgtatgaggccttcaacctgctccggaccggggatcccgtcgtgatcgaacgctgctccatagacgcttccctgaaagctctggcccaggcggaaaaaacgcaggattcctccctgctggtcatggcttccgcaccgtctctcatggagaatgccaacacggcttccatcatttcccaccgccgccgggcatcccgtcctcccgccgtagccctttcccgcaagcagaccgcggccgccgggaagaaagcctctccccacaagcggacggcagtccgcaagacagtgaagagctccaaagcctccgcccgttccgccagggggacccgttacacccttggctgaaccgaccttccccgccattcttccggcattcccgttcctccgcctcctgacatggctgtttgaacgcatggttgcctgcgtccgtcacatttgttaacgtagacttatggccatgatggaacatgaagatatcagcaatgacaacctggcgggccaccttctggtttccgccccctatctggacggcggcggcttttaccactccgtgatttttctgagccgggtggaggaggaattcgtcataggccacatcctgaaccatccggccggcatgaacgtgggagaagtggcgcgccatacggacattccggaatccctttaccccgttcccatcttcaagggaggccccgtggagcgcaaccagctcattttcgccgccttcgtccggacggaggacaaattgcgcgtccagttccatctacaggaggaacaggccctggaatacattgaggatccccacgccatcctgcgcgcctacgtgggccacagcgcctggacgccctcccagttgcgccgggagctgaacgaccgcgcctggtacgtctcccccaccgtgccggacatctgcctggagccggactcctccaaggtatgggccatggccatgcggcgcctctcccccctgcaccacatcatgagccacgcgcccgcacagccttccctgaattgaaccatccatcatgagcatccaacagaatctggaacacattctctcccgcatccgctccgcggaactccgtgccgggcgtccggcggggtccgcccgcctcgtcgccgtcagcaaaacctttcctgcggatgacgtgaaggcgtgctacgatgcgggccagcgcattttcggagaaaacagggttcaggaggccctgggaaaaatccccgctcttcctccggatacggaatggcacctcatcggccccctgcagcgcaacaaggtgcgcaaggccctggaacatttcacgctgatccacgccgtggactccctgcgcctggcgcagttcatggacgccgtagcgcaggagacgggcaaacgcccccgcatcctgctagaagtgaacgtaggggatgaagacagcaaattcggcttttccccggagactctgaaacgggaatggccggaactggccgcgctggaccaccttgaaatagccggcctcatgtgcatccctcccccggtggaaaatccggacgaagcgcgtccttatttccgccgcctccgggagctgaaggaaaccctggccggcaaggggggagccccgctgacggagctttccatgggcatgagccatgactttgaaacggctgtggaggagggcgccaccctcgtccgcgtgggcaccgccattttcggcggccgctcctatgctccggccccgtgattttagttggacagaaggaaaagcggcgtgtacgtttgttccggaataacggaacggcccggacggagccttgatttcaacaccccatgctgacaggaggaaaaaacgtgattccgcatgcggtgcgggacgtagcggatgccgccgcggcattttccgcccgcattggcccggaccgtcattttgactcccaggaaaacgtggaggaagccctggcggaatgctgctctccgcagaacgtcaccgtgatcggcatgacgggttccggcaagtcttccacgctggacgccctggccggagaacggttctgttcccgcgtttccagtgaagccacactggtccgctggcagtacaggccccaccccgcgccccacacccatgaatgggtgctggaccttttttacccgtcggacgccctgctgaaccttgagttctgggacaccatcggcctggagcaggaggacgccccccggaagctgaagcacatcgtccccaaatcggacgccattcttgtggtcatttccgccagggacggcaaccagccccctttatgggactacctccggacgctggaggaacggctccattcccgcatggtgctcgtcatcacccacgcggagctgctatcctttgaccagctccagtccctgaaagaggaattgcgctccacctcccgcgaacgcctgggcgtgcagcttcccctgtaccccgtcacgaccgccggggaacaggctggggaaggcgtggaagcgctgagaacatgcgtgcaggaggtgctgaaacgcagcccgctgacggacaagcgcgtggaacgcctgctgctggctacggaccgcctgctggaagaacagggaaaggtactcaatgaactgcaccgcctttccaagatggattccggcttcctgacctccattgaccgggagatagaccgcatccagctccagatggaggatgaaatgcccgcacggctcaaggcgtacgcccagtacgtacaggactgcgtgccgcggctggggaaaaaatcggcccggcagatggggcgcttcctttccatccggcgcacgatgatcctgcacaagcttcctcccgtcattgacgaatggttttatgagctggtcaagtccggcattgaggaacggcacgcgtattacaacaaggaattcctgaacatctgccagacgcactggaaccatgtgcgcccccgcgtgaaggaacagtgggactgcgacataggcgattttcccgccgcgcggctccaggcggatctggaggtgtacaaggagcgcctgggccgttccatttacatgcccctgaaggatttcggcatcaagccgtgcctcagcaagctgtttctggaccaggaggacgtgatgagaacggaaatcaagctgatgctcatcctggtgattctgggagccctgctggggtgcttcggagaacatgcggcggggtttgcctgcgtagccgcggccctggctgtctgggtgggcggcaacctgggactggcctggatgcagttccggctgtcgcgccagattgtagccgcggcggcggaaatgcacattgccgtggaatgcggcctgcggacgcccctgtatgaagccatggtcagcggcctttccgattaccgcaaactgtacgcggacatccgcggccaggtggccggcggcgtggaacatctccagcccctgctgaatgcccgctacgacctgttctataaactgaccgtgcagaaacaccggttccgcatctagcccctttccttttcgtccggagacgcggcttcctgttccctgccgcggaaacgcacccgctttccatcaagcatcactccgcgtccggcgtaatcaccatgtccacatgcctgtcatgggcttccatgggcaggtcgtccagaagctggcaggggaagcagactcccgccagggaaactcccgcagccggtcccgccagcagcgtatcataaaatccgccgccgtaccccagccgcttgccgtcccgcgtaaacgcggctcccggcagaacaatcaaatccatttctcccgcatgcagttccgggcaacccgggccgggttcgcgaatgtcccagcagcccgtcacaaactccccgtgatggcatacgcggtggaagctcagcgtccttccctcatgcaccagcgggaagtaccattcccggtccggcagcatgtccagcaggggcagcaaatccacttcccccggcctggcggcaaaaacagccacgcgccggaaattcttttcccgtaccagcgccgccacacggcggcaaatggaacgggacatggcttcccgggaggcggcgtccaatccgcctatcctttcacgtatcatgcggcgcacttcccgcttggaagccgccggaccgctcacggttccggattggggtgcttttccttccattccaacaggctctttaaaaatacgctttccaatgagttgcgcgggtgtccggcttccagccatgcggcgcggccgtcttcccgcaccagctccttcaactgttccagcagctccggggaggcgtgctccagcaggatttcctgcttgtcggaatcccgtgtcagctcgttcacggaaccctccgcaatgagcagccctttaaagatgacgcccacccggtcgcaaacctcctgaacctgttccagcaggtgggagcacaggaaaacggttaggccgcgcgccttcaggttctcaataatgttccggatgtcgcgggaaccgagggggtctacgccggcggtcggttcgtccagcaccagcaggcggggggactgaaccagggcctgcgccatgccgacgcgctggagcattcccttggaataaccgcccagccgcctgtccgccgcgtcggccagccccaccaggtccagcagttcacggactttctctttcagggatttgccgctcaggccgcacagcttgccgtaaaaggagacggtttccgcccccgtcaggaatttgtagaagtaggggttttccggcaggaagcccacctcctccttgctgtccggggacaggctggatttgccgaagatggcgcatgaaccctccgtgggcctcaccagccccagcagggccttcatcagggtggacttgccggagccgttcgggccaatgaggccgtatacctctccctgccggatgctcatgtctatcccccgcacggcatgcaccacgggcttgccaagacctgtcttgaaggtcttgtgcaggttgacgatttcagcggcggcaggctggtccataagaactcggtcaatgcttgatctgccccaggcggcgcagaagaatctggctcatgtcgattcccttggagaacaggtccaccgggaagttttcattgggggagtggatgcgcgcatccggcaggcacatgcccagcatcaaggcgtccgctcccagcacgcgcttcatttcctcaatgatcgggatgctgccgccctccctcaccagcacgggcttgcggccaaaggcctcttccagcgcctgctgggcagccaggccgaactcggaattcggatcgcacacgtaggcgtttccgccgtggccccgcttgaatcccaccgtgacccccttgggggcatcgctcttcacatgttcttccagcagcgtttcaatcttttccggctgctggccgggaaccaggcgacaggaaatcttggcaaaggcatggctgggaatgatcgtcttgcttccctctccctggtagccgcctccgatgccgttgatttccagcgtaggacgggcgaaaatgcattccgccccggtgaagcccgattccgtcaccacggtttccacgcccgtcagcttcgccagctcttcattgctcatgccgggcacggtggcccacatgctgcgctcccacgtggcgatgggttccacgccatcgtaaaaacctctcacggccacgcggccgtcctcgtcatggaaggaagtgattatttccgccagggccgcaatggggttggctaccgcgccgccgaacacgccggaatgaaggtccgcggaagggcccttcacgataatttccgccccggccaggccgcgcaggccataggaaaacgtcggtgtgtccggagcggccatgccggtatcggaaaccacaatcacgtcgcaggccagttcgtccctgtggtccttgatgaattgggaaagacttccgctgcccacttcctcctccccttccagcaggaagatcacgttcaccggaaggtggccgccgttctggcggagcaattcctccacgcccagaatatgggcgaacaactgccccttgttatccgtggcgccgcgggcgtaaatcttcccgtcccgcacttccggttcaaacgggtcggactcccacagctcaaccgggtccacgggctgcacgtcataatggccgtaaatcagcacggttggcttgccttcctcccgcgggctgcgggccatcacaatgggatggaggcgcgtcttgtgggccgcggcttccagccccatgccggacagcttgtccaccagccagtccgcgcagtcgctcacgtcctgggcgtgttccttctgggcggaaatgctggggaatctcaacaaggttgccaattgatccagtctgttcatggcgccatcagaccacgcctggggcttcaaatcaaccggtaaagtgtggcattccgcgccggaacgggccttttttcaaaaaaatgaggcttgcccgcgggtccgggaacaatatttgattgccctcgcgcgagatttgttcctttatataggattatgttcagcaaatccaaagtgaagaaagtggatttcgtcaccctgtccaaattttacggcaaatacaaggaagccctccaactggagctcatcaacagccccgccggcctcagccgccacatttgcgaacccgccctcaaccgccccgggctggcgatcgccggcttttactcctactttgccaacaagcgcatccaggtcttcggctccgcggagctggcctaccttcaaaaactgccggagggcatgcgcaaatcccgcatccagcgcatgttccggtgcgaggtcccgggcatcgtcttctcccgtgaccaggacccgccccaggaaatcgtggaactggcggacgaggccggcgtctgcgtctttcgcaccagcctggtgaccatgaaattcgtcaactccgccaccatcattctggaaaacgaattcgcggaaagcctcacccttcacggctgcatggtggacgtgcgcggcgtgggcgtcctcatccgcggcaagagcggcgtgggcaagagtgaaacggccctgggcctgattgaacgcggggcggccctggtggcggacgacatggtgtacgtgcgcaacgtgggcggagaactggtggccagcgcgccggagatgagccgcggtttcatggaagtgcgcgggctgggcatcgtcaacatcaccaccctcttcggcctcaaatccatccgccacaacaagcggctggacctcatcgtgaccctcattcccgccaaggaccaggaagcgctggacaggctggggctggaaagggagggcctggacgttctcggggaaaaagtgctccatgtgcagctctccgtagcccccggcagggacatcgcccgcctggtggaagtggccgccatggactaccatctcaaggacatgggcatcgacatggccggggagttcaaccgccgcctcatgtcaaacttccagccgcctgaaaaccaggactgacaaaaaactcttggaaaaaaacttcaattagtgtacttaccgttctagcaaccgttatcaccccttacttcaaattccatggttaccaaggaactcaccatcatcaacaaactcggcattcacgcgcgtccggctgctcaattcgtcaaactggccagtaaatttgatgcagacattgtcgtggagaaggatggcgaggaagttgatggaaagagtattctgggcttgatgatgctggcggtaggccacggctccaagatcaccatcacggcggaaggaaaggatgagcaggaagcgttgaacgcgctggaagacctgatttcccgcaagtttgaagaagattgaacactccggctcacggccatatgagaccgggccatcaagcccgcagatgattcaggaacccatttccacggaagaaacctggcttcagggcattcccgtttcccccggcatcgccctgggcaagatcaaaattcagatcagcggttccaaggaacccgtggcgtatgaaatttccccggaggaggtggatgccgaattggtgcgcttccaccaggcgctgcaaaccaccgcggatcagatccggacgctgcgtgagcgcatgatccagatatccggggaaaaggacgcctccatctttgacgcccacatccttcttcttcaggacaaggtcatcctccagcaggttcagacggagctgctcaagcgcctccagaacgtggagcacatcttttatgtggtcatgcagaactacatggaagtcctgcgccgcgtggacgatccctacctgcgcgccaagaccgcggacatggaggacgtcatgcagcgggtcatcaacaacctccgcagcacggaacccctggaagacgaggaagaagcggaggaagcccaggtgctggtggcctatgacctgaccccttccgacacggcggccatggacgccagcctgattcacggctttgccacggaaataggctcctccgtttcccacaccgccatcctcgcccgctccatgggcattcccgccgtcgttgggctggaccaggccctcctgcgggtggaaagccacgcccccgccatcctggacggctacaagggagtgctcatcctgaagcccacgcaggagacggtggagtactacaaccgcctccaggtggaaaaggaaaaggcttacaaggcgctggaagcgctgcgggacctgcctaccatcaccagggacggccgcaacatccgcctttccgtcaacgtggaattcccccatgaatactccggcatcaaggaggtgggggcggaaggcgtgggactcttccgcacggaattcttcctgctgggcaatccagccggcatgccggacgaggaggaacagacacgctactacaagaagctggcggaaggctgcgcgccccacggcgtcatcttccgcacgctggactccggcggcgacaagctgccgtgcgaacggctctgcacgccggaacctaatcccttcctgggctggcgcggcatccgcgtctccctcagccgtccggagctcttcaagcagcagctccgcgccattctccgcgcctgcgcggacacgcccggctgcggcatcatgttcccgatgatctccggctatacggaggtggtcaccgccaagcacatcctccaggaatgccgggaggaactggaaaagaaaaacgttccctacgcgcgggacctgaaggtgggcatcatgattgaagtgcccagcgccgccatcatgacggacgtgctcgcccgggaggtggacttcttctccgtaggcacgaacgacctcacgcagtacaccatcgccgtggacagggtcaacaaccgcgtcgccaacatgttccgccccacgcaccccgccgtggtgcgcatcatcggcatgacgatcaccgccggagaacgggaaaacgtccccacggccatctgcggggaaatggcgggggacatcaccctgcttcccctgctgatcgggctgggcgccacctccatgtccgtgggcgtgcatctggtccccatcatccggtacgccatccgcaacctggactacggccagtgccgggacatggcgcagaaggcgcttcaggcgcccaacagcaggaccatcgtgaacctgagcacggctctggcacggaaatcctatccggccctgtttgaataaggccttcccttccggcgcatgccgtaccggaaaaaacggctcttatccccggcaaactgccgcgggaacacgaatccttgacagaatagcccgtttcatgcgttatatgagtactggtctttttatcatgaaaactttcagcattgcattttctctcatcccgttcctgctgggaagcgccctgtccgcttccgcagcaccctcaaacgcgccccgcgcggcagcccagaagcgccccaacatcatccttttcctggtggacgacatgggctggcaggatacatccctgcccttctggagggaagcggacggcacgcccaagcccaccttcctgaacaagcgctaccgcacgcccaacatggaggccctgggcaagcagggcatggtcttcacgaacgcctatgcgcagcccatctgttcccccagccggtgcagcctcatctccggcatgaactccgcccggcaccgcgtcaccaactggacgctcctgcgggaccagaccacggatgccggccacaaggcgctcaaagctcctgcggactggagcatcaacggcgtgcagccgctgggcaccaaatcttccggcaccacccttctccccctgacggaagagaaaatccagtacaagatggaaaagccctttaccccggtgctggggctgcccgccctgctcaaaaaacagggctataccaccatccactgcgggaaggcccactttggctccaaaaatactccgggggccaatcccaaactcttcggctttgactacaacatcgccggcacggaaatcggcggcccggcggactaccggggctcccagaaatacggcacggggaacttccacgtccgcggcctggatgagaacaactattatgaaaacgacgtcttcctgacagaggccctgacgcaggaggtgctgaaacgcctggacgccatcaggaacaaccccaaggaggcggacaagcccttctacctgtacatgtcccattacgccatccacgcccccttcgacatgcgcggctatgacaagcggtttgcggaagactactccaacccgaacgacggccacaactggtccgacaacgaaaaacgctactccgccctgatccaggggatggacaagagcctgggcgacatccggcagtacctggaaaagaacaatctggataaaaacaccgtcatcatcttcatggcggacaacggcggcctcgccatcagcgggcgcatgggcaacaaggaatccaactacccgctgagcttcggcaagggctccaaccgggaaggcggcatccgggagccgatgatcgtttactggcccggagtcaccaagccggaaagcgtctgcaccactcccgtcatcattgaagacttcttcccgaccattctggaaatggcgggagccaaaaaaatccaggctccgcaggtcgtggatggcaaaagcttcgtcaccctgctgaagggcggcaaaatgaaccccaaccgccccctgctcttccatacgcccaacgtctggggggaggggaacggcaacaactcgctttactcccccagcacggccatgcgccagggggactggaagctgatttactggcaccccacccagaagttcgaactcttcaacatcaaggaagacatcagcgaggagcacaacctggcggaacggcatccggaccgcgtgaaagccatggcaaaaaccatgaccgccctgctcaaggaccgcaaggcccagatgcccacctacaagaaagacaaccccgccggagcccgggaaggctcccccgtgccgtggccggaccaggcggcggccaggctgtaaaggcatctccacccctccccggaaagccgcattattcccttttcttttaaggaaacagggagtatggtgcggctttcctgtttttattccctttctccattctctttacaatatcatgaaaaaccttctttccatcgaacagcttaccggagacgaaatcaaggacctgctcgcgctgggccacaagctcaaggcggaacgcggccatcacgaacgcctgcccctgaaaggccagacctgggcgcttattttctccaaatcctccacccgcacccgcgtttcctttgaagtgggcatcagcgaactgggcggacgccccatgttcctttccgtccatgacatccagctcgggcgcggagaacccatcaaggacacggcccgcgtgctgggccgcatgatccacggggccgccatccggacttacggccagcaggaagtggaggaattcgccggcttctccggcattcccaccatcaatgccctgacggacgaggaacacccctgccagattctggcggacctgctcactattgaggaaatttacggccccggctcctggaaggacatgaagatcgccttcgtgggggatggggacaacaacatgtcccgctcctggatgtgggcggccaagaggctgggcttcaccctcgccatcggcgccccgaccaactacctgcccctggaggacttccgcaggcacctggactgtgacaacgtcatctttaccacggaccccgtggaagccgtgaagggagcctccgtcatcaacacggacgtctggctctccatgggccaggaagcggaaggcctgtccaaggaaaaacacttctacccctaccaggtgaacagggagctgctggaacacgccgcccccaaccactccgccttccactgcctgcccgcctaccgcggcaaggaaatcacggaagacgtgctggaacacttcgcccccgtcatcttccgtgaagcggaaaacagggtccacgcccagaaagccgttctcgccacgctggcggacgccaaccgggcataaccggcctttcccaccaaatccgagccatgaactacgaagaacgcctgcaagacctgctggatgaactggacctgttccaggactggacggaacgctacgaatacatcatcagcctgggcaagaagcttccgaagctggacgaagcccacaagacggaggactccctcatcaagggctgccagtcccgcgtgtggctgtacacggagccggacaagggcgtgctgaagctctacgcggacagcgactccctcatcaccaagggcctcattgccgtcttcatccggctgctctccggcctccccccggaagaaatcctgaaagcggacatgtccaagctggacaggaccggcctgaaggaccatctggcgcccaccagggcgaacgccctcaactccatggccgcccagatcaagcaggccgccatgaacatggtggaacaccattgatttttccggtacgatgacccacggccttctcccgcatctcttccttctctccgcagcctgctgcgcgtgcctctcatgcagcagctcttccagggacatcactatccgcagcgtcccttccggggccagcctgcgcgtgaacggagactatgcggggcaggcacccgtcacgctctctctgaacaggcacaagcccgtgcacgtggcggcggacaagcccggcttcctttccacggaaaaaaccttttatccggagatgaccacgcagggggccatcctgtggggccgcaacaacgaaaagtcaaaagacttcaagacggacaccctgaccattcgcctgaaaaaggcggactccggagcgccgcccctgagggaactgcccgcacagtggtaacggcctcccggccatgcctctccccgggcacggctccattccttccctgacgcgcgcggcacgtgccgcgcgccccctttgggtcctctccgcgtccggccttgacacgccggtttttcgcggtaatggctatccttcctcctgccccaggtgccgggccatgacggcggaacccacccttttcaggaccagggccgtacgcggcagcaggtacagggaaagattcccgtcttcatccgtaaaatgcggcatggaatcgtcctgccttccaaagccgccgaagcgggcgccgtccgtatccagcacgaccctccattcccccttctggggagcgggcagcacgtaatccatgatcgccctgtctccggaccagttgaacacaaacagcaggccgccgcggtggaacgccatgacctggttgttttcgtcaatattcagagggaacggcggcggattgttcagcagccgtgcgtccagggccaggcggaccatggcctggtcaaaggcattcaggaacttgaacctgagggacagattatccaccagggaccactggcggcggcagtgctcgtaagaccagccgttgccttcacgcggaaaatcaatccattccggatgcccgaactcgttgcccatgaaattcagccagccttcccccccggtagccagcgtcaccaggcggatcatcttgtgcagcgccatgccgcggtcaacaacaaggctctgctggtccacggccatcttccagtacatctccgcatccatcaggcggaacgccagggtcttgtcccccaccagggcttggtcatggctctcgcagtaagccacgtgcggctcgccgtaacgcctgttggtcagcgtatgccacatgtcgcccatgctccattcctcgtccttcttctccttgagtagcttgatccagtaatcgggaatgcccatggccagccgatgggaaaagcccaggcccccttcatccaccgggcggcacagccccggcatgccggacatgtcctccgcaatcgcgacggcgcccggtcttacccgctggatcagcgtggaggccagctgcaaataagccacggcgtccaggtccacggacggcccgaagtacgcgcccaaatccccgaacggctcgtggccccggtggaaatacagcatggacgtcacgccgtcaaagcggaacccgtcaaagcggaactcctccagccaccagcggacattggacagcaggaactcaatcacctcgtcccgcccatagtcaaagcagcaggaatcccagtccggatgatggccgcgctccccgggcaggaaatacatgccgccggaaccgtcaaaattattcagaccttccgcctcattcttcacggcatgggaatgcaccacgtccagcagcacggcgatgttcaggccgtgcgcctggtcaatcaggtacttcagatcctccggcgtgccgaaacgggaggaaggagcgaaaaaggaggaaacgtgatagccgaaggagccataatagggatgctcctggacggccatcaactggacggtattgtagcccagtttggaaatgcgggggagaacttcatccgcaaactcccggtacgtatgcacgcgctgctcttcccctcccatgcccacatgcgcctcgtaaacgaacggcacctctatccgggaagggtcaaagccgttgttcctccattcataggggtgctccggcatccatatctccccggcaaaatcataagtggcggggtcctgcacggccctggtgatccacgcgggaatacggtccttccccgtgccgtccgcgccgatcacgtgcaccttcaccttctgcccgtgggccagcgcgtcaggcggcagcgttatctcccacacgccgcgctcattccgcaccagcgggtggctctcccggtcccagccgttgaaatcccccgccaggaacagtccgcgggcggcgggcgcccattcccggtacgtccacgcccccgtctccggatcacggttaaagccgtaatagcggtacccctgcgcatacccctccagagagccggaacgctggctgatccttttcattttcaggtcaaacaaacgctggcggtcgcgtatctggcgggaatacggctggagccagccgtccgccatcaccaaaccgggaatcgggggtcttctcattatccgatgatactccgccccaatcagcagggtcaaggagaaagacgttcttccggccctccccgcgcatgtcctgcgcccgcagcgtcaggaacacctcctttccggagaatacgccgcggcggaacgccggaaccacgcacctcctcccatgcgcccctagtcacattccggcaaacgcccggtatcccgcatgtacagcatcctgagcagcacttccttggaaatccggttcaggtcaaaatgcacaggcggagaatcaggaaggacaccccagtctccatattgcccgtataaaaccatttcaggcacccggggcccgggaaaagtctttccttcaaacaggacgctggacaggggaaacatccattcatgacggaaggaatggcggcacggtccggcaaagggaatttcaaaacccaggcagacgtttccttcctccacaggatccttcccttccatcaccaactcatccctgatcttcattttatcctcataagaacacagcgtttggtaacggcgcgacgtgttagcttcataatcaatcagcttagaagccttgtaattacgcagcagccattcccgctcctccggatcatccggagaccaggagccgggagcaacatcgtacgggaaaatgtccacattgcacaaggtgcccggcagcccaatctggataaacggctccaggctgacggaaaagccgcgggaaccaaacaacccggcagcgcccgccctcagtcgttcatagtcgcttcgcagcatggaaatatccagatcatcatcccagggaataaaccccttatgcctgaccgcccccagaagggtcccgaaatccagccagtactggtagccgttttcttcaagaatactgcccacttcctttaaaaaaaatgccatggcctgctgcacaaccctcagcacgccggacgccgccggaacttcctccgcccggacggtggacttcaccagctttctcatctgtgcatgctcattttccttccccaccctgaaccgggcgcagggaatgccgaacaacctgatggtacgcttctttctatccgtgattgaagaaagcaccgtcaggccgcagcagcgtacttccgtcacccacagatgtttatttttcattagctttccggttcttccggcagtgatgaacgaaggtaatctcatggtgggcaaatctaggcagtgaatacgggaaaataccaatctttccgtaagcgaacaacggcggagttcctgaaacggaccttatccaccggataccataagtcaatgaaaaacaatgcggctttttaatgaaaaacaaccatttccgtatattaaaaccattttctccaagatgcagcttttgaaaaaaatcctcaattctcttttccctaacttccatagcatgcggattgatcatccgttaaacggatcgccatctccatttgaagttaaatcaatgaaaagcgggaaaatagggaaggaaaatgaattacgtacttttcctttttcaccaatgtactttccattaacatgtttttgcagaaatttttactttgacggcggatgatcaatccgttaaacattgttcttggttctttttaagttctgaagacaaattagagtatttatgcaggcgatcattttagcggccggaatgggaaaaagactggggcatctcacccaggacaacaccaaatgcatgattcaagtgaacggggtaacgctgattgagcgaatgctgaggcaactggacaacctttccccttccctggagaaaatcgtcgtcgtcacgggatacaagggagcaaaacttaaatccttcatctctcttctggacatttccacgcccgtggaatacgtggacaatcccctttatgccgccaccaataacatttattccctttacctggccaaggagcacctgcttcaggacgatacgctgctctttgaatccgacctgatttttgaagactccgtcattgacgccctgctccaccacccctaccccagcctggccctcgtcgccaaatttgaaagctggatggacggcaccgtcgtcacgctggatgaagacgacaacatcaagcaattcattcccggcagcaaattctcctataagaaaaaaacggaatacttcaagaccgtcaacatttacaaattcaacagggatttctcccgtacccactacgtccccttcctcaccgcttacagcaaggccctgggcaacaacgaatattacgagcaggtgctgcgggtcatcgccctgctggacaaaccggaaatcaaggccctgcgtctcggcagcgaagcatggtatgaaatagacgacatccaggatctggacatagcggcttccatgttcacaccagaccgggaggaacacctgcgcctgatggagtcccggtacggcggctactggcgctacccccgcatcagggatttctgctacctggtcaatccatacttccccaacaagcgcctcatgtccgaactcaaggcgaactttgagcacctggtgcgggaatacccgtccggcatgagggtcaacagcctgctggccgcaaaatacttcggcgtcagccaggaatacatctgcatcggcaatggcgcggcggaactcatcaaggcgctcatgtcccgcatggaagggaaaatgggcgtcgtctaccccacctttgaggaatatcccaaccgggcggccccggatatggtggtgcccttccatcccgcttcctggaatttcagctacacggcggacgacctgatggaattcttctccggcaaggacatcagcaccctgctccttgtcaatccgggcaatccttccggcttcttcctcccgagggccgacgtgctgcgcctctgcctgtggacgaaggagcgcggcattcgcctgatcgtggatgaatcctttgtggatttctctgaaggcatgccggacaacacgttgctccgggacaccctccttgaggagtacccccatttggcggtggttaaaagcatttcaaagtcctacggcgttccaggcctgcgcctgggggttctggcctctgcagacaaaaagctgattgcatggataaaaaaggacgtttccatctggaacattaattccattgccgaattttacatgcagatcttcgggaaatatgaacaatcctacgtgcgcgcatgccgccggttcatggaggaaagggaccgcttcatgcaggaactctcccgcgttcccttcctgaacgtcctcccctcccaggccaactacttcatgtgcgaggtaatgccgcccatgaaagcccgtaccctcacgggcctcctgttgaaaaaccactccatcctgatcaaggattgcagccggaaaaagggctttgagggtagggaattcatccgcatcgccgtcaggaacaaggcagataacgacgccctggtacgcgccatgcacgcggaagccgcttcggaaccgctttccatctgaccacgctggcggaaacctcccttttttcatccttctccattactgctttttcatgaacgctacttctgcgcccatcataggcatctgcggcggcggcaacttggcccatgccatggccgggtggctgggagcccgtggcctgcgcgtcaatatcctgacccggaagcccgaacaatggaataaaaccatctccgcctcctttccggacggaaccgcgctccgggcccccctgggccgaatcggcaatcatccggaaatactggaggaatgcagccttgtgctggtggcggtcccccgtttcggcatccgggaaatatgcctgcgcatcaagccctttctgcgccgtgatcaggggctcgccatcgtgccgggcactccggacgtcatggacatggcggaagacgcctcatggacttcctccgtcagcctgatgggaatatacaaggttcccctgatctgccgtacgcttgaatatggccattccgtctctattctcggcagccgccccctcaacaggatatgggttgcccccgggaacgacgccggccattggtccgcattgctggaaactctgtttgatactccgctggaactcctttcctccccatggcctttcctgctgaacaattccaatcctcttctgcacccctcccgctgcatgagcctgtttcgccattacagggaaggaaccttctacgacaggcaatttctgttctatgaagaatggacggaggaagccagcgaactgtacatccgagcagatcaggaacttctggctctttgttcccgctgtcccggcatggagatcggcagggacatcattcctgttctgaactactatgaatcccggaatgccgcggaactaaccgggaaaatccgttccatctcggcgttccgtggagtcaaggcacccatggtcctccgggaacagggctgggcgccggacttcgcctcccgctactttacggaagacgttcccctgggcaccgggccgatttgccgtcttgcggaaaaactgggcgttccgtcgcccacgctccattcctttgtggaatggaacacttccatgcgggacaggttttctccgttgcaggaaaaatcataaaacggctgacgacaacgcagttcaagacaggcctttcataccggacagctccccggaaagcaccggctcattccgtcaggcgggttcaacggtccgggaacggcatttttcctgttcagttgatctcttcaacatcgctgccttcgcggaaccggcagatcacgtcagccatgaacagggaatcatcccgggacatgagggaaaactcatgacggcagccgtgaatcaggcgcaaaaacgcggccagctcatagcgaaggccgtcgccctcaaacctgataaaatatttcctgttctgccgggagtcttcaaaacgcacctcaaacatctccgtcttccaccacggggagggcacgtaaatatagccgcgcgttcccgtgacgcacaggtccccctcccgcttggctccgatggcgaccgtagcggaggctgccgcattgggataaaggaaatccgcccgcgtaaaaaggtccacgcccgtttccggcttcctgcaagtcgtgaagcggatgcggcggctttccgtccccagcagctttccgatgacgaaaacgggataagcccccagctccgtccacgcccccccggcctgcatgggatcgaactccctgcttgaatcatcctcaatcaatttggtgaacgcggcgtccaccgccttgatggaaccgataactccgctttccgccacgcctatcaactgctggaaagccgggaaaaaggccgttttcagcgcttccagtaaaacgcatcccctctccgcggccagcaggaacagctcttccacctcttcccgggaaagggcaagcggcttttcgcacagcacatgctttcctttcaggagggctcttttgaccagttcataatgcagatgatgcggaacggccacgtaaacggcatggaccttgtccaggaaccgttcatactccgtgtaatattccagcagttcatacgattccgcaaaccggcgcaccttctcctcgtcgcgtccgtaaacggccgttatttcaatgccgctgacgtacttggactcctggagaaaacggcccgctatgcgcccgtgaccggcaattcccatgtggacaatgaaattccgggcggaacggaggtcggtcgaagaaacgcccttcgtgcgctccaggtaaaccacctcgcaatgttcgcgcagataatcgaacttgcccgcccagtcggaaccgatcacgaaaatatccgccccatacttctggatgtcgtgcagcttctgcccttccagctcctccgtgataataaggtccgccaatccggtcttccggacattttccacgcgttcctccaggctttccagcacattcagcttgccccggctctggtcgtagctgtccgtggtcacgccgacgatgaggcggtcccccagcgcccgtgctcttctcagaagattgacgtgccccgtatgaagcaggtcgaaagtgccgtaggtgataaccgttttcatgactgggatatgtcaatctgctttccgtagacgtcaatgaaacggttcaccgccgtctcaaaggggacatgttccatcatgtgctttacggaagggtgcttgaactggatgcggtccggataggacaggtaatcgccataaaaaaattgcaggtactggcgcgcatggttgggcacggagaatttcatcccctcaaactccatggatcccaggggaaagaacgtctcatagggcagatgagtgtttttcgtaaatgtgatggccggggaaaggaaaattccgggggtgtcctcctccgccgccgggtccttgccttccagaatctcccggcggattttctgctggatctggtcatcggtcatgttcatccggccatccaccagaaccacgtcttttttgaacgcagtaagccgcctgtccaggctgccgtgctgttccggggacacaaggctttccgaataaaaatgataagggtatacgtcaatgttgagaggagtgccctcataccctatttgcagaaaggcatgccttttccaggtaaatccctcctcccgcggaaagagggagggcagcagttcaagaaggcggtcgtactccggcctcatcatgcttgcgtccagatcatcgtcccacggaataaagcccctgtgccgcaccgcgcccagcaacgttccgtaatccagccagtaccggaggccgttttcccggcacttccgcgcaaaaagagccagcaaaacggtattgccgtcctgaagcagcctcagtttgcccgtagccggaggaacctgggaaacgggatggttgtaaatgagaagattgcggatatcttccagctttgacgccaaagattcgtttcttcttctcctgaaaccattcataaaccgattgatgattttccgcccataataagggagcttacagagaaccatatattttatatggtttaattccatcatattcaatcagttttaaaaaattcaaaccatccgccgaaatcgaacggcctttaatcattgaagaggaatcagtataatgcaacctttcagctatgcaacgtttattatattgattttcatcaataaaaagcttctttcactctggctagaagcttgaaaatacaacttttacctgaaaagaaaaaaagagggaagctttcctgaaattcttttttccttttttctggaacgcattaaaaaattactggagcaaccgctccgtgaaaaataacaggccgcataaacaaagacactccgccagccgggaaaaaccatgcgctgccggtcagctacacagccctaaccaggcaaactttccatagcaaatgccgctacttcagcacggggttatttacagcttgtccagggcggaacggccgtaagccgtgttgggatacctgtccgcggcttcctcccagtatttccgggccttgtccggattgttgagctgggaatcgtaaatcactcctatcttgtacaggaacagggcccggtcctccttgcgccatcttctggattccaggccttcctgaaggacttcaacggaatccgcataccggcgcatatcgttcagcaggctggattccatgagccaggaacgcaccagccccgaattttccttccggtagcgttccagcagttccagggctccctgcggatccccggaattcagcatgcgccgggcggcgtccaccagcacttcctcatccgtggtgatgttggaggaatacagcgtcttggtcaccagatcgcccatcacgggcagcaggtacttgaccacgagccacacttcaaaggcaatcaccggaatcaggacgaccagggattgcagcggggaaaggggaatggcctgcgccaggaacgcaaagaggcccaggggaagcagcaccagcagcagccgtataaacgtgcgccgggccagcagcagaatcattttcaacatggcgggattgttcaagggagttagaggccgtccgggcggctccggagaaaaaggaacgcctccgcggccccgcccggaggaaagggccgcggaggcttccgtttaaaagcggtaaacggcttccacgcccacgcggatgcggaagtcctcaatcgtgctcatgccggtgtagcggcggatttcggaacgggtgtttccggcccagtccagctggatgaagggaatgacgcggaacccgcggctggcatccacgcccgttacgcgcacgggagccgccagcttgatgttcacctggtcaaatccggccacgccggagccccagtagctggaagaatagccggttccggcgctcaattccaggtccaccttctcatgaatcaggccgctccagcgcttgcccgcgttcaggtcgatacgccagccaatcatgccgtaaaagccgtactgcacgtccagggagccaaaatagccgtggcccggatcgtcatacgccaggcctgccgtcacggactgggccacggaatggggggccttccccatgtacttgctcaaatagcccggcaggccgccgtaattgaattcgtaccccccccggaaagacaggttggggaacagctccttgacggccttccagttggcgtcaaaggcatccttgtcgctcagcaggccgtcgcagaaggccatgtattccgcgccgatttcctgcttccagtcccgggccaggttgagattcagctcaccgccgatgttgaacacgccgctgcggttcagcagggaggatgccaccacgtccttgtaggcataccgggaatcataaccgatgtgggccgcgccgctgaccgtatcattgtaggaacttgcgggacgggggtcataaccgtatccgtcataggcgccggcggaaaccgcggccagggctgaggccgccatgaacagggctgttgctttcatagtaagcttatcttaatcatttcaaccccgccaacgcaagcagaatcccggaacggcacggagaaacggacctcggcggcaacagcggaaaaatcccttgaaaaaagacagggtctttcttgtaaagaatccctttcctcctatgatggggcagtgatggactggaacgctgatttgtacgaaaacaagcatgattttgtcgcggaatatggcagggacttgctctcccacgtgccggaaaaccccggccaggccattctggacctgggctgcggaaccggcacgctgacgcacgccctgctggaaaaatcgacctccgtcgtcgggctggacgcctccccggaaatgattggaaaggcacggcagctttatcccggcatggacttccgcgtgctggacgcctgcctcatgccctggaacaactggtttgacgtcattttttccaatgccgccttccattggataccggaccacggggctcttttgaaagccgtctcccgcgccttgaaaccgcagggaaaactgatctgcgaatttggggcccaccgcaacatcctccgcatcagggaggccttccggcccagcctggagcggatgaacctcccgtacaagacacgtttttacttccccaccgtggaagaataccgcagcatgctggaacagtcgggactgcgcccggaagtagtgatggactttgaccgccccacgccgctgaaagacgggccggacggcttgcgcaactgggcgcgccagttcttctgggcggacctgaagtgcctccacgaaaaacggcgcgtccggattttcgaggaaatggaaaaggccctgcgggacgaactgtgggacggcacccaatgggtggcggactaccggcgcatccgggtgatcgcttccaaataaaccgaaggcctccacagggggaaaggcgcgcgggcgtgccggatacgctgataatgcttgagcctccaacgggcattttgtacaaaagccgccaatgagtacgttcactccttttgaagaaaagatggagtccgccggcgttccggccgcagccgtcaaagctttctcccgctgttacgaagctctcgtctccaaccactccggcatgattccggaaacggacatcctgcccgccgaccaggtggaggactggcagggcatcacggcctccacccccgcggcggacaaggacctgatctcccagtgcgtgtgcatcaagctcaacggcggcctcggcacgagcatgggcctccagaaggcgaaaagcctgctgaaggtaaagggtgaggatacgttcctggacttgatcgtccggcaggtgaagcacctgcgctccatctccggcacgcccgtgcgccttctgctgatgaactccttctccaccagcgcggatacgctggcctacctggagaaatacgcgtctgacggctttgcggaccccgcccaggtggagctgatgcagaaccgcgttcccaaaatcctggtggacgggctcgccccggccagttgcccggaacagccggaactggaatggtgcccgcccggccacggtgacctgtacccggccctgctgggttccggctggctggaccgcctgctggcggacggcgtcaaatacgccttcgtctccaactctgacaatctgggcgcacagcttgacatgaacttcctgcgctggtttgcggaaagcggcgcccccttcgtcatggaagtcacccgccgcacggaggcggacaagaaaggcggccacctggccgtcaggaaggcggacggccacttgatcctgcgggaagttgcccagtgcccggatgcggacattcccgaattccagaacatctccaagcaccgctatttcaataccaacacgctctggatacgcctggacgccctcaagaaaatcctggacgccaacggcggcgtgctccctctgcccatgatccggaacagcaagacgctcaacccccgcgacccggaatccgccccggtgtaccagctggaaacggccatgggcgcgggcatcgagtgcttccccggcgcaagggccgtcaacgttccgcgttcccggttcttccccgtcaagaccacgtccgacctgctcctgctgcgttcggacgccatcgccgtggatgaagacggcaaggtggccctggctccggaacgggaaggaaaaactcccgttgtggacctggactccaagctgtacaagctggtggactccctggacagcctgggcctgccttccctgatcgggctggacaagctgaccctgcgcggccgcttccacttccaggacggagccgttctccagggcacgctgctgatggaaaacgattccgaagaaacgaaggaaatcctcccgggcgtttatgccggagcctgaactccattcttccgcctccgccccccgcccggtcaaagccgggctgggcgtggaggacatccggcacattcccgcccgggaaagggagctgcgcttcacccgcaaccgagcgggctccgtcctgctggcggcgggattcctgctgatcgccatcgccgccttcctccagctcacgggttacgatacgatcaccccgtacctgcccgcccccctgtgggccatgcaggctgcggcgcttgttcccgccgtcctctgcctgattgcggggagccgctgcctgaagcacgcggccgtcatcgtcaccccggtgggcgtggaaatcctgcccttcctgcgggcgcgccgcgccatgcaatggtgcttttggcagcagatacgttctgcggaccggaaaggcggacgcctgaacctccgcctgacggacggctcaaccgtcgcggtcagcctgcgctccatgacagccgccagccgggaaatgctggtccatgcggtccggcagcgcgtcaacaccctgcaatgctccggttatggtaaggcctgaaaaactggccgctctccaggagcggatggaagccctgggcatccgtgaacaggatctggaggaaagctttgtccgcggaagcgggcgcggcggccagaaggtgaataaaaccaacaactgcgtttatctcaagcacatccccacgggaatcgccgtcaaatgccacgtggacaggtcccgcgagctcaaccgctttctggcgcgcagggaactgtgcgacgcggtggaacaaatgcaaacgggccgatgcgccgcgagagcccgcgtcatccagcgcatgcgccggcagaaggaccgtagaagacgcaggcgttccagtcctccggctccctctccggacaacgaataacggatccaaaagccgctaggaacgcgggaaaacttcccggtacttctccttcagcatggcgaatacattgtgggggacatagcggcttacctggctttcccagccttccgggccaatcagccccttgatcatgctggaggacagttccgccgtatcccgcggaggcatcaagaacaccgtgcagaccttgggagccatgtccgcattaatatggcgcatcacgcgttcatattcataatcctgcgtggaacggatgccgcgcagcatgaacgtggccccgtgttcgttggcaaaatccaccagaaagcggttgtggaactcggcaatgcgcacgtccggcatgtcggaaagcgccacccgcagcatggtcatgcgttcctcatgggaaaacgtgtagtgcttgtccggattgtcgcctatggccacaatcagctcatcaaacatcctcgccccctgcttgatcatccataagtgaccattggtcagagggtcaaaactaccggcatacacggcgatgcgcttcattcgtgccatgctatacgccctcctgcggaaaatacaatccttttccatgcggcggacccgccctctccattcaggcccgctcttttccggacatccctgcttgacactcctgcaataacggctaaacattaacggacagcgcctcactccccgcgtgcgtgcggctgttccgcaactatccgacctttctcccatgacagaaccttcctcttcctttccggagcgtccatcccttccgccttcctgccccacctccgtccgcagagatccgcagtccctgctttccccttcctggtggaggcatgggcacatcccgctgcttgtcctgattgccagcggctttgccgcggatttcatgttcggtacattggagggcctgggcatcggcactgcgctgggccttctgctgtacacggcggcctttctggcactgagaacggacctcagccggaaggagcaggtgttcctcgtcttcatggccgtgctgaacgctgctgcggcaggcgccaacctgacttcctttacccagttcaatctgctcatcggcctggggcttcccgtggtgataacgttcctgccgcggaaagaggggaacagctttgaccctgccaaacggtacgtcacctggtggggctataaatttttccgggtgacccaggcaaaagaggcggccgcaaacgtcctggggaaaattccgcttgcaggcagcgtcgccatcggagtcattctgttcctggtcttcctgtccatctttgcggacgggaaccctgtggtcgccgccgtcagaacagccatgaacaaatggttctggagctattgctcctggctggttccggatatgggaacggtagcggacatcctcctgtggtgcctgggagccctggcattcggcattgcagccatgccgcgctcccgctcttccttcccggaacaacaccccgtgcgtccgggctgcccctggctcccgcacctccccgccgtttccctgctgttcatcaacctggcctttctggtcaacaacggcacggacgtggcgtttttatggcgggggagcgttcctgacggcatctcccagaccgcctatctgcacgacggggcggactccatcatgctggcggcctttctttccgccctggtgctgctggtcctgttccgtccggaaggctccgtgcgggcgtcaaaaacgggaatcgtcctgggcttcatcctggcggcgcagacgggactgctcgccgccagcgtgggcatgaggctgtatttccagataaaagatttcggcttctctcccaaccgcgtcacggccggcatctatttgctgatgggagcctgcttcctgtaccttctcttccgctacatggccggccatggaaactggctgcgttatggaaaactctgcggcgccatagcccttgttttcctggccctgaccgggctccgcagtccgtcccaactgagcggcgacctgaacctgatgacgatggacagacagtcggactggtatttcagcgatggagacctgccgcgctttgaactccgggacaacatccccttcgccatggccgtctaccgccggctgggaggggatacggaagccggagccaacgtttacgccatgacccgggaagccctccatgccgaaagccgcatttggaactggcgttcccgcaacctgcggaaatggagacgggaccggcagaggatgcagttccggcagcttcccgaacccacggcacaagccacctacggcacggatgcgtggcgtccttcctcccggcccaccggaatgaggccgaactgacggaggggccggtccctgcggcgcggggaagattttcatctccccggcttgtcaaggagccgtattttttgcatcatgcttctccgttatgcagaaacgacgcgtcgtcatcctgggctccaccggttccatcggaaccagcgccctgaaagtcgcccgggacattccggacagaatggaaatcgtggggctggccgccggaaccagcgtggaggccctggcccgccaggcgtgcgaattcaacgtccgcaacgtatgcatttttgacccgtccggggcggacaagctggcgcgcgcccttcccggcgcccaggtggaaacgggcgaggaaggcctgtgccgcctggcgcagcttccggaggcggacatggtgctgatctccatcgtggggactgccggcctcaagcccgcactggccgccattgaagcaggcaaggacctcgccatcgccagcaaggaaattctggtcatggccggccagattgtcatggaaaaggcgcgccaagcaggtgtgcaggtgcttccggtggacagcgaacataacgccatcttccagtgcctgaacggcagccacggagggccggatgccgtctcccgcctgattctgacggcgtccggcggccccttccgcacctggaagaaggaagacctggagcacgtcacgctggaacaggccctcaggcaccccacctggagcatgggccggaaaatcaccatagactccgccaccctgttcaacaaggggctggaaatgattgaggcccgctggctgtttgatgttcccatggaaaaggtggacgtcatcgttcacccgcagagcatcgtgcattccatggtggaataccgggacggcacggtgctggcccagatgagcagctcggacatgtgcttccccatccagtacgccgtcacgtggccggaccgcgttcccaactccctcaggcagctcaactttgcggagataggccagctggtgttcgaggcgccccgtccggacgccttccccgccctggacatggcgcgcagggccggcgccagcagcagcaccctggccgccgtctacaacgcctccaatgaagtggcggtggacgccttcattcagggaaaactcaccttccccggcatctggaaactggtggaagccgtcatgaacgaccacaccccggcagatccccgcggagagctggcccccatcctggaagcggaccagtgggccaggcggcgcgcggcggaactgattccttccctttcccgcccttcctgacgccatgaccgcccggactcccgccggaggcgccccccgggcggcgcgcatcaccatcctggacatcctccgggcgctggccctgctgggcatcgtcatcgtccacgcgcacgaccacttcaacctgtacctccccatgcccccggcggagggatggcaggccgcggccaacagcgcggcggactgggcctacgaacaccttttcgtcagcaaatccttccttctcttctccttcctgttcggcctcagcttcttcatccagctggacaggcaggaacagaaaggcgtcgacttccggaagcgcttcatgtggcggctggcgctcctgttcctgcttgggctggcgcacacccttttttatgacggggacatcctcaccatcttcggcgtgctgggttttgccctggtggccctgtacaaacgcggcacgcctcttctcgtcatcctctgcctgctgtgcctgatgcagcccgtcgccttcatggacacgctgtcccgcgccggactggcggacctgtggccgcattcctccggctggttccacccggcctccccggcggcaggcccttcgcgtcaattcctgtacgcccacggcagctggggggaagcggccctgtggaacctgacgcagggccaggcgggcaaatggcagttcttcctgctcagcggccgcatctggcagacgctgggtctcttcatcctgggcatgctggcggggagatggcaggtctttgtggacgctccgaacaagcgccgcctgtttctgcggatgcttggaatctccggaaccctgtttctggctctcctggccgcgcgcctgtacctcccctcccggctggactccgcgctgggagcggacgtggggcacctcctgcatcaatgggaaaacctagcctataccgcggccttcgtctccgccgccgtcctgctgttcacccatcccggccttcccctgccatccaggctgctcagcagcgccggaaaatgcacgctgacgtgctacgtctcccaaacgctggtattcacgttcctgttcttcgggtgggggctgggactggcgcagggcatgggaccgtgggcttgcctgtgcgccgccgttgccgtcttcctgcttcaagcctgggcctgccgcctctggctgagccgcttcctgtacggccccctggaatggctgtggcgcaccgccaccatgtgccgcatgcagccgttccgcaagcgcatgccataggaagggcggctcttcttcctccctgcgtctgttaaagcccggtttccccggaagaagggggaataaagcgcatggcctcctgcgtccggtccgcgataaagccgttcctttcgtaaaaaggcactccttcgcggtaggaggtgagcaccacgttcaaatacccggcatagcgctttttgcacagctccagcaggcgggagccgacgccgcacccctggtacagcggatgcaccagcaggtaatggacatacgccgtcatggttccgtcatccatggcggcgatcagtcccgccagcctgccgccgtcccaggcggaaaacacggtcccgtaatggagcaatgcttccgccaggcgttccggatgccgcccggattcccattggacggaaaggaacaattcctccagcgccgccggggaaaattctttggtgtcagtgtaggaaagaaccatggaaaaaggcatttgtccgtaaaaaaggctttccgccctgcagggcggaaagcctgaaaaaagagggaaaagcgcttcactcgtcgtcttccgcgtcaaaggcggaatcttccgaatcaaagtcctcatccaggtgggcggtgaatttcttcacgcgctgctggacgggcagcggggagagcaccatgtgcatggtgttgccggccaggcggggagcctggtccacctgcgccatggtcttcaagtccgcaatgaccttgttgaacatgtcatagccaagttcctggtgggcgttctcacggccgcggaagcggagctggaaacggaccttgtggccgtggtccaggaagctttccgcacgggccagcttcacgttgtagtcgttcgtgtccgtcccgatgcggagcttgacttccttaagcttgatcgtgcggctcttgttgtttttctggagcttggactgctggtacttgtaccgtccatagtccaccacgcggcacacgggcggatcggcattgcccgccacttccaccaggtccaggcccagggccttggccttttccagcgcgtcgcgcgtattcatgacgccgagctggtcgccgttggcagtcaccacgcgcacgcggggggcgcggatgcgttcattcacacgggtttgatcaccgcgctcacggcggcgattaccatcattattcttcgttggcttgattggcacgtccggatactactaaactaaataaaataacttggcaactcaaatcatgggggaaatatgacgctccgcaatttccctgaccacaacgtccgcaaactgttcaaagggcatcgcccccaggtctcccttgtcccggtggcggacggaaacggtgccttcctccgcctcacgctggccgagcaccagcatgtagggaacgcggtccaggcgggcgttgcggatcttcgcgccgatcttgtccggagtttcatccaccgtcacgcgcactcccctggcggccagggcggcgcggtgcgcggcggccacgtccatcaccttgtcggagatggggagcacgcgcacctgttccggtgaaagccaggtggggaatttcccttcaaagtgctcaatcagcaggcccgtgaagcgctccatggagccgaagggcgcgcggtgcaccatcacggggcggtgcggcttgttgtccgctccggtgtaatgtaggtcaaagcgttccggcaggttgtagtccacctgcacggtgcccagctgccattcgcgcccgatggcgtcgcgcacgatgaagtctatcttggggccgtaaaaggcggcttccccggcttcctcgctatagtccgcgcccagccattccgcggcttcccgcagggcctgttccgccttgtcccagttttccggagagcccacgtatttgtcgctttccgggtcgcgcatggaaaggcgcacgcggtagtccgtcatgcccagggtgccgaagatggttttcacaatgcccaggcactggcggatttccccggcaagctggtcaggcgtgcagaaaatgtgggcgtcgtcctgcgtaaagccgcgcacgcgcgtcatgccgcccagctcaccgctctgttcccagcggtacacagtgccgaactccgccagccgcacgggcaggtcccggtaggaatgggcgtcattcgcgtaaatcttgatgtggtgcgggcagttcatcggcttgagcatgtagccctcaatggtgccgtcagccagcccgttgaacaattccgcgcaggaagctccttcctggctcagcttttccatggcgtcccgttccgggatgggcgcgtactggctttcctggtaatacgggaagtggccggacgtgcggtacaggtccagcttgccgatgttgggggtgtacacctgggaatagcccagcttgtccagctcctgcgtgatgaaatcctgaagggagcggcggatgagggctcccttgggcttccagagaatcaggccctggcccacggcctcgtcaatgcagaagagacccagttcacggcccagcttgcggtggtcgcggcggcgcgcttcctccagccgttccaggtgctcgtcaagctgggtgcggttcgggaagcaggtgccgtaaatgcgctggagcatgggacggttcttgtctcccttgtagaaggcgctcgccacgctcatgattttgaacgccttgcagttccccgtgcggcccacgtgcgggccggcgcacaggtccgtaaaatctccgttgcggaacagggaaatctcctcgtcttccggaatgtcgttcagcaggtcgatcttgaagcgggaaggctcgctgcggggccccagggcgcccaattccccggattccgccatcttcatggcctccgcgcgggaaataacttccttctggaaaggctggttttccttcaccaccttcttcatctcctcctcaatgcgctcaaaatcctctgtgctgatgcggtggtccagctccacgtcgtaataaaaaccgttatccacggcagggccgccggccagctgggcgtccggccagaggcggcaaatggccgtagccagaacgtgcgcgcaggagtggcgcagccgttccagatcagacatctgatggcgttcttcaagagtctttctttccttgtgttcggacatacgcgcattagttaacctcccccaggcactgttggcaaatgcaaaaaaccctcctctccaaaaattcaaggcatgaacgctgcggagactttccggaagagaacgaacactctcccctttttcttctttacggttgccgcaccggaaaatccggtataacaagaaattcatgctgaatgtcatctgccataccttgggagccgctcttcttctgcttggcatatggatcattctgccagactggtacgttttcatctcccttcatttcaccaagtctgaacgatggaacagcttttccttcacaccattcgcaggatgaatcctcggttgcgccgctctccggctttttcctcctacccgagaaatgggcatccgatggcttcccatccttccggattccggtgtcatcctgtacagcgtccatctggttaaacaattcttcaagtttctttttcgtcgttccccataagcattttctcattttgcaccatcgcggggagaacaggaaaaaacggaatgcaaccatttaccttccatccgctatccctccctcaacgagtgatttacacctgcggccgtttatgccatagtggcggccagcggttatgaaaatcctccccctctcccttctctgcctctgcctgccctgcggcctctcccggggcgaccagccgccggacggctcccctgtccgcttccagatcagcatggaccaggccgcggaacacaaggctccggaaccggaccctgttccggaccagagcacgccgttcaatgcggccaggctgctgctccgcgcccttcaggaaaaaactgactggaaaaacgaaccgtacaaatccctgcccgccacctccccctttgtaggccagctcaagctgaaaagcatcctttcccgcatggaggcggtccaggcgtatgtaaccggagcggccccggaacgccccccttttgtggatgaagcctccatcatcacccagggagacctggcgatggcctacatcctgctgccggacaagacaaacccgtacgtctatgcagccactgcggtggccctggtgaaaaagggcggccagtggaaggcctccctgaccccagggagctttgacaatacgttccttccctttgacgatcaaatccgggaggaagcgaaaaaaatatcagcggaagccaagaagaaaatcttcggcctcgcccaccagtactccgtggccgccgtcaaagccgccctggagcacatcaagcggttccgtgtggaagccgtaaaggggaaatcggacgacgaactcaagaccctgctcatccgcaccgtgaaaggggatgacccggcacgcattgccgccctgctcgtttccccgtactacatggaatccgccatcacccagagtgcccggctcacccccgtggtcaaggccatgcgccttcaggacaggagggaggaaagccgctacatccagcccaccaacctcagcttcatgacctttccgaacaccatcctggttcccctgcgcccccatccggacgaccagacagacccgaacaaacgggatgaggaccagcaggaggaggccaataaaaacaacgcgaagaaaagcggcaaggatatccacagcattgcggccatgaccatcctgcccccgcgcatgagcatgccggacacggacaagcccgctctcatttaccgctatgcgctggagaaaatcaaggaccccacggatggcttccccgtcttcaaaatgtatctgacggacgccttcacttcatggaacctgaaagcggacgaatccaccaccgcccgcatcatggcggatttccaccggacctacccccccctggcctttcccacgccggaagaggccgtgaccgccgccgggcgcgccctggcgaaccgggacagcctggccatgatacgcatgctggctccggccaaattcgcctccgtgaaggaatttgaagacgcgctctcccagttgaaaacggtcatgggcaggattcccgccccccggaccgaggtgaaggaaaaaggcgctcccgtcgtcaaggctgcctacgtttccgtcaccagagacggcgcccccggcatcaaggccaccatcggcgtgcggcccgcttccagaaacggattctccgtcaacaacctgtaccttaccaaaacggacagcggctggatggtcaccggggctgatgtggagaacccgctggcgctggacgaacaaaaaaaaccctgaaacccgcccggggaacgcccgcccctctatcacacaaccttttccattatcacaccatgatgaatctaccgatacggccgcgccgcaacagaaaatccgccaacatccggggtctcatccgggaaacctccctctccccggaacacctcatttatccggtcttcgtccatgaaggaaccgggaaccagcccatttcctccctgcccggctgcacgcgctggagcgtcaagggcctggtggaggaagccaagcgcctgatggacctgggcatccgcacgctggaccttttcccggccatcccggacgggaagaaaaccccggacgcctgtgaggcctgcaaccctgacggcctcattccgcgcaccatttacgcgctcaagagcgaggtgcccggcatcaccgtcatgacggacgtggcgctggacccctacaattcagacggtcacgacggcctggtggaattccgctccgacggcacgatggaaatcctcaatgacgactccgtggaggttctttgccgccaggctctgtgccacgcggacgccggggcggacatcgtctcccccagcgacatgatggacggccgcgtggccgccatccgcgccaccctggattccgaggccctggacgacgtctccatcatggcctataccgccaagtatgccagcgccctgtacgggccgttccgcggcgcgctggaaagcgcgccgaaggagggggacaagaaaacgtaccagatggaccccggcaacatccgggaagccctgagggaagcgcagctggatgaagcggaaggcgcggacatcctgatggtgaaacccgccacgctgtatctggacgtgatggccgccatgcggaagcacgtgacgctgccgatagccgcctaccacgtcagcggggaatacctgatgatcaaatccgccgtggcttccggctggctggatgaacgggaaaccgttctggagactctaacctccatccggcgcgccggggcggacatgatcctcacgtattacgccccccaggccgccgaatggcttaaacaacgctgacgccgcacggcctccgcacaggaggtggacgtacggtccagaataccgctctccgcatgtctacctccacaaaaatatttgtcggcatcgtgatcgtcgtcgtcatggcgctcacctccctctggggcgtctatgcccccaccttctcggaagcctacgtactgcccgtacagatgacgacggcggacggcgccccgctgggcaacttccagtgccgcccggtggccgcggaaaacgggaagacgctcctggtcttccgggatacggacttcctgcgccagaccacggggaacatggtccattccaagatcatcctttcctacaagggcaccccgttctttgaaggcatcgtccccggccccatggaggccatagaaattccctccgggaaccttccgccccagttccaggcgctccagcagaactgacctgggctgctccggaaaagaaaacctccggaccgggaaccgccctgttatggcattgttactgaaagggcgcaggtttctctatacaaacggggaaacattgtggttttatagaatcaaacgatgagtgattcagcctataccattctgattgcggaggatgacgacagcatcaggcacgccctgacggacgtgctgaccgcatccggctacgaggtgctggcgctggaagagggcctggccgccatccgcgccgtgcgggaacgcaactttgacctggccctgctggacgtagccatgccgggagctgacggcttccaggtgcttcaggtcatgtctgcggagcgccccggcacgcccgtcatcatgctcacggcgcgcggggaggaggaggaccgcgtgcaggggctcaagctgggggcggacgactacatcgtcaagccgttcagcatccgggagctgctcgcccgcatcgaggccgtgctgcgcagatccccggaacggccgcgccagctccgggaaatccggatccccggagcatccctggacagcgccaaccgcctgctcacctttgaggacggaaaggaaacctccctgaccgcacgggaattcgaattcctcacgtacatggccacccaccccaaccgcgtcatcacgcgggacgaactgctccggcgcgtgtgggacgtggacccgcgcctgacggatacgcgctccgtggaaatgaccgtcatgcgcctccgggacaagctggggaccgtcgcggccgccccgctggaaacgctcagaagccagggctaccgctggaactcatccttcgtctcctgacccgtgaaccggcgcatacgcatcactctgctggcaatcagcctgctgctggtcatcggcacgctcggatggctcacccacgttctgctggtgcaggcggaggaaacgggccgctccgaacagcgcatcagggtggaggccctggctcatgaagccaagctggaaatggaccgcctcctgacctccttcatcacctttgaacaggcccgcggctactttgaataccagcccttttacgcctacaagcgcccttatgaccagcgcatgggctccccggaacccggagaggccgcccgcggctccaacctctcctcctacctgccggactacgtcacggcctatatccagatttccccctccggccatgtaaccggacccgcgctggacccgcagcttgccgaacatctgaatgagcagaaggacctctaccagcggctgaacggcaaggtctccgccctcacctccgtgccgtccagcggcaacctctggacagacatccggaatgaaatcctgcatgaagccccggaacctgagccgacggcatccggcacgccggcccaggtggaaaccgtcacctccttcgtcccagtggaagacggggggaacctctatatcctgcgccaggtgcacaccagccgcggcgtctatttgcagggggccctgatgaacatggacaacctgaaccggcggctgcccggccaggtaaagctgttgcttccccacagccgcctggctaccttcgatccctccgccccgcctcccgcagaagcgcggcagacgggcacgctcccctttgccaacgcccccctggtctttctgccgggagacacaggagccgtccccctccaggaccacaagaaaatgctgacctggacgctcacgctcatctggagcatggtgctgctgggcgcggcaggcgtcatctggctcatgctgggcaccttccgcctggagcagcgccgcggggacttcgtctccgccgtcacccatgaactcaggacgccgctcacctccttctccctgtatacggaaatgctggaggacggcatggtgccggagcagaaaaagccggaatactacgccaacatgcagcgggaatgccgccgcctggaacacctgattgaaaacgtgctctcctactcccggctccagcggaacgccatccgccgcacgcgggatacgctcacctgccaggaactctttgaacccattgcggaaaaaatagaccgccggctccgggaggcgggcatcagcttctcctttgccctggcgcagcccatccgcatcctgcccattcatacggatgccgtctccgtggagcagatcatggacaacctgacctccaacgccattaaatacgccaagggggaaaacgccaaagtccagctcaccgtccaggcggaccgccacaacatcgtcatccgcttccgggacaacggcccgggcatctccccgaaaaaccgcaagctggtgttcaagcccttccggcgcacgaaggatgcctccgacagccgcaagcccggcgtaggcctggggctggcgctggccaaggatacggcacgctccctggggggggacctgaaactggaattcggcaccttggggggagccagcttcctgctgacacttcccaaatcctgaccccgccaaggggcctgcacgcctccatctgcttcccggcccgcgcggaaccatctttcctcttccatcacatccccttcccttgcccggccgttccacaaaacatcccgcccgggaaaatcccgtccggcatgctatgcgcttgccttcacgtgacggatatgtgacattgaaccgcaacgcacggcgggacgaaaaattcccgttccacgcaggaatatccgccttcccttccgtcgcggcggagcgcaaaacgcatggacatgctatcatgagtaaaaggattttgatcaccggaggagccggcttcatcggttcccatctcagcgaacggcttctgaaagaaggccatgaagtcatctgcatggacaacttcttcacgggcagcaagcaaaacctccttcacctggcggactatcccggatttgaaataatccgccatgacgtcaccgttccctgcgtgatggaagtggaccaaatctacaacctggcctgccccgcctcccctccccattaccagtttgaccccatccacacggttaaaacctccgtgctgggcgcgctgaacatgctgggcctcgccaaacggtgcaaggccagaatcctccaggcttccaccagcgaggtatacggcgaccccatggtccatccccagccggaaacctactggggcaacgtcaatcccgttggcgtccgctcctgttacgatgaaggcaaaagatgcgcggaaaccctgttcatggactaccgccgcatgaacggggtggacatccgcatcatccgcatcttcaacacctacggaccgcgcatgaacccgaacgacggccgcgtggtctccaacttcatcgtgcaggcgctgaaaggggaagacatcaccatttacggaacgggcaggcagacccgcagtttccagtacgtggacgacctggtggaaggcatggtccgcatgatgaacacggaaggcttttcaggccctgtgaacctgggaaatcccgtggaattcaccatgctggaactggcggaaaaagtcattgaaatgacgggttcttcttccaaaacggtcttccgtcccctgcccctggacgacccggcccagcgcaagccggacatccggctggcgggagaaaaactgggttggaagcccaatattccgctggaaaaaggccttgaaaaaaccatcgcctacttccggagcattctgtagcgtttccgaggcgccgcatgcttatgcggcaacttaatcattattggcgaactgatttcattaaaaggcgtggcttacaaccgcgttcctttcggttgccgcataggcaagcggcgctccaaggaagcaatccggaaattccgggaggcttcccatgcggtccttgaactccggcatgccgagcggctcattacccgtttttggctggtgcggtaaaacggttcggctaaaatgaattgttatgaaacatgccgacgcccacggaatctattccactcaagccactgtccgcacttatgaaagcggtgcggacggcctcatgaaaccggaaacggttctgcactggtttcaggaaatagcggaggcccactcctcctccctcggcttcggctatgactttgtgatgtcccgcggcctggcctgggtggaagtgcgcctgaacacggccatcagccgcctcccccggtggaaggaaacggtggaactccgcacctggaccgcgcaggaaacgccgctgctggcgcgccgcaatctggaaataagggacgccctgggaaaccgaatcgtcacggcaagctgcctgtgggccgtcattgacgtacgccgcagacgcccggtgccgttgaacaggcacattgatgcctttccggatactccgtgtgaagaaacggtggctccggcagccatggatacctcgggccttctgccgaccatccgggaatggatggcggaacgccgcgatacggacttcaaccgccacatcaacaatgccgcctacctggtctgggcgctggaatccctgccggattcctggctggagaaccatgaattgacgggaatccacctgcatttcaagaaggaaacccatgcaggagaatccatgaaatccctgctgttccgccaggactccctcacctcccaccacatcatgcacggagacgaactgcgggcggaagcagtgctggaatggaaagccgccgcaatcgcataaaaaaggccctattccacgccttccggatttttctgacatcagacagcggacgagggcgcgcaggagtattctgcgccgttttatagaatcggaaggggcgtgccgtgtggagggcggagagcggcgcggggagagtagtggacaaaatggacttgatggacaggatggacaccattttcttttttccattctgtcctttcagcccacacggcctattactccggaggacgctatttccttacacaagcagggccgccccggctcttgtccgcaacggccctgctggcttggagagtggaacgtctccgctccactctccactctcaaacttcaactctccttagaagtcataacggtagccgatacttccgttcaccgagttcgctccgtcccggaagtccgcgttcccgttgatgaagaccgttccctgcgttcctaccggcacgctcagccccgctcctatttgcagcgccgtcgttccaaccttggtcccacgcacgctttgcatgaagccggggttgcccagcagcgccacattggtttctccgcggcggtcgcccatgtcctgggccgcgttcacccggaactcagccaatgcttctcgcccgaagatgttgctgccaatgagccccatccaacgcccgcccagcgcaaccgttcccgtcgtccattcctgcttgcctacgttcaggcccgcgttccccgctcccgtttccgtgtagccgtccattctcgtggttactaccgaggcgttggccaggggctgcaggatgctgctcttgtcttcgttgaggtacacgtcgtaggtcagttcatacatcgctccaaagccccacccgttggtgttgccctgcgtgctgtagctgccttccccgtagttgaccgtgcggttgagcttggcgtcgttccagcctcccgtcagaatcaatgtgtgcgcccaccgcttgctctggtagcggccgaagaggttggcgtagtagctgtccaggtggccgtccgcgctgtccgccgcgctggccgtcaggtcgccgtagttggccgtgaaggccgctcccatcgtgaagtggtcgctgaggtccacgtccatgcccacggtgccgccccaggtggtgagctggtagccgctttcatcccccctggtgtccagcttggcgtaggagcccgtgccttccatccacatgtggaagtaagggaggtcttcgttgacgtaggcggggttgacgcccatgagggtagtgcggttcctgatccatcccatctggtcgcgcagggcgtccttctgggccgttcccagcgcgttgaccgtgctgcccgctacggctgccaatgccctggatgctcccgccaaatcaggattgctccccgtaaccatggtgctgatggcattcatgacctgcccgagctgggaagtggcgtccaggttgttcctggctccccacagaagttcggaacctgctccggaattatgggaattcaccgcaggcttaaaaatattatcctgctgtaccgtggcgttcagcacaatattgtttccttcccggaccatggtcgcatccttgtaatacacggcaaagagtccggaagtacccacggacatggattccccttccgccatgccgtcaatcgcgtccgcggtcatcagcaccactccgtccaggttgtcatacgttcccaggcccgtgttgccggtcatgttggcaagcgtaaagccggcgccgttcccgatggtaatggaatccgccgtcagcatggcggagccgaaaggatcggccgcgctcaggttatacacgaattccgtcatggaaccgctctggaagtcaacgctgccgacgttcaaggtggtattggggtcccctgctccattcccgatggcctcaatgcgcagggtgccggaagcgcctaccgtaacgttgcggtagtcaagcgcgggagcggcggacgtgcctttcagcaccagggtgccccctccgcgcacgcccaggtcatacgtggagcttccggtctgcatcacctgggttaccttgccggagacgtcaatgctcccttccccgtccagtgtgccggagaaagagccgttcacggcggatgcggaggtgacggacagtgcattgccgttcagggccagcgttccggcgccggagagggccagaatggacttctccccggtcccggacaggctcagcgttccgttcagcgtcacggaggttccggacaggccggcttcccctgccagggtgagggaagaaccttcctgaacgttcaggcggcctgctccggaaatggtggtcgcctggtccagggtggaatccccggcagtcttgagcgttccgcccgcagagatttgcagggagccgccctccgcgtcatctgccaaggtggccgtcgtggtccccccgatcacgacgcggacggggtcatccgcagaggcggaggacaaagtcagcgtgccgatattattggcgctcccgttcagggccagcgtgccttccctggcaaccaccgcattggaggtattgacattgccattcagcaccagggtcttttctcccgtcttgatcaggtccgcgccgtcaccgttcacggtaagattgccgttgaacacggagtcgtccagatcgttcgcaagttcgatatccagcgaaccgtccccggcggcattcaccaccaggttgcccgtgctgccggtgccggaggaaagatgccggatgatggtcttgtccgtattggccgcaggcacgtcaaaattcagggtgaggtttgtgtccacaatcacctgcgcataggaattaagggccggaatttccgtcaccgtggaaccgtccacggacgaaatgtaaatctggtccgttctgccggaaatgatgatgctgccgccttccacccccttgatgccgaatcccaggctttccagcgtggcattgaacgtaaggtgctggttgagccacgccaccaggtcgctggaaggcaggccggtgatcgttccgtcggtcagcagaatgcctacggattccagttcgcgcatggcgatcaggatatccgtatcaatgtccatgtgcagcgtgaggtcggaagcgtccccgccgaaggaaacggtgcccgtggccgtgtcattgaactggagcaggctcttctggtccccggcagcggcatacgtggtattgttcgcacccacatgcagggaattattccccgtcagcgtcagatttcccgtcaggccggtaatggccgttcccgccgtggcggtattgatgccgcccaccttgtccccggacaggccgcccaggtcaatatccccggaattggcctccgcattcacggttacgccgccggcagtggcgtaggctcctgcatgttgcagccctcccttggtaatggtgatgttgttggcaatcgcctggttgttcatgtccagaacggaaccgccgttaacggaaacattcccggtccccagggaaccggcgcccagcgccttcaccgtgccgccgttcagggtggttcctccctggtaattattagcggcgttcagttccaggaccggggccccgccggctctgttcacgatcagagctcctgccccggtaatctgcccgacccaggagcctgtgccctctccattgcccagctgaaccgtgccgctggtaatggtgagcgtccccgtagcggtattgtcctgcgtcagcaccagcgttccggttccggcctgttccaccctggcgttcagggcgccttccgctcctacggtggcgttcatcagaacgaggtcattggtgtaggagaatttgaacaagcttgttccgccgtcagcctttaacaccacaccatccccgaaaagcttgccatcattcagggtcgccgccgtattgttgccgaatgcccaggtaaacagggcattgccagtgcgggtgaacgccccgtggaacccggtcatgtctcccgtcaagtaggcgaaggcatcccccagtgcggtggtcaccgtacctgaaccggtgaatgccccgccaaagtaataggacttgccgctccctccgttcaggtaggttcctttctccagcacattgatcgttgccatgacggcggtatccgccgtgttgacggcatccatccagaaaccgcgtccattcagggttaacgtccccctccccatgctggcggcggtggcaaactggaggtcgcgggcatcatttgtactgcccggattattattcaacccggatgcgaccagttccccggtaaaggatgaattgtctcctgaaatgtaaaaacgggatttggccgcctggttgtccagctcaatccggcccgctccgctcatgccgttgatgacgatgttggcgctgtttccggaaggcattccatcgatggcgctggaaatggcgagggttccccccgcattcaccgtgactcccgcggaaaacctcgtttgaacacttccggaggcaatggacacggaacctccgtccaccgtcagagcgcccgcatacacggcggcgccaagattcaaggtgccgtctccggatttttccatggccatcgccttgtaattatccacggaagcccacgttacggcgttcccgttggtatccactttaatggagttcttgctcgtggaggaaatctgtccggaaatatccgccgtcacgccagcgccatactggaggataccgccgtcaaacgacagactgccggcgccgagagcggcgtcatctcccatttcaagcgtgccgccgcccaggatcacctttccggtatagttggtattggccgtattgatggtcagcttggcgttgccggtcttttccagattaccgctgccttccagagagccgccccctgccgcggcatcccatacataatccgtcgtatccgcctgcaccatgataatcgtgggagagacggcgccatcaatggtcaccgtctgcggggcgctgccggcaatgtctcccatgacgactccggaattatcattgtaaacgccgtcgtccttccacggggaagcggcgggagcagtgacggaccaaattccgtcgccccccttccattcaagcaaagccacctgcgccaccaccagggtaagcttgccgttccccgtgctccaggaacccagaagattgtcgcccaggacaaaggaactggcaggaactccggtgacggtgcccgcgctgatcaggtcataggaaccctccgtccaggccacgccgtctatcgttccctgccccagaagcagttcgctgttcacggtcagcgttccggtcacattaagcagagacgcgccggaagccggaagagcggaaaaattcaggagggacgagtttcccagcgtcaggtttcccgtgacggttccggaggaacccagcgtcagagtaccggcatccgcaatgacgagcgttcctccgttcatgttcagggaggcggcattggaaagacttacgttggaaaactgcgtggccgcattcacggtcatgccggaagcgccgcttacggtcatcacattattgtaggtagcatcgtactgggccttcaaattgcctccattcaggcttaccgagccggaacccagggccgtggcattattcaactgaacggttgcaccatgggaaatgacccaatccgccgtcatggaagcctgggccgccgtattcaggatgagggtgcccgcaagtccgtccgcccctaccgtcatcgtcttggcatccgttccagccgttcccagagcgccgtaaatgttcatggtcttgccggtagcaattttgaacagggcgctggagtttaatacaattccattccatgcctggctggcaactcccagggagaaatccccgcctatatcaaacagggtatatccctctcctccatcgcgcaaattaacggtgcggttggaatcgttgcttttggaaacgctgaatccatcggaaccattcgtgacggttattcctccaagtgaaagcgtattgaaggaagcctgaagcgccttattcgttcccgtcatgctgcccgcgtcaaaacgcatgctgtttgtcgccgttccggcccatgttgccgaccagttgttcccgccgccgtaatccggagtccagttggtattcaaatgaacatcaaccgttcctcccagccatgtataggtttcagcaacagcatgcggtgaggaaacggcggccatgcaggcaatcagagaggacaggagacccaagggaaggtgcagcttcataatttttaatgaaaatgaacgtgaaaatacctcctgaacctgacaggaggctttttatcatcattaacggattaaaaatccgctagggaacggaaaagccgccaatataccagaatgaacctgcttgcatgtttatactgataaggataccaccacgagcatacctgattacggaccagatatagcatgaaaacggtcttccaggagagttgcaacgcctacggaatcaacgtttaagcttgtaggaggatttttaatccgccttgcgaatcattccggatggaatcaataatccattttaacatcatttattccactatatgctatcaactgagctattgcaccatgccggcagaagcgccacacagcatgcaatgttccgtgacgcagcagggccgttccggacaatgccggaacggccctgcgggtccggagagcagagcgtctccgctccactctcaactttcaactctccttaaaagtcataacggtagccgatacttccattcaccgagttggctccgtcacggaagtccgcgttcccgttgatgaagaccgttccctgcgttcccaccggcacgctcagccctgctcctatttgcagcgccgtcgttccaaccttcgctcctctgaccgtctgcgtatagccgggattggccaggaagcctacgcccgtcttgccgcggtggtctcccatgtcctgggccgcgttcacccggaactcagccaatgcttcacgcccgaagatgttgctacctacaaggcccatccaccggccgcccagcgcaaccgttcccgtcgtccattcctgcttgcctacgttcaggcccgcgttccccgctcccgtttccgtgtagccgtccattctcgtggttactaccgaggcgttggccaggggctgcaggatgctgctcctgtcttcattgaggtacacgtcgtaggtcagttcatacatcgctccaaagccccacccgttggtgttgccctgtgtcctgtagctgccttccccgtagttgaccgtgcggttgagcttcgcgtcgttccagcctcccgtcaggatgagcgtgtgcgcccagcgcttgctctggtagcggccgaagaggttggcgtagtagctgtccaggtggccgtccgcgctgtccgccgcgctggccgtaaggtcgccgtagttggccgtgaaggccgctcccatggtgaagtggtcgctgaggtccacgtccatgcccacggtgccgccccaggtggtgagctggtagccgctttcatcccccctggtgtccagcttggcgtaggaacccgtgccttccatccacatgtggaagtaggggaggtcttcgttgacgtaggcggggttgacgcccatgagggtggtgcggttcctgatccatcccatctggtcgcgcagggcgtccttctgggccgttcccagcgcgttgaccgtgcttcccgccgcggctgccatggaacgtgccgcccgggaggtgttgccggactggatgtcgtttctgacggcttccctcaggtcaccgagctgcgtgcctttcggcgcgttgccgcggttgttccagagcaggttggcccccgcttccgagttggccgtgttggccgcgtccataaaggcgttctccgtcttgaccatgcccgtcaccacaatcttgccgccttccgtccggatgccgaattcctggtagtagaagtcaaagtagccggaggcgtccaccgtggctccgttggccgaaaccgttccggctcccgtcgcgtccaccagcgtgaagttgaggttggccgtcgggtccgccgggtcgtcgtagtcccccagacttcccagggaaacggtggttccgtccagattgacgtctcctgcctgcacggtgatgaccgggctggagaagaggtcgtcacggttggtgttgatgaccaggtccagatgggagttttgcaggttgagtccgttggcgacggtgagcgtcgtgttgaccgctccggttccttcccctaccgggctcaggcgcacatgggcgccgcttcccgccgtgaggctcttataggtaacggagccgttgccgccttccgcacccgtcagttctagcgttcccttcgtgacgctgagggcctgcccgatcgcgccgttccccttcagaacctgcgtgccggtgccgttcatggtgatgctgccttctccgctgagagagccttcatacagggcattcccggcagtggtgatttccagggcggagccgttgttcagcgcgccgcttcccgtcaggccggaaatgctgttggccgcgttgccgagctccagcattccgttgccgtccaggtccacctgcacgccgtcaagcttggaggtgccgttgagcgccagggaggcgttgtccgccacctggagcacgccggctccggaaacggtgctgttggaaagttcggaaccggctcccgtgagcgagagcgtaccgtttttcccgatggagaggttgccgccgttgccttcatccgtcagcgttcccgcttccgccttcccggtaatgtccagggaggaaaggtcgccggagttggaggagttgagcttgatggagccgaggtccgccgtgccggagaggatgagttggccgtcctgcatgtccagcgtgccgctggtatccagggttccggcaagctccagggagccgtctcccgtcttggtgatattggccgtccccccattgatggttccggagtacttcgtatcgggaccggacgtattcggatcggttcccagcagctcgttgttcaggatgacggaagccgtcttgtcgttcgtgctggtgatgttgatgacgccggaagccgcaccggaaaggttgttgatcgtcaggccgtcagccgtatcgtccacgccggggaggttgagagccaggttgccgtccacgatgaccgcgcggtacgggtccagctcggaattgttcgtgaccgtcttgtcttcgcttcctacggcgtaaatctgcgtggcgtcccccgtgatgccgatggagcctccgttgatgcccgtcaccgtaaagcccagggattccagcagcgggttgaagatggccgtaccgtagcccagcgctccgttggtcaggttgagccacgccgtgcggtcccccgcgccccagccctgcatggcgttaatcacgtcagcggagagggtaagggtgagcgtttcaatttccaattgcgttccggccgcgtcaaactgaatcatggaagtgcttccggccaggtcctgcgtcttggagacgttccccgtgcccaccaccaggctggcgctgtccagattggcggcgccgttgatgccgctgatgaccgttccggcgtccgtcatgttgacggtcttgagcgcggaaccggaaaggccgcccagggaaatggcgctgacgccggaggccgcattgacggagacgttcttgacgcccttgtaattctggccgcccgtcacgttgcctccggtgatgttgagcccggctttatagccatcggcggtgtcctggaaggaaagcgttccggaagcaagcgtcacggtacccgtgtaacccgcactggcagcccctatgctcagagtgcccgtaccggttttcagaaggttgcctgaaccggtgaaggcgccgttgagggtgatgtccccccccgtggtatccaccgtggcggtcttgccggaagcggcgttgagggcgactccgacagaagttgtccaggcagcggaggagttgagcgtgccttctcccagcgtgagggttccggacgtgccggtgatatcgccgcccatcgtgagcgtaccgccgccgctgagggtgatgccggagtcggagccatccaggaaggaggcggccgccagcacggcagtgccgccgttgatgttgagattgcctgccagggctccctgcccgttggcgccgcccaaattgacgccggtagtggaggtgagcgtgacgcccgtccccacgttgaccgcggaagcctgcgtgttgctgcccatcgtgccgccgcctatttgcagcgtggcgatatcaaggtctttcttcaagtccagcgtcacgccgtacgtgacgtcaatgagatcggcattcagcgtgccgttcatcgtgatggtacggttggccgtagccgctccgtagccggaaagaacgatgctgcctccggcattgctgagcgtgccgttaagcgcgtcattgccgttggccgccttgacgagcagggagcctccgtccgtcttggccagggtgccgttgatgttcttgagcacgccggaaagagcgatttcattgccgccggagagcttgagggtggagccgttggccaccgtcacggttccggagaggaccttggtattggcgatgttccccagcgccacggctccattcccggagatgttccagttgagggacaggaagctgtcctgcccggccgtattcaccgtcagtgtggtgccggctccggaggcggccagcttgaccgcgtccccggcgttcttctgcaccatggtctgcgtcagcgtcacgttcccggaggcctgcaggatgccgccgccgaagatgatggaacccgttcccagcgctccgtctccgttgatgtccacaatgcccccttccagggacgtagaaccaccgtaggtgttcgtattgcggatttgcagggtgccgtcccccctcttggtcaggatggtcgtggcgcccgtgatgtgcccgtctccctggaaggtgtaggtgttgtccgcgccgctgttgctaacgacgatggaagagggagccacgtctcccgtaatcgtcacggttttgttggctgccgtgttgtcaaagagcaggggctggccgtccgtggtcgccggcgcggagccgcttccgccgtaggtccagttgctcacgtcgcccgcgctccatgttcctgcgtccgccgttccgttccaggtgagcatgttcgcggaggattcgatcttgagctgaagcgttttgccgtccgcggaaagtcccagcgtgtaggtcagttccggatgggcgtcattgatgaggtccccgatgttgaaggagccgagcgtgagcgttccgcttcccaccgtcagcagggagtagtctcccgcgtcggtgagcgtgtcgtagttgttgagggtgacgttgtgcgttccggtgagcgtcagtccgccggtgagcgtcaccagggcgtttcctcccgccgtcagtcccgtcatgtcaaaggtgaaggaggagcccgcggccatggccatgtctccggtgacgttcaggcgcgagtagctgcccagcgtcaggctgccgatggagccgccgttgctggtgatggcgcccgtggagagcgcatccgccgtgccggctttcacgttgaccgcgttgttcaccgcataattgccgatgtccagcgtcgctccggaggagatggagaccgtgctggtcccgaacgccgtagcgcttcccgccgccaacgttccggcttccgcattggtcgtgccggcataggtattggcgccgctgagcgtcaccttgcccggacccttctgggtgatggaacccgttccgccgatgacgttggccaccgtctggtccgcatccaccgcataggtcaggaaagcgtctccattgccgccgagcgtcaccgctccggaacccagggagccggctcccgtcagcaggatggtcccttccttgatcagggtctggttggtataatcgctggccttggtcagttgaagcacgccgttcccctgctttacgaggttggcgccgttgccttccttggctacgattacatccagcttcaaatctgccgtattagtatcgtccagcgcaaaattcccgcgcgctatgtcaaagatggccgtgccgccgcggagggtcagggcattcgcctgaccggtggagggggctccctccgccacggagaagacgctcattccggtagcggactgctgcgtcacaatggtattggtgccgctgaacaagtcgaagccgtttaatcccccgccgggcatgttcagaatgacccggctgttgttgaacaccattctggtattggccatggtcgtattgccgccgccgacattccaggtgccgttgttcagggtcagcgtgccgaagttcccgctattattgtagccgaacggatcgcccgccgtagtattcagcgtgccgccgttcaccatcagattgccgtaaaggatggactctcctccgtctccattcttgccgaggttcagaaccgcgccctcgcccaccgtggtcagcgcggttttcgtctggacggtggaaaccgtcagggccgttccggcgcccgacacttccagattgatgccggagccggtcagcagtttggttccgagcgtattggcccctccggaggcaaaggcgatcgtgcctccgttgatcgtcggcatcgtggctcccagaatatccgcaattccgcccgttacgccgatttccagccgtcccgtcctgtccacggtcaccgttccggtccccagggccatgttcgccttcacggcaacggttccttccttgatgttgaccgcgccggaataatcgttgttggagctgttgaaggtcacttttccttcacccagcttggtcatggcgccgtttccggaaagcttgcctccgttgttggtcagctccaggtcctgccctatcccgttgttgaaataaatggccttggcattcacgtcccccgtcagggacgccactcccgtgtgcgttccgtcaaacagataggtcgtcgtgttgtccacggcgccgatcggattgccgtcccagaccaccacgccgtccgccatgctgacggaaacggtcaccgtcttgtcaccggtattcacgttgaaggttccctggtacaggctggccagcgtaccggtcagggtcatcgtccccgcatccgcgaagttgcctgccgtcagattgtcccaggaaaccagcgtataagtccccgcggtgatattcccgttaatgtccaggctgacgcctgcatccgcgcccagcgccaggttgctcaccgtcagcgtcgctccgtccgcgctcagggcgcttccgtcaaccgccagtgaagcggcgttcagcgttccggtcacgttctgcttccgcagcgccgtcaccttggcggtggaggcgttcagcgttccggccagcggcgtatccgcattcaggtaaaggttggctccggaaaggttcagcgttccggaaaagccggagacgtccccgcccagcgtcagggctcccgcattgttgcgggtattgactgccagcgttcccgttccgcccaggccgccgagcatcttgaggctgtccccgctcgcgatggtcgccgttcccgtgccggacgtttccacggataccttgccgttgaggttcacgttcacggtggctccgttaaaaatgctcagcgccgtagccgcattcgtccctttcagggtgatgtccccggccagggaaactccccccgtgacggtattgggattcaagttgctgaacgtcacggtgacgttcttctcactgccgcccagcgttacattcccctgcccccacggggtcagggtctggccggagacgatggaggcgtccccgatattgtacgtcagattgaccaggttgcccgttccggctatttccgtatccccgtcataggaattcttcacccagcccgttttaaaaccccacccgttcgccccggcgtcggaaatgatcttgaggccgcccgttccggtgatggtggatgaaaccgcggtggcatttccataaatggctccattcaggaaagcaaatcctcctgcggcatccaggacgattttcatgtcgaaattcgcgccgtcagtatttccgtttctcagatgcagggtggagccgttccccatggtaagggtacccgtccccgtcaccttggttctggcgcccgctacgtccatcacggtattttcccccagcgtaatgttcaggttggagctccatgttccggtttcgtccgcaagcatcacggtgccctgttccacaaccagcgttcctcctcctgaagcgttgaaggaattaaggcccagcgttaacgttcccgtacccgtcttggtgacggtgccgttgattcctccgttcagggtggagtcccccgcgccaatgaccagagaaccggggccgctgttggtcaatttgcctccataggtgccggcccccagcaggaggctgccgcttcccgtacgggtgacggtccccgtccagccggccagtgaagcccacgttacggcattcccgttcgtgtccaccagaatggagttggaagccagcgcatccgtcttgatctggccggagacgtctgccgtaatgcccgtgccgtacttgagcgcgcctccattaaagatgatgctgccggtgcccagcgcggaggcatgctgcatttccaccgtgccgccgcccagcaggacttctccggaaaaaccggcgttgtccgtggcgatggacaaggttccgctgccggtcttctgcagcttggagcttcccaccagggaaccggaccccgtccacgtataaccggttgcgtcagcattgacgacgatcaggcccggattcacctgtccggcgatgttcacggtctgcggcgcattgcctgctacgtcaccgaagatgactccgttgccgttggcaaaaggcaatcccgcattccagggggaatcccccgttcctcccaccgtccacgtattgtctccgccgcccgtccaggtcagggacgtgacctgcgccacgacgaatttcagggtattgtccgtcgtgctccagttgccgatgtattcggtccccagcagaatggtattggccagatccccggtgatgccgcccgtggcattaatcagattgtacgtgcccgcgctccagctcacgctgtcgctgttctccagcagcaggctgccgttcaccgtcagggcgccgttcagggccagcaggggattgccgttcaccgtcatgtgagtggcgtcaatccgcacggccgctcccaggttcaggttgccggtcatcgtattctgccccccaagggacaggacgccggcggtcatggacaggccggcgttgctgtccacggcggagacgtccaggcccgctcccgcggacagggaaaggccgccgtaccccgcggaaatgccgccgatggccgcattccccgttacggaaaggttcttgttcgttcccattccggaggcatggctgacaatgagggtgccccctttcagttccacgccgcccgtgaaggaagaggaattggccagagtcagcgttccggagccgtccttgatcaaacgcccggttccacggaatgcattgtcactgcccgtgatcatgttccctgccccggtaatggtcagggcgccgttcagctggatattatgagtgtcgtcagcagtgatggacatggtgctgccggcattcaccacctccacggcgccgccgcccgcggcgactgtcaggccgttcccgaaggttccgtcgctttccttggtaatctccaggcgcccgttgttcaaggtccagtaccccgtattgacggccatggaacccagccccgcgccgtcataggtatattctcccacgcgcagcacgccgccgttggtgacggttaccttgtagcgcgtataattatcccccgtcatgctgaggctggctcccggagagctcaaatccagcgtggcgttgtcaatggtcagggtcctggttccggagccattccccgctttcacggtagccgccgtttcaatcttgaacacgccgccgccggtaatggtaaggctgttgtccccgacgttgaacgctccctctgcctgggtaagcgtctttccggcctcaatggtcagcgtcaggtcgttggcgccgatggtcgtagcctcattccaggtaacgtccgtatcaaacgtctggttggtcgtaatggtgaggggatcagcctgaacagaggcggacaacgcagcgcagcaggcaagaagagcggacaacaaattgaggggcaagtgcagcttcataaagaaaacaattaattataaatacattaaacaagacgtggtcttttagcagagatgagacatgctattaggtagatgaaatatcggatttgaaatccggtgtcaatctggaagtgccgtttccaaagctttaaattatttccgttatttccattctatcccatgcccccattcaaattagccacattattcaaaaaacaaaaccaacagaacttaaaataaacatctgatcataaacaaattattttatttcctccactctcacgccttccctgacgcccttcttgtccggatttcaaatccgttcattttctttccctgcatgcagggccttcaggcagccgggaagccatccatgaagggcacagtaaaaaacctcctaaggatttcatcatgaaaccgcttgtttccggaaattctgccgcgggggcagaagcgtgaaatccagtgagtcccatgaaaaacaacatccttcccataaaaggcatgccggagccagggacaaattccgggaccggtccggagggagcaaaagcagcgcgggatgtattctttcctccttgctccccgcccggcaagttgctagaatacgtcaagcaagtttttccccttttcccatggccatttttggttcctccaatctatccgactccggcgacctgctgattttcaacaaagtatctcataaaaccctgctgatgttcgaaaaggaactgggcagggaccgcatgacgtacctggtggaagaaagcctccccccggatgcggccaccgccgcccatctggaatccaccaaggcggacggcatcctgttccaggccggcggcagcgatcccattgccctgcgttccgccatcatggaacgcatcaacgagggcagaagggtagtattcctgcccggtcccgtagcccacgtgaaaggctccatcagccacatccccccacgggtgatcaaggccctggaagcactccatatttcccccgtgccggtatgcacgggcttttacaccagctccgtgctggacgcggaggcggatacggacgcccaggcggatatccaggtgcacattctccccaagctggctcccggggcggaaatggcggcgcgcctcacctccgcgtggctggaatgctccgcccaggcctatgccacgctgtcgcagctgcacggctccctgtccgccctgctgttccgcagcctaaagcttcattccgactgccgggtgatcgacggcattgacgataccacgctgacctacggccagcttctggccatctccgtggcctttgccaagcggctgaaaaagatcaccacgaaccgccgcgtaggcatcattctgccgcccggcaagggagcggcaatcgccaacctgggctgcctgttcgccggaaaaacgccggtgaatttcaattattccgcctcggaaggggcctttgccagctccgtgaagcaatccggcgtggactggttcatcacggcggataccttcatgcgcaagctccagaacttcccgtggcccccccagagggacctgatcctcatggagcgggagattccgctgctcaagggctccgccaaacgctggggcgtggccatcaaattcctgacggcggggttcatgattaaaaagctggggctggatgcgcccacgggcgcggatgaagccgtgctgatgttcacctccggctcctccggagaaccgaaaggcgtgccgctgacccaccacaacatcctttccaacatctcccagtgttcctcccgcatcacgctggcgcctcaaagcaggttcctgggcagcctccccgtattccactgcttcggcatcacgatcgggctgtggtacccgatgatcggcgggtacgacatggtcacctacccctccccgctggaggccaagcgcctgggcgccctcatcaagcagtacggcatcagcctggtggtcaccacccccaccttcctgcgcggcttcatgaagcgctgcgagccggacaccttcaaaaccgtgcgctacctgatcgtaggagcggaaaaattgccggacgagctctccgccgccttccgggaaaagttcggcaccgttccgtgcgaaggctacggcctgacggaagcctccccggtctgctccgtcaacttcattgacccggccccgtccaacgccgccggagacttcattccaggcatgaaaaagggctccgtgggcgctctgctccccggcatcgccgtacgcatcaccagcccgcatacgggccgcgtggtacccgtgacgacctccggcatgatctggctgaaggggccgaatatcttccccggctacctgggcggtccggaagccgaccgcgacattttcgtggacggctggctgaaaaccggagacatcggttctgcggacgaattcggcttcctgaaaattgaaggccgcatctcccgcttctccaagataggcggggaaatggtgccccatgaagccctggaagccgctatcatgaacatctggaacctggacccggcggacgaggaacggcggatagccgtcgtcaccattccggaccccgtgaagggggaggccgtggccctgctcaccaccctggtgacggactacgtgcaccaggcgcgcaccctcatcaggcacggcctgattgaccaggggctcccggccctgtggtgccccaaggaaatcattcccgtggagcacattccggtgctgccctccggcaagctggacatcaagcaatgcaggatgctggcttatgaagcgctgaacattccctttgaaccataacccatggaattcccggaggaaacgcctgccgctcccaggcccatcacggtcaaacagctcgtttaccgcctgagggatacggtcagcattgccgtggggacccagtgggtggtgggagagctcagcaacgtcaagcaccataccagcggccacgtttacttcaccctgaaggaacagggcgcggaaatcttctgcgcctttttcaaggctgcggcttccaaatgccccgtacggctccaggaagggatgaaggtccatgtgctgggcagcgccaccgtatacccggaccggggccagcttcaactggtcatcaggcaggtgaaagccgccggccagggagacctgcagacgcgctttctggaactgaaggaaaaactccagagggaggggttgtttgacgctgaacgcaaaaagggcatccccgcctttccccgcgccatcggcatcgtcacctcccctaccggcgccgtcatccaggatatacgccatgtgctggaacgccgcgccccgtgggtgaaagcctacctgctgcccgtgcgcgtccagggggcgggagcggagcatgaaatagccgctgccgtgcgcgcctggtccgcagcccctctcaacggcctgccgcccgtggacgtgctcattgtgggccgcgggggcggctccatagaagacctgtggaacttcaatgaggaaacggtggcgcgcgcgatttacgaatgcaccgttcccgtgatttccgcagtaggccacgatacggacttcaccattgcggactttgtggcggacctgcgcgcccccaccccgaccgcggccgcggagctggctacgccggacggtccggaatggctccgcaagctggctagaatggaacaggccctgcacgcctccgcacggcattccctgttgcgttccaagctgaaactggatgtttacctgcggggaaaactgctggatgcggattccctgctctccccttacgcccagcgcctggacgacatggaagaaaccctgctgaatgccgcggccacgcgcatttttcaaaacacgctccatatcaacaaactggaacatcacttacaaatgcgccatcccacccaccgcaacagggagcgcgcgcagcttctagcctccctccaggccggactggcccatgcggccgccgtgcgcatggcggacttctcttcacaactggctcttattcaagcccggctggaagctcacagcccggagcaaacgctgcgccgcggatacgccctggtggaaaaccagaataagcagctcatacggcaaacgaaccaggtacatgcaggagaaaaattgaaagtccgtgtctccgacggttgtttttatgtcagggatgacacaccgcaataggctgtccacaagagcctagcattgcattttttgcactcaatctaacaaattgtgttttttctggattttacaggaagtggaacctatcctaatagaagcctgtcactgctcctattacccggtcccataacttctgtacatatgccttgtaaaaacatcacccgctacacttacgaaacgacagcctttcaaggctatcggttggcgatctgtaagaacaagcgcttattcactcgttatttctccgattctcaatacgggggcgctgatgcggcgcttcaggaagcgatgagagtgagagataacattttcacactttttgaacagggtaaccttacggttagccaaattttcgcaaaatataccgtgcgttcccgccgtcagtccgccgctgaccgccgtgaaaaaatgatccacggaaaaagggctctcggccacgtgcggcagaaagccaaagtccgcagctgaggaatctgcggaagctgttttttcagcttccccggagccttgaatcataccggaaacgttgcatccggtacaggtggtgtatactcctatcacatcaaaaagccgttctccgtccggagagtgggaacaccgcagcatgcgcggcggagaaagcggcaatctgtaccaaagcgccccctttccgccatccgcgcccggcaaagcaattccggcattaatgcggctgtgccggataagccgatcaaaggcctgcggcacgctgccaaggcattcttccgccgtctgtcgcccgcggcgcttcccgcggagggggggcgggtcagcctgctgaaaagggcttcaattatctgcggcggcggcgcgaggcaggcttttccggttcttccgccggggcttcccctatcttcgccagcacccgccgggcctccgtggtccggttctgcttgagacacacgtcagcccagctccggtgaattttgttgtaaaggtctccggactggatggaggccagattattctggagcttcgccttgtcttccggactcagcgcatcccattcttcaaccagctttccatactgggcttccgacagggaccactgttctctgcccgcgcttatctcagcctgaagattcagaatgaccggctggagggcctggacaaacgtggtgttctcacgggccaccttcatcgcctggtccagatatttcatcgcctggtcataatcccgcgctttcaggaaggcggcggcgatgttcacgtcctcataagcccgtttcaccagggcctccgcctggccgtacttctcaagctgggaacgcagagcctcaatgtcctggctcaggctggaaccgctcagaatgcgcggggcatccacgcccagggtcatggctgtcccttccgcacgggacagcaggcgggaagcctccttcaaatcccccatctgcatccttacccgcgccagggcaagcatcgtttccggcgtgcagtccatctccgtttccgcggcgcgaaagcagatcagggcggcttccaactggtcggccatggctttcagctccgcctgggaatacttacggcgcgcattgagcggcatattcagctcgttcaggatgattcggcccatatccggactggcggtcaggcggaatttggtgagcagttcccgggcaatggcgcttcctgtgccgccgggctgccccgtagtcttgtccggcagggtatcctgaagcagcagaatcttcaccatgctcttcacgtcctccggctttttcagcatgctcctcatgacaggggaggcggcctgcttgcacaacgcggaaaaacgctcaaacctggcctggtcatacgcatagtgggccagcggttccaggcatgccagacggatggatacctgctcctccggcgtatttttcaaaatcacttcataaagcttctccgccgtggcgtcatgcttgcggcctgcaaactcccgcgcccagttcaggctgacgcccagcaggcggttcctgtcctccgccggcatggaggcggaatcggccagcttcttttccagcagggccgccagcatcggttcggactccttcagcatgccgcgcctgtccatttccaccgccagcagccacgcaaaggaatcccgcgcttccggggaattcatccattccacctgcttgtccacggaggaagccatctgcgccagctccgcgtcggaaccgttccaggaggccagcatgccctgcaaatggcccatggcctgcgtctggctgtgcacctcgtgaatggtcggcttgaaccacccttcaatcgtgggccagtactgaatgtagccgaaccagagcccccccagcagcaccagaaagagaaccggcttccaataagacttcttcttgcgtgaggggcggtagggcttgttggaaaaatggcgctcggaactcatgcaggcattgagccaaaaaggcggcacaaatcaagcaaaataaacacctcgcaacgtcttacgaggaccgcccgaagcctaccgccgggaggatctggcgttcccggacggtctgcgcccgggagaggccatgcgcacgcggggaaaaccggattccttccagcaggcatccgccttctccttcattcccagttcatcgtaacagcggccaagctgcttgtaattctccgaccgctgttccccctccagcatggggagcaccgcttcaaaagtttccacggcctccttccactgctctccgtcgcacagggcgtatgccttgcacaaataggactgcaccagcaggcttctgcgctccggcccctccccgcatttcagcagggaatccactgctccggcataggcgtgcagagcgctttcccggtcccccgccatatcgctggcgagccccagggaataataaacccggcccagggacaggacgtccgaggcaaagtgggattcccgcagttgaagggctttttgcaggttttccctggccttgtccccctccccggcatccagccacgctttgcccagcccttccagggactgggcggaaatgacgggggaagccgcgctgttggcaatcgccttcaggaaatccgcgcgggcttccggagcggccttgcgcatgatgttcacccaccccctctgatcgtacagcccggcccagaacgcatggtccgccggcagcacgccgcgggcggcgccctccgcctggtaaagataagccagggcttcctcataattcccctgctccgtggaaatgcgcgccagcccgcgcagcgcgttaaggcagtcattcaacaagtaggaggcgttctccgaaccggtaaggccctttaaaaacaattcccgcgcctcatccttcctgccggcctccagcatggcttctcccatgctgatgctcgccagggccaggtcaccggtcgtcttgtccggctgggggcacagggccagggccttcttgaaataggcgcgcgattccggaatgcgccccgtggcgcgcgccagccggccctgggcggccataagcctggacctgaccgggagggcgtccgtccccagatgggcggcggcgtccaccgcgcgctggagcagcacgttcgcctcctcattcctgttcagcatctggtcaatggaactcatggtctggagggcccgcaccagcggctcggccattccctccttctcatacccctccacggcggttttcaaataaccgtaggccggggaatactggtgctccgccagaagggccttggccacggcgtccgcgcggggggcccacacccggtagcgcccggcggcatatccggcgtcaatcaattccctggccgtaggcagcgcgcggtccacgccgtcccggctgatcagctcacgggtgaggccccaggccgtctccgtccgcaactccggatccctgatccatgccaggcgttcctcccggttgtccagaatgccggccaggctctcgcgtgaagcgaaaacatccgccatgaagcgggataaattctgcatggccttttcatcgctcttctgcaccaccaccggcggtgtggtcagcatcccttcatcataaccgatgcggtacgccatatggtacgtcaggaactccagcagcatcacgagcgcgcacaagcacagggcaatcagccacttggtgcgcggagacaggggtttcaaaggagaaggggcctgcataacaagtgcataacgttacccggcgctccctgaatttcaagctttttgcatgggggggaaatctccgctgcacctgaaggcggacaaaccagccgacgacaaccgtttccccgccagtccccgggaccggccagggaaagctttttcctgcctttttcccactttccggcccttctctccgccttccgccgggcgcttttctccgggccatgcgcggcaatttacgtcagccgttcctgcgcttccgttcggacgcccggtacaactgccaggcattccataaattatgccacagcacgtaaaacgtgggccccagcgcggcgatggggctggcatacgtcagcgccaggtaaatggacagcgtggtattcttctgccccagggcctggctgcactccgcggcacgggtacgcccccccagcaaatgccccagcccgaagttgatcccgcacaccagcagggaaactgcgccgatctgttccagcacgcgctccgaaatgccgtcacgggaggaaatatcataagaggcgttcgccgcgatcaaaaccagaatcaccacccagatgccgaaggtgacgtccttcagcttccgcggccacgcaatggcccgcggataaaaacgccgcgccgccagggccagaaccagcggcagcagcatcaccagggaaatattctgggccacgttcaggtaaatctcaaagccgccctgccccacgaccgccggcagaatgaaaggcagcagagcgcaaataatgccgttaagcagcaggagggccgtcagcatgaactccacgctgccgcccagcagccccatcaccacgggagccgccgtggccgtgggcatgatgcccacgaagaaagcggcctccgccaggtacccgtctccgaaaacgaggcggcacgcgccccacgcggccagggcgatcagcaggttggcccctaccaggagccagtgcgcgcgctccggcttcatccgtttgaagcggatgcccaggaacgtcacaaacagcatcacgatcagcatccacttgaacgtccagctatacacgtgcaggccgggcatcatgtaccccgcaataaaggccgccacaatggcaaacgtgcggatgagggacttgaacatgtggaatgcggacggcagtgaaaaggttatgctggtttttcacacaaatggatcaggccgtccacctggcggacaatcagctcaaacaaatcctgcacgctgcccttgggaacccggttgttctccatcagctccataatcatccgcaaacgggtcagcaggccgatcatgatgctttcaatagccagcaccgtccagaaaacctggtacgtggaagcgcccggaaacatggtgcggatgcagtcatgcagccgcctgcgtatgggggaatacacctccttgatatactccaccgctatctccggcgtctgcacgtggcaaatggccagcaggcgcaggtaatgggggaaattgcccaggttttccagcttcacatgcaggaggccgtggaaggaagggtaaacgtaggcatgggccagcgcttgcaccgtgcctttctccatggcctcattcatcatggaaatccggaaatcccgcgcctgcggcgcatacttcatcatgaccgccttccaaagcccttccttgccgccaaaataataattggcggaggcgatgttgacggctgcctgctgggaaatcatgcgcatggaagtgcctgtatagccgtgctcggcaaacaggcactccgccgcgtccagcaatcgttccttggttccttgctgtcgtttcatgggggtgggggaagtttggaattaccggtcaacgcgggcggcgcggacctggatggaatggttgtgggcgtccagcccctccactctggcgaactccgccacgtacggagcggacttgagtacggcgtcccggttcatccgcaccacgctggtgcgccgctggaactggtccgcccgcaggccggaaaacgacttgccggccccgccggtcggcagggtgtggctggggcctgccaggaaatccccgcaggccaccgtggaaaaagcgccggcataaatggcgcccgccgtccggatgccgtccagcacggcgtcttcatcccgcgtgacgagcaccagatgctccggagcgaaggcgttcaccaggtccatcccctcctggatggaggaaaccagaaaaccgtaagcgtgcttgtccagcacctcccggatgatggaaccgcggctcagcagggcggcctggcgttccacctccgcttccacctgttccaataacgcctccgacgtggtaacgaacaccaccacgctgtccggaccgtgttccccctgcgccagcaggtcggcggccaggaactccgcgtctgcggtctcatccgccagcaccatcacttcactggggccggggagcaggtcgatggcgacggctcccaccagctggcgcttggcctccaccacaaaacggttgccggggccgaaaatcttctccaccggcttcacgctctccgttcccagcgcaagggcggcaatcgcctgcgctccgcctatcttgacaatctccgtagcgccggaagccttcaatgcatataaaagagcgggattcacccgcccgtccggcccgcagggcgtagcggccacaatctcccgcacgccggcggcctgcgcaaaaccgcccgtcatgatggacgtggacaccaggggagccttcccgcctggaatataaatgcccacgcggtcatacggaaggaagcgttctgccacctccacaccctgggcgttcacaccagaccagtcctgcctgcggctgcggtctgaaaaataatggatgttggccagggagacggcaatggcctctttcacggaatcctccacggcggcttccgcctccgccagctccgcctccgtcacgaacagggaggaagagtccagatgcaccctgtcaaacctggcggcataatcaaaaagggcctcgtccccgcgcgcggaaacgtcctggataatagcgttcacggtatcccttacggaatcctccgggagagcgcggcggttcatccggctcttcatttcgtcaaagcaggtgtcggaaggacggtaaattttcataaaagatataatacggaaaaatgagaaggaagtttcacaatctttaagcatgcagtcaagccttctgtcctctttgatttccaaaggtactccatgaatctcccggacaaaaaatcaaaagaccaaaccattctcccttgaccggcacaaaaaacaggcatagcctttctttcgcaaacatttggccgaacggcccactgtcatgaacattcacgaatatcaagcaaaacaactctttgagcgctttggcgtggctacccccaggggcattgccgccgccactgctcaggaagcagcacaaatagcccggaacatgggcgtttcccaatacgtagttaaggcacaggtacacgctggcggccgtggcaaaggcaccttcaaaaacggtttcaagggcggcgtgcacgtcgttgactccgtggaggaagtggaagacgtagccggcaagatgctcaaccaggttctggtcaccaagcaaaccggggaaaccggcaagctggtcagcaagatcatggtggcggaagccgtggacctgaagaaggaatgctacttcgccattctccaggaccgcgcccgtgaatgccccgtcatcgtagccagcacggaaggcggcatggacattgaagaagtggccgccacccgtccggaagccatcatccgcgaacacattgatccggccctgggcatcctgcccttccaggccctcaagatcgccgtggccctgggcctgaccggccccctgctccgccaggccaccaagctcatcaccaacgtttacaagctcttcaccgccctggactgctccctggtggaaatcaaccccctcgtggtcaccacggacgaccgcgtgtgcgccctggacgccaaattcaactttgacgacaacgccctgtaccgccacccggaaatcatggaaatgcgggatgaaacggaagaagacccccgtgaagtggaagccggcaaatatgacctgaactacatcggcctggacggcaacatcggctgcatggtaaacggcgccgggctggccatggccacgatggacatcatcaaatactacggcggggaacccgccaacttcctggacgtgggcggctccgccacagaggaaatggtaaccaacgcgttccgcatcctcaccagcgacaagaacgtgaaggcccttctggtcaacatcttcggcggcatcatgcgctgcgacgtcatcgcccagggcattgtggccgcggcgaaaaacattgacatgaaaatcccgctcgtcgtccgcctggaaggcaccaacgtggaaatcggcaagaaaatcctcgcagacagcggcatcgccatcatccctgccgacaacctggacgaagcagcccagaaagcggtcgcagcagccaaataaccctcaccatttattacgacaatgacatctctcattgacaagaacacccgcctggtcgtgcaaggcatcaccggcagcgccggcgcattccacgccaaaaactgcatggacttcggcaccaacgtggtcgccggcgtgacccccggcaagggcggccagctctttgaaggcaaggtccccgtcttcgacaccgtggcggaagccaaaaaagccacggactgcaacgcctccatgatctttgtgccgccgcccttcgccgcggacgccatcatggaagccgcagacgcaggcgtgaagctcatcgtctgcatcacggaaggcatcccggtgcaggacatgcagaaggtgaaagccttcctgaaggacaaggacgtgaccctcatcggcccgaactgccccggcattgtcaaccccgccgccaactgcaagatcggcatcatgccggcctacatcttcaagcccggcagaatcggcatcgtctcccgttccggcacgctcacctatgaagccgtctggcaggtcaccaacatgggtctgggccagagcatgtgcatcggcatcggcggcgaccccgtccacggcatgacccagcagcaggccgttcaattcttcacggaagaccccaatacggacgccttcatcatgatcggtgaaatcggcggttccgaagaggaagaagccgctgaatggatcaagaacaactgcaaaaagcccgtcgccgccttcatcgcgggcgccacggctcccaagggccgccgcatgggccacgcaggcgccatcgtggccggaggcaaaggcaccgccgccgccaagcaggaagccctgaaggaagccggcatcgtggtcgccaagacgcccgcccagatgggcgccgctctggcggaagccatgaaaaacaagggaatgtaagccccccttcttcatcaattcactttcaggcgccttccctcaccggaaggcgcttttttatggaaccattccgcgttgataccggaacgccggtttgacttggcctccgtccggagctactcttcccgccaaggcctatactattcaaaggagcagtcattcaagcagccgttatgaacatatccattatcgtgggacatccctacaagcacagttttaatgcggcgattgccgcagcagcggcagaagccttaaccgaacgggggcatcacgtcctgtttcacgacctttaccgcgaacaattcaatcccgttctgtcagacacggaactggtcagcgacgttccggaagatacgctgacagccctccaccagcaggaaatcagggaagcggacggaatcgtcatcatccatcccaactggtggggccagcctccggccattatgaaaggctggattgaccgcgtactccgggaggaagtggcctataccttccccaaaggcgacaatggagggggcgttcccatcggcctgttaaaagcaaaggcggcacttgttttcaatacctccaatactccgggggaaagagagagggacatcttcggtgatccgctggagcatatctggaaagactgcgtcttcggtttttgcggcgtccacgtctttgaaagaaaaatgttccgcatcattgccgacagcactccggaactgcgccgcaaatggctggaagaagtaaaggaaaccgtggcggaatatttccctgcaccataaagaaactcccagcatttgccaggggaacttggaaaaagccggagaaccattcccttcttttccatggacgaaaacctgccgtgctgaaagaaacaaggaaaaggaaaacaattacgcccgagcctccagacattgccggtacgagaagaatcccaaggagatggacacttctttaccgggccatccagacactatagccttttcctaattccccggaccggctacacaaacctgtggaaaccatacgccagagagggcaaaacaaagagtgtcttgttaccgtgattccctcgtaaggaattccgtcctcactatagccatcaacaaatccaacggtcactctcgccgtctctccaatgcccgggcctgtcgagcgtatgagcgtattggacggctcctccttccaatgcctctccctcgggagacaaaactggtacatccagtattcgcctaactcatcggaatcagataaggagtcataaactcacggcgcacagtgtacgactggaagccatatttggggtaatactccttatgccccagaacaaaaacctccagagagcccatggccttcaaccgtttcacccctctctggatcaacacaccccataccctggagctagtattcccgcaccacggcaagaggagccagaatgtgtaatcatgcccggttcatccctgcccctgaaactggcgcaacccacaagcttgccggaatgaagcgcaaacaggaaaacatggggttctgccgttggaccttctagaagttattcagttaacctagcttccttattgtggccaaaagcgtcgcaatgaatttgccggatgggttcaatatccgcagaagtggtttcagcaagatggaaatcggcaaggttcatactcaaagaagcttcctggctacaataactaggcctgccaaccgacctcaaatttcccggaacccattcccgcaggtgaacaaatattcctgtcgcttttccaatacgtagtagtaccagcttcccgtgaaaaaacggcactgaccttctgacgaataggacatgctcgcaggcaagtacagaactccgtagagtaatcttttcaaaaaaccgcatcactcccatattgcaagaaatgaaaaaagcttgactaaatcaggctttccaacagtcagcatgataaaaatgctggcggagcagattgcatttcaataattaataatcaaaaaaatcataattttgtgcattaacttatacccttgttttatccaatgagttcctgagagatgcagattataaaattggctttaggttgtaaaaattgaaacgatatttatgaaatcacacgaggaagaattacattcctagcttttctctttctttctgaaccaatttttctttctgatctaaagaatatttccaagtgagacactttctattataattatccgcttgagcatttaattcgatgctaatatcgtaaattaaccttttataaaggttattggcattaattccccatagaatcatcatggcacgattttttctaattaattccttaaggtactgaagtagcataggtaactccgtgtggaattttttcattcctcaaaaaaggaatatccaaaatattgtatagcgattgtatgggattttcattgatttcctcatcagaaggtacttgactgttaatttcatcaagttccaaatcaatacattgaataattttattatattttatttttgatgaaaatctggaattctttagaatcaaaagctgctgtttataattatgtaaatcatcttttagtgacattaccaatttttgcgcgataacaataatttcagacttagaataatcaaaatatggagcatctggtaattctgctataaattgtttttgtttgacaatagatacagaacgtaatttttcaacagattttatagagaatttttttggcatccaacaacatttgattgaaatcagaacgataattactaatagcaagattcaattctcgacattttatattgttcgtaattttacgtcctcccatggctccagcgattcctccaataattcctccaattgaagctccaattacattaccaaaacccggaaaaaaactacctaaagttcccccaaaaacggctccagctttagctccacccagtgcccctaacccggtaccacctacatccaatagaacattttttagggaattttccattgaagttttattattactgattaagcgtatttcacgagaacctgatacaaagagagttataaatggaaaatgtccagtgggatcaatatcaagatcgaaatcgaagttttctatgtccgaaaacgtctccgaagtatgatgaatccaggaatgggttatttcagaaatatgctgatcataattcatcattggcagcaggaaatcatgcatggttgtatgttgcaggaaagctcctatagccttccagccattttcatgagctgtattcatcaatgtttgcaggtgaaaaacatggttgtcaccatataaataataacttccaaagttttttaggcattcgataattttatccgaatcatggaaattagtaattccttctgccaagcttgcttttagagaagctatgttctccatgacggcttgagaggagtggtcagttatggattccaaagcgtaaaatgtaaagtttcctatctgttcagaaggaaaaatggataatataaactgttctgttcccacaaatgcaagaggatttttatccatcaaagaaattagtttgctaataatatcttctcctgtttcgttgttgttaggaggtaatggaattggaaagggaagatttttagctttttcttcaacttttcttatcgtatcatttgtagattcatagttttctatttcaacaataaattcatttttcagattattgtcgcatctaataaaatctggtctggatgacatgagtaaattttcatattttaactcgtcaggacgtatatagattctataatagacaattcttccgataattatacaaataaaaagtgaaaccgccaatagtaatattatttctgaagtagtcatttaattgataataaattaaataatcttatgtaaataaaaatatttgattccaaatatttattaataatttacaatattttctattttatttttcctttctggccaatatatcacattcatgtttcaattatttttgtcttgagattactatatctggaaattttttaataatcaactaaattatacataaaataaatagaaaatatgtatagatgaggagaaagtgtaagcatagcctgttggatcaaatagaatgagctgtaggacaagaaaattatgggacctatatgaagaagtatcccatacaaacccaccacgccgccttaagccgttagatggaaacctcgaaaagagagacttcaactggaagtgtaacacctactgccgctccttcacttcctatgccaatacccgcaacaaatcgcttcttagctggacaactccgccattgtcatagcggatattattgcaagataaaaaactaatgaatgattcttcgtcacttccaccggtattggtgccatatcttgttccatttacggtcaaacgagctcacaggcaatcaatccgacatcatacaatatcccgcaaaattcaactaaaagcttactgctataaacttttcaaatcatttcagacggtaacaacagcacattaccccttttttgaaacagctcccatatattaaccatcttttggtccactttcttggtacatttagaaatctgtttccattcagcaggattctgcatattgaaacgagcataccaataaggagacctcttttacgtaaaaattctatattctgatgacataaaaaaactattcacattccatcctgtcatgtacaattctaggcaacatttaattctctgatttataaagaaaaaagagtctgcatcgttgaaatgcagactcttaaaaaatgaaaggttttggcggagcgggagggattcgaaccctcggtaccggttttgccagtacgttcctttagcaaaggagtgctttcagcctctcagccaccgctccgtcttgggtaatgtgtggagaagaaattacacacttcccaaaatgaagtcaatacataaatagtacaggcaggaattactccaggcaggcatattggcaggtcagttccttttcttcaccgggtttcagcgccacctcccactggaatttcccgtccggattcaagagacggacaaacgtcctcccaacataaaatcaaccggaagccgtttttcacctgcaaatgtaaccccgcaggaacattcagcgaccggaccatgggaaaacaagggccatcagttcccccacggcggcgcggacatggtgcaagcggtccggaaaacctttttaaacctcgcaatgctctgcgatcacttccagaaaatcatccagatacttcgcggccttctgctccccgatgccgtggacgttcatggcgccccggcgggtggtgggtttcagcctggccaacccttccagggtggaattgtggaatacggcataagccggaattccggcttcacgggccagctcattcctgagctccttcaatttcaaaaacaaatcttcgtcaaactcgcccagcgcggccaaatcccccgtggcccgcaccctagcctgctccgtgggagcggaagccttttcccggcgggcaaagggccagagcatggacgcctccctgcgccccatcatcacttcattccctttcgggctcagggtaatcagggggcggtccgcctctccgctcattctggtcaaccccgccatttgcatggcgcggaacaactggcggatatcgtcctcgctccagcgggaaagaatgccatacgtactcagacgggccagagaggtttttaaaatctcctgattcttcgcccccttgagcatctggatgattttcgtcctaccccaccttccctgccaggaaccgtccgccatgcgcacggacgcgcgcgcaatcccgctcagcgcctgccggacaaccctggtttcctcctcgcccaacgattggccttcctccacccccagcgtcaggcactggtcgcagcggccgcacggggcgccatcctcctccccgaagtaattcaaaatccactgctggcggcaaccggtggaataagcgaactccgttaccgctttcagtttttcccggtctcttacctctttttcccgcagggcctgttcatccagaggaatcttcaagccgcttacggcggggtccgtcactctggttagcttcacgcgctgccccggaacgtcatggcggctgatcgcgccattgcgcatgagaacggacagggcggcccctacctgcatggcattccggcatttgagacgttcccccatctcctccatggaccacgccacatcgtgggtttccgcactgcaatgcttccttaacaactcgtacagctccacaatcagcggaacgcccggattcaccccctcaataaaaaactcctgggtccgcaaatccgcgtggttgaacaaaagctcgcaataggcttcatccccgtcgcggccggcacggccagcttcctggtaataggcctccacactgccgggaacctcaaaatgggccacaaacctgacgtcggcacggtcaatgcccatgccaaacgcattcgtggcaatgacgatgtccgcatggcggttcatgaaggcgttctgggcctcttcccgctgctcatccgtcatgcccgcgtggtaagccgtcacgttcaggccaagttcggaaagagcctcatggacctgctccacctttttgcgggtggagcaatagataatacccgtcttatggcgcttcaccagctcgtacagcctcttgtacttgtccttgtgcgtatcgcaagccgtaatgcggaaatgcaggttttcccgcgcaaacccccgtacaatcgtcaccgggtcgtccagcctcaaatgttccagaatatcctcccgcacgcggggagtggccgtggcggtcagagccgctacctgcgggcaccccatcgcttcaatagccctgcccagcttcaaataatccggacggaaatcatgcccccactggctcaggcagtgagcctcatccacggcaaccatattcacgtccacctccgccagggcgcgcatgaacccctcatggccgaaacgctccggagccacatacaccagcttgaacgccccgtccttcatgccggccaggcgttccctttgttcaggaaagttcagggagctgttgatcatggtggcgggaatccctctggcggcaagggcgtccacctggtctttcatcagggcgatcaacgggctgaccaccaggcagaccccgtcccggcacaaggcgggaagctggtagcacagggatttccctcccccggtgggcatcaccaccagcacgttgcggccttccatgatggaagccaccacgcggtcctgaccctccctcaaactggaaaagccgaagtactccttcaatgcctccatcggcgacctgatcaccttgaactcgctcattttctccgttcagtgtgccacagcccattccgtgacgcaacgcctttcccctctttctgtgctccggaatcaacggcctgtctttgaaggactcctctcccgggaagagaaaaaatgagatttttttctcaaatcatcttacaaacatcttgactttcccgaagaaaaacctatattcctctcaccgcttacgcggtacacgacgcaagtcaaagcgcccgtagctcaattggatagagcgtctgactacggatcagaaggtttggggttcgaatccctacgggcgtgccacttgcatcaccaccggtaaataaaataattcctgcctgaacgccatggcgggattttttgtctctatcggtaaatacatatgggggcgccatggtttcgactggaagtctgaggtgctggctgcatgtgaaggttaatcggctggccttctaaaaagccgattaaaaaaataaatgcagagtctaacgaccttgctctggctgcctaattagttcagccgcgtcagaacctcaacgcctgctagaggggacgacgaatattcagcaggctggtgcaatgcggggttgccgcgcaacgcacgagacttccacaggcaactagcgagcctgcctagttggcgcatgacgaagcggccgcgaaagcagcaatatgcgtctgaacatggagatgccggcatcaacggccttcaggacacgggttcgactcccgtcgcctccaccatttattttaatcgcaagtgcttgaaatacagtacttgcgatttttatttatccaaaacttcagtacaaacagtagtacattgtaaatcattttggaaacaatgtactgcgggaaattgccgtgcactgcgggtataaagaagccctctcctgcggtgggcgggagagggcttcggtgagaatgttgtcctgggcgtaacggttagtgtgagtgtagccgtccgcgtcccggtatacggctgtcatcgtgaacttgtcccactctccgagacatgggaactgtagctgtaactatctatctgcaatcatggtatcaggcttggtcttgagtatccggatcaataaaatcctctattgtctcggacttgatcgcgttatactcgatggccgaaaatccataatacgcagggttataaccgtccatgtatcgctgcataatgcgcggagcgcctatgtccacagttgtggcgtttgtactgttgtagatgtccaggtggcatgcgttaaatcctaccgagttgtaggtatgtatgccccgcacattggcgatgcgtatgcagcagcgattatcgtagccgcctgtcattagccacaacgtcccataattgtcagtatcccagccaccgtcacggtactggtgatacaccagcccgctgatggatgcgggcacggctgtgttgccgtcaaggggtaataatgccctcgtagtcttgacaaactttctccccgctgaacgggagtaataaatctctctgactctgacccagtaccccttggcctcagaatctcttgtgtcagatatagtcacatccagcacctcgccaaagtgctcagcgctagtgtgcaccctagtgtaatcgtcaacgtctctatccgtcctcaccgacacctgtccgtcacccatgcctagcgttatcttgatagtggctttataggctgacatccggactggcagggtaaatccgccaaatttgctgtaattggcgcggcctataagagagtgatccaggcccatattgacagatgacgactgtctggccggcacggtaaccctcatgagctgccccgacacccgctccgtcacggcagcattattggtggtggtagtaatcgcggcatcaaggtaaatctgcaggttgtatgtctcggccacggcggcaagcccggcagcatgtatccggttgacggccgcagtattagtcgcggctcccgcggcaagcgggatgttgatgcctccgttagcattaaccgcatcggaaaatgttccgccctgagccgttagtccgccgtccagcgtcatattgcccgcttcatctgtcagtttgtcctgcttaccgttccacgtttcacgttctttcgctgttatgtggactacggcatcatccttgtgtacattgaaggaagacgcgtcggcttttgcagaaagagcggcagcatccgccttggcgttccacgcggcgcgttcgtcttccgtcacatggatagccttgttcccggtatgctcgtcaaggtcttcctgggtggcaattagaatccccttggccttgaccgtggtttgattattccatgcagtacgctcttcctctgtaacatgggcagttccattctccacatgttcattcagttcattcagagaagctatgagggttccgttgatagaagtaattttattcatgattatttcttgttgtttgttgcgaagtggctgaacaacgccgctgccatcccgtccaccatcgtgaactccgaaaattctggctggtgaaaaacccgcgcccttcctgggcggtggctgcttccacggtcagagcaaccgcatccctggattccagagatatttccctttcctccaaaggcgagctgatgatctgatccagccgcacccggacgtgaagctccttccattcatcggataaaacggcaacgtgtgctaccacttcgttgaaagtttctacctgttcctggaaaatatcatcctgtgaaaagcgtcgagactgaacgaagccgttcctgtccgggaatacggccgtcaggataatcttcctatagaaattgaagtgtcccttcccctaccttcaacgtgccacgattgcagagccggcggatatgttagccgttaatgcaagcatggtaagcggaaaaacatttggggcgcttcctttttacatgggccgcctggttgcttcatggagaaacctagcatccttcttcctgttgaagcacaccggagcaagaaccaaatttccatttgcctggtttccctttccctctttttcctcgtagaaaggcccttataggccatgttaaagcaaatccaactcggcaacagccgctttacgtgctccgtcggcaccttttttagcgctgaatttgacgaatctagcttcaacgggaacaaaattgacctcctgttccaccgggttgttgacgatattgccgaaacggccggaagccaccggctttccccatgttttgccgtccctgctgagacggatatcatacatttcaatatggcccgggccgccttccatcacaggcgtataaatcaacccggcaattttctgcacttttcccgtatcaataataatgtcgcatccctggggaggcaggccaatttccacataagtatccgtttttccgtctttcagccgctccaactgggctgcgggaaggtttttcccggcaacggttatttcccattccttcctgtccagtttccggacggcttccaggttgtcctccgttgagaaaggagccaggtaatacaacgagaaattgctgaatgaaatggatttgcgggaatccagaaagcgtatcctcaattgatcagccttcaccgccttcggcagcctgatcattttacggaatccgatggtggtactttcagccaagggtttccattggccgtccagccacgcatccacggcaaagcgctccacacgctggccgtagtcacggacattttcctgaagcttgatgacgttgaattctttctttccgggcagctggatttcaacctccgcccgggttgtgccatcggcagtggcccagcctgtaaaagggttgttgtcaaacaagagtccggagtccggatttccggaccacccggaaagggctttcgcccgcgcgcctttggccaagtcgttttttttcattttttcaatcacccgtccgaattgaatcatcctcctggcgtccgcttccggaatgattccttccttattgggagataggttgggaagaacattggagttttgcccgaccgttgaaaaataacaatccaccaggtaatcaagggacttgatggatttgtcgtcgcgctcatggtaaaaccagcctttgcggatgggaaggcctgcccgtgaagggtaccagacgagctgctttttccccgccaggctgtcaatggaacccagattcctgtctttagcccgaatccccacattatttccgccaaacaggcgtgacgaagccgtaaccccctggacgcaccattccgtttcccgcccgcgccccatctcgttcccgccccaccgaacatcgggagccgccccggaaagaagaacttccggctgcaattccctggcctttttaaagatcctctcccagtcgaagggagtctgtttcccattgactttgctctccaccccggcgccgtcaaaccataaaagataaaccgggccgtaattggtcagcagctcttccagttgcttgacgtagaaatcattgtatttttccgtcccaaagcttttttcatgcatgtcccacggagaaaggtagatgcagaatttcatgcccagttcccggcaggccgcggagacttccctgaccaggtctccctttcctcccttgtaaggagaacgggaaatattgtgatccgtccatttggtgggccacatgcagaacccgtcatgatgcttcgctacaaagatcactcccgttacgccggcatccttaaacgtttttacccaggaacgagcgtccagccgggaaggattgaacattccaggctcctcctttccggttccccattccactccggtaaacgtgttcatgccgaaatggatgaagcccagcatttcccgctgctggtaatccagttggcggccggagggccttaccttgaccgccatatccaccagcttttcccgggaagcctgttccggcaccgtgacggatacgccttcctttccatttccatgcgcaacagccggataacccagcaagctacagagcaacaggacgcgaagttgaataaaggcagtcatctttttaaaatcaataagggtttttcttttagttggattttgagaatactctgttaacaataatattctttcatctctttcctgttgcaattcgcaataatcaatatttgcgagttattaacataacaaatgcgaatcatacaagctctttcttcctatgcacaggattctatttgataatttcttcgcatgtttacgagcaattcccagcctcaagcggattatgtggacaccaggaaactaggccagtggctcaatgaacattccatcagccgggctgaaatcgccagggctcttggcgtccaaacgacggtgattcacaactggtttgcccgtcaaaaaatccccaggaacgcgcaggcttcattacgccatttgatgaatgccggatgcccttcggaattggaatctcaaattgccattcgaatgaaaaactccatcctgaatgacgttgtgaagcgggccgtcaagaaaggcttgtccgtggaagaatggatattgagcgcggtggaggagaaattggaaaaagagcatcaataaaggctcatctgaaaagatgatggcttctcaagcatacaggttcccattttcccgatcagaaggcgcaggaaaaacagaatcccactaaagacggggttcattcatggaggcggagcggagggagccgacgacaaacctctctttttcctttccggcaatcggcggctttttctgcttttgggcaaagatcaggtattcccagccggggtaatgccggaccacccattgatgaagaaagaatgctcccgcaaatatcagaaccgtcgcaaccatggcggaagtgattccctcaagaaggatttttgacaggagcggcatcaagtagggcaggatcaggcaatgaatggcataaatgaagaagaagaggggagcgcatgcccgcgcgatgttaagaaagaacgtcttttccgtcagcagaacgcacagggagcccaatcccagaatccctggaatccagcaaggtatggtgtgcagggtttccgtggagatgacgccgcaatggttcaaccacgctattgccgcccacacgggaagggaaatataagctgtttttttcaggaacagcttaatctcgcccagcgtcagggaggaaagacagaaccccagcatgaaaaaagccagggaatccgcccacggaacccggggaggttcggaaaacagcgcgttgatctccggaaacagcactatggagaagagaacggcgatcgtcgcgggaatcagcagctttctttttccgagggcgaataaaagcggagagagcagactcagcgccatcacgtatttcaggaaccacagggggccgtcatagggaaaggtggttcccactcccgtcagcttccagggcaggctgctccagtcccacgtgcttgaatggcccaggcttaaataaatccaatgcctgaagaacgcttccagaaaagccgccccgttccatgccagatagaacaggacatacctgcacggggaatggcgccagtcgaatattttcctgcgtcccacaaagtaggccgccgccatgaacagaaagggcacccgctggaagaagagagggaattccacaccgtttcccgcagcatgaaaaaggacgatgaagaacaggccaaccaccctgcccaggtcaagccagcattccctcggcggcgttccgggaacatcctctggacggaaggcctgctccttttccggctccgtgtccggagagtatttttcaaccatggacattttcattccggcaaaaaaaatcagaaggggcttttgcaatacggctccacagccctcatgccgtcatgaagacgcaccgcctcatccctgtcctcccgggaagcgaacaggtacagggcatatccgccgaacccgcctcccaggtatttcttcgccagttcttcccccagtgttggaaggggagccatcccctcctggagctgcacgctatggtacagcgccactccggcagccagttcatgaatgctgcgctccatcactccggcgcgggcaatcagggaagactgggcgatacgggcatagtccctgcacccgtcagccattcccggcgtatcatggtcgtgcccggtgtggaagaccgccattttcccggccagaaagtcaccggtgctcttgatgtccagcacgggaacggcgccggaacgccagacgcacagccccgtttccgcaatcacggccggatcctgccagccaacccccagggcaagttccgactggacggagtccctgccctgcagcatggcccaggctccgctgcctcccagtccggaccggagttcatagggccagtggtccagggagacaaacggactgatggcacagttgacaatgtacgccccctgccgcgcatgcctgggaacgtccagccagccccccgcaaagtccacgcgcaggggaacgctaagcggggccttgattctgttcaccaactgggtggtggaaatctgttcggaacagggaggcgttttgggaagcaccacataccgcgctccaattcttgcgcacagttcccttttaaggtcgccgtaacagtcatcttccgtaacagccaggatatcgggccgttctttcaggaaaacgtgttcaaaatccatcccaggctccagatgttctccgcagaccaccttgtccaccatgcacaggctttccagaattacttttttatggccgtccgggatggatggttttctgcgcttgcttttccagagcacctgctcggaagcgaaggagacgatgaggaaatcccccagcgaacgcgcttcacggaagaactggatatgcccggcatgaatgatatcgtaaaaaccggagacgaatattttggtagccatcgttgaaatgtattaaggtgtggatgttgctgtatggagaggggtaaagattaaaccgaagcggcggaaaccgctgaatgggagaacccctcctcccattccagagccattgtttccaattcccggttcccttccacatagtcctcaaagagaaccggatattgcggcagaagcagcgggaggtcctccggaacgttaatttgatgccgccttcccagttttttccttaccaggcactggagttcgcaaaaagccatcggcaccaggctggcgttggagggcaggttccagaacccggcatcgtcgctcacaatgacgaatttcctgccttcttccctgccccaggccgccagcaggtcccccatgttgccgggaagccggccgaaacatgagaccagggtacagggaagagagggcgtctttcctcccattccggaggcggcagccggcctggccgccttttgccgttgtttttcacggataaaaatccagggcagaacagagattattttccagcagcgtttcatttgcttgcggggttcactgaaaatgcggtagagaaattccagcctgcaatccaccatccaggcaggggcccttctgatatgccgcccggaggcgaagttaaagacggctcccacggccaccataaccccccgttgaagatgggggcacagcctgttcatgaatatttcctgcttgggagcgcccagtgaaacccagacgatgtccggcaggtattcattgattcgcccggcaatagccgcgtagtcaaattcatccacagggcagaacggcaattcctgaaaaggcatgtgcttcacgcgggggtcttcccgttccagggtccggcgcagggcatccagcgtctcgcggctgcctcccaggaacatcattctgtattttttcatgccgatggcgtcgctgaaaatctgggcgccgcagtattggggcctgtccgcatgcagcagccatttcaggtagacgggcacccagccgctgtcgcaaatggtcaggagcgctccattcagcacattcctgtattcccggttgcgctgtacctcggaaagcacatggccgtccgccacgcagatgtatccggcgcccccggagcggagcacttcgtccatgcgccggaaaacgcgttcacggtcaaattcgtatctgatgttgaaataggtctccatatggttttcactcatggtcaatgttgactggccttcaaaacttcgcggtaaatgccggccatcctttccgccttgcagttccagtccagctccctctgcctggcgagaaaagctccatccatatcccgcaggacctgcctgttatggaaaaagaaacggatgcgttccgcaaagtcccgggcggaccttccgggatttgacaaaggaattttgcacccgacggaatcatcgataacggtgctcattccgcatgtgtcaaaacacagcacaggcagccgggccatcaaggattccgcgatcacggtagaggtcgcctccataatgctggtaaagaaaaagagatcgctctgccgcatcatggacagaatttccgcattgggcacaattccatgccatatgcacatatgagaaactcccagattttcagcctgttttataaaccgtcccccctcttcggaagatttcacgccacatatatggagacgcaatccctcacagcccttcaacagggcaagcgtggaaacagccagatgaagctgtttccggaaatccgccttgcccacccacaaaaggctaaattctttctttttatccagcaggcgccccccggagagattgagcctgcagccggtttcattaatcaccacggcctgtttcccataaacttcttccattctgtttttcacgccttccaccgcggcaacaaggacggaggacctggcgaccgcccgccgtacatggggctgccatcttgactggaaggaattaagggtatttttcacccgcacgaacaggcgctgcctccatcccgcacagcgtgcataggcggcaggcacgttttccatgcctcccaccggtccccacacatagggcacacccttgattttccaaagcaggcccggttccctgaaccctatcatgttcagctggtggatcagatcaatacggttatccctcatgatttgacgcgccaggcagagagccctcttttgccattttctgtaatggtagtaaaaacgccagtccccctggttccagcacatccggcgaaccttttccggcacgggaagataatggaacacgatgttgccggcctggggaaggcgggcgagttcccgttctatgttctccctccattccccttccgtaatcacatgcaccttgcagtgcatggccaggtggacgacccagttccaccccatgccgggttcgctgccccagtccgggttgacggcataagcgttaatcaggatttgcatcatggtttgtctatttgatggaatcaaggtagttccggtgcctttcctcctcctccggggcggcaaagcggcggcggatgacccgggccggattgccgcccaccacggtcatgggcggcacgtctccggtcacgacggcgcctgccgctacaatggcgccgtctcccacacaaacgccgcccaggatgacggctccatggccaatccacacgtcgctgccgatgaccgtcatgccgtcctcccagttccggggagaatcccagatggcgcaaccgggcctgttaaaggaatggtccctttttccgatgaatgaaacacgggcggcgcacaacacgctgtttccaaagcgtatatcgcaggaaacatggcagtgcggccccaattgcactctgttcccgaaaatgatccgtttgtgcggggaattcagatgcacatgccttcctatcctggtcattccctccacggtgacccagcgttgaagcaggcggaaccgtatgaaactgcgcactccgttagccagggaacgcagaaacaggattggccgggacctgcccggggcggcattggcggaagcattcatcgtacaatatgttccatgagatggttgacgtattcccggaatcccgcaggcatcaggcattctttcaggcgcggaggggacggactgccgccgcggtccaggcaggttttccggagaagagaggccagccccttttcatcttccggatcgaacaattccccgttccagccccggcggaccaggcaggcggagccgcagcgcccggaaaccaggcagaagcacccggcggccagcgcatcattgacaaccgccccaaacggttccaccaggctgggcagaacaaaaacgtcggccagattgtaccaggccgccaggcgctcgccttccagccagccggtaaaaatggcgctgactttcagccggacggccaaatcctgcaattccggtcccaggcttcccgaccctgctattaccagaacggcatcctccggaagagctgtagccgccctgaccaggcattccagattcttctccggggccaggcgccccacatacaggaccacccgttttccgtgcaggccgtattcccgctgcatggaatggctcatggaaagagcttcccggcattgttcccggaatgcccgttcatccctgacaatcggaaaaaagacgccctttccataatgttcccggtaccagcggcatgcctccatgtccgggagaatcacatcatccatcaccggcatcgccgccttccgcgccagcgcatgcatgcgggacaattcatttccgcggatcatgtccatgctgtcatcgcagatgctgacgattttgaatttccagcggcagaccgcgcgcagcaggcatacctccagagccagaatggaaaactccggaacgatcaccagatcgggccgtccctgccgcagaatgcgcgcaaggccggagggaacgcgccgcccggccacgcggacatggttcaggtattgggggcggaaagcgcagcgggcttccatttcccgcctgttgtagtggtggtccggagaattttcatattcaaaaaacgcctccatctctccaatccgggccagcgcattgaaaaaatcaatgcggtaaggcgccaggtattgatgaaagaccatcagtttccgtttgttgccgttcatggttcagtgccttttcctgtaatattgccgcgcttgcctgaagaacccggaggccgtctcccggacgcccgcacaccggagggaaaaccgcaaggggtgttgaactgtgccgcacagctccagcagctcttcatcggaatattggaaaaggcggcttaaacagcatttgaggaaggggattccgtggcggcgggaacggaagggaatgacgtgcaccccccggccgccgcccagaagctccctttgcctgcggtcaatgggagaaaacagggaatggaaataataaacgggggtccccgcatgcagaaagggggctaggcggtaaaaaggcgcccgttccgggtcgttcccgtaccgtaccagcaggggattgattctggcggcgtcttccatttccgtttccggcgcaaggtcaaaatagccgttgaaggagaaaacgcgttccgcatgcagcagggagccgaagagaacggcggcatagcctcccgaggaactgcccaccatcgttacccggcagcctttcgtctcgttttcaagccacttcagcaccttttccggagagttcaggcggctgttgatgccgcccaggtaccattgcttgaagacgtcgcggatgaagatgtgcctgccgcagcccggaaccctggttccgaaccattcaaacgtattccggagggtgacccgttcatggaaccgggcgcggttgttgggaaagtacaggtcgttgctgctgaaataaacggcgcaccgcgaatcatccccctccggagtgcgctccatgaggtaattgtcacgggtcctgtacgtctccagcacctcttcatcatccgtctggaaaacccagtctatttcgttgctgtccataagaaggggagaaaaactcgtacatgcatgcagatcatggccttgcacgcggccagcaggccgtcgtgcctgcggacgtagtggaagtaatacctgggctgggcattccccagcggggaatacaaattgcggagcctgcctgccaggggcaccttccggtccgtccaggcaacgaccttgtcatgccgttcgcaggttcccaggcaggcgggagccacccgcagctttattccgcgttcgcgcgccgtccgggaataatcgtaatcccccagcgcgtgcaggtagaacccgtccagaatgcctatgcgctccaccacccgccgcggcacccacagaatgttcccgtggcataattcgcactccctcagggttccatccggaataacgggcttcccgcccgccgtgcctccataagtccactcatccgtgccgggatggcaggtggagccgcagatgacggcggcgtgttccatccggagggaggcttccaatagatggcttacggcaaacggatgcagcatggtatcatcattcagccacaggtagaaatccgcatccttcttcagggcgtcctcccatgccgtcctcattccccggttccagaacagggttccgtcacctctgatgacggatacggaggggtaagcctgccgcacggcgtctccggtgccgtctgtggaaccgtcatccaccaaatgcacggagacgtccagccccgcttccggcagggcggagaacagggcggcaagggagcggagcgttttttccctgcggttgtggcacgtcatcaggaccgcaagtttttttccggaggtatcgtcagttttcatggaatgcgtacggaagggagagggttggaggaacggcggcggaaaatgctttccacccattcatgaagctcgccgtccgtcatggcccggaaacggctggaatagcacatggcgatcatcatccacagggagatgttcatgatatccagattgaagttggtatcctccagccatccccagagccagcggaaggccacgaacactcccagcaacttcatccagcggttgttggaacggtaaatggccagataggaggcctgccagtaaaatcccgtgtaaaggaagagccccgccacccccgtccaggcgaaaatattgaggaggacgggttcgcaccaggcgcggcgcttctggtcatggtaggactggcgctcatcactggacatctggaaactggtttcatacccctgcgccggggtgcgccccagcaaaatacagccgtccttcagggaggaagaagccacctcttcaaagacgatgctgcgggaatccgccagcaggtcgtcctccacggaacttcccggcgctccggcgtaggagccgacgtccaggacattgaagacgccgcccagcccgagggcgagaaagagggagggaattaaaaacagggcgtgccgcatcatcctgtaaaagcagtccttgagcaaatccctgccgcaatagacggccagcagggacagagccaccagcgcctttagaatctggctcctggctcccatgctgacgcacaccatcaggcatgccatgaccagcaccaccagcttccatttccggggcagcaggggcagccacggcaccagcatcagcaggggattcagcagggaggcgtaaaagtccggattaagggtgaacatgaacaggaaaaaaacggggatgaacaccttgaaccagacggacaggacctgccgcgtcacctccggcaggctgaacacgtaaaccagcacgggaatgaaaagcgtgggggcattcgtcaccagggcccgcgcggaccagtagccgtccacggcgaagacgccccgcaggcagcaaatgaatacccacaggaaataaatggaaaagaggggataaacgggggcgtgccccctcctgaaatacttccgcatgatgacgaaggacaccgccagcaggagggcggaggaaagggaaatggcctgttccgtacaaatcgggtgaaggacggcggcggacgagtacatggacaacatgatcatggccttcaccaggatgatgaaggggagcacgacccggatgcttgaaggaaggcgggatttcccatcaaggggcggcctttcattcgcctggcatgaaagggccgtattacgcatgcgcgctcctttccatcaccggagaagctttcccctcctccgcccggcggatgcggcgcgccggatttcccgcccacacctcattggaagggatggaacgcgttaccacggaacgtgctcccacgacggcgttgtccccgatggaaacgcctttcaaaatgaaggttccggctccgaggaagacgttgttcccaatcctgacgggagcggaccggcgcagaagcctgtcctccgctccccgcctggcttccgggtccaacgcgtggaaatccgtatccatgatgtggactccgaatccggcctttacatcgtctccgatcgtcaccgaccgcgtgcagataatcacggtattgctgatgcccacccggctgccgatgcgcagcacgccgtccctgtccacggaaatcaggcagcgctgggaggaacgggagacgccgtgggggccgttccgcatggtaaattcccttcctatgcggcacggaacggaacggcggcggcttcccctggatatcctgacgtccggaactccgaacgaacagaggccggggccgtaaaccgcattgccggcatacaggagccacctggcataccaattgtgaaggggatgcaggcagacggcccagcagcggagcacggctttcctggcaagataaatcaattgctgcatgcggccccctcccttccctttccttcatgttcctccgtgccgttccctgcgtctccggcaatgctcccgtagatgcgtttcagttgttccgcattcgcggaacggtcatggctcgccagggaggcctgccttccgcggaaggaaatacgcctgcacagatccatgtccccgaacaggcggcacaccagcatggccagcatttccgtctcttcaaaccggtacaggaaacccgtttccccgtcggacacggaatccatcatccccccggcataagccgcgatgcagggagtgcccaccatctgggcttcccccagtgaattggactcattttcaatcatggaggggcaaacgaatacatgcgccttccggaattggctgcacatctgctccgcgtccaggcgtcccagccagcggaagcggtcccggactccaagccgttccatcaggtttcccaaataacgggcgtagccgttcctgcgccacgcggggactgacaggatgtccggtccgaccaccttcaccctggcgtcaggataatgccgcagaaccaggggaagagcctccaccaccttgtggaatcctttcagggggtagtgggactggctgagaaaaatcgtatgcttttcgcacgctccggcatcccattcatgacggtaaaagggttccctgagcgtgggctggagaacatggtaccgcgccgcggggttcatggcccatgcgtgggaacggtcccaggcggtacatccgattacatggcgcaccttgccgaacagctcccgttcgtattttccacgcgccttgatcttccgctgctgggcaaaaagcgtgtcgcggcgcagcagatcgcggaaggtaacggatttcacgagttcccgggcaggaatgccgcccatatagaacccggcgcagacggaagacagcccctggatggaaacggccgtgcgttccgccccgcaggcctgcacccaggccagggagtgcgggtattcggaaccgcggatatggaccacgtccgggctgaatatatccctgatttcccggaaacagggttccagttccttcctgtaaacccccatgtccgcaggggcgggaaccaggtaataggtcatggcctccccgtccaggcggcgcagggtgcgccccgggtaaaacatgacggcggccagctttaaatccggggcggctttcatcagctcctgcgctcccgcgtacatccagcctcccagaaccggttccggaagcccaagcatccggcacggttcgggaaacaggatattggacagccagagcacgttcatccctttttccggagcgttcatgtttttcaccagtagcaccccccctccacacggctggcatggcctaccgtctcctctcttcccggcctcgcccacgcgtcattgaaaagccgggaataatcatgtttgggagcgccgggatcggccccgtaggccgggtcttcccagcgcctgccccgcaggccgaacagcagttgaagagccccgccgagatgcacggcctgcctgcccctcctcttggcatgggccgccagatgaaagccgtaagccccgcacccgatgaggcagacgtcgtaatcccggcggtccatctccccctccatccatgccagggcttcaaaccagtcggcaaaacggtccggccccgcgcccatgctctggacggcggccagcgtctccagggaaaaggaaggaagaacctccgggttttcaaaaatcctttcccggttccgttcgtattggagcgttatgctttccgcgaaaggatggaccaccagcaccttccttccctccagggccctgctccatggccgggaagaccagtaaggttccagattcagcaggcgcacgcggggaacgtcccggatcatgggcatcacttcccgttcgtacggaagccagcttcccaggatatccagttccatcatgtcacgcagcatcagctcgcagaaacgggccagatactccggcgcggccgggaaaaagccggaccactccctcatctgcctcatgatgtttttattccaccaccactggtccctccggcccgtgatgtagtccagcggattcctgcccgccttcccaatttccagataattatgcaggcaggacatttccgtgcagccaaaccgtcccaccatggcgggacggccggagcggagaaggtcctcaatcatcgcggaagccgcgtccgcatccagttcacaggaaggggggctcagttcctccctgccggaacagcggtcaaacatgcggcgcagcaaatgcaaaccctggtgcgtcagtgaaatcatggcatggacaagtttaattacctccgcaggcattctcctcccgaaggaagcggcgcttcatggagcggagctccagccggctgcgccacgtcttccagttcctggcggcattcctgattcttgcggagcaagggggcttctcctccggatcaaaaaaccccctcctggaaaaatccatggagatgccgtgccgttcaaacagctccgccaccggtccgtaccatttgccgtggatgatgcccgtgaaaatgtaaggaatgatctggtacgcttcccgggaaaacagggaggggtccaccgtcaaaaactccatgcgggaatacttcgccctccggctgccgaagcattcgaacttccaggctgattcttccttcctcaacagggaaagcagcgcctccctgcgccacagggagccctggcagcacgcgtaccagggataatccgggtcactggtgaaaaggccttcataccgcgaaggctcgcgggccggaattccctccggcgtcaactggatgcagggaatttccggatgggcgcgcatctgcgccgcgtatctttccaccgccccgccgtccaccggcgccgtcaggaagtaatcctcctgcatgtacagcaccgtatccgtttccatggcctccagggcccatttcaggcattcgctccacgtggccctcctgcgccccggaatgatccggcctgcgcagctcctcagggaaacgacgtttttttccggaccggaataggccttgtactccgtattcaggtacacgcgggcggggcaatcgggccaataaagggaccagagcctgaaaaaaggctcccagcagtcttcaaaggaatcacaggtattgacgagaatggaataggatttcatggaattatttggaaaactgaattttcctccaggcgcttttcaggaaaaaaacaagggtgccgcgctccctgccgtccagagaaaaaaaccagaggaaaaggaggaagacggccaggagcgagcaggtgcggaacaataccggaacgggagaaagcgacgcatcaatccggcacaggaggatgcccgcggcaaacgtagccgcactgggaacaaggcacggcgccagcacctggaaagaaaaatcccgcaggctgaggccaaggcgccgcacgcagatggaaagggccagcagcccccccggcagggttacgaaaagaatggcggccacatacatcatgcagggaggccatcccatgcggtagaatccccaggtagcgcccagaaaaagaatcccggaccccgttttcaccagcgtgtacaggcggatgttcccctccgcgtaaatggcggaccccaggctgaggaaaagctgttccagcaaggttctggcaagctggagcctgcagaacaggaccgcccaggcggggacggaatgaagccagaggcccaggagccccggagcctccagaatcagcggaatggcgaaaaccgccatgagcaggtaggcgaatttgcagccggacagggaggcccgcagcatgaggccgcggttgcccgccccctcgctttttgaaatgaccggattcagggccttcagcatggtcccggaaaaagccatggtttgcccgttgatctgctgggcgacggcctgcgccgcattgagggcgacgccgaaaaagtggttcaggacgatgccgacgccgtattccgacagcatgctgctggcggaaaccgtgaaattccagcccgcaaagctgcccatttcccggaaaacgccgcgtttccagtaacgccgcggcgcaatcacgcactccgcatagttcctgcggcaataaacaagcatggccgtcatggcaaggatggaaatcccggccatcaacaccccgtacagaatcagcttgtccgccagcacatgaacgacaagcagggccgcccccagcttcaggaaagattccagaacgcctatgacggcgaaatacagcatattttcatgggcgttcagcacggcttcacagggaacgcccagaatgccgaacacggtgctggcgatcatggcccagtatacgcacctggcggcaaaaacccggtcctccggaatattgagaacatgcccgaacaggatgggggccgcagcgtacagcaggattccgaccatcacggcaatggcaagatggagcaccacgctgatattaaacacgattttctgtttctccgggtccccttccccctccgcgtagctcatgaagcgctgggtagccgccgccatgctggcgttgagaaaagccagcatggcaatcacgcccgccaccatgttgaaaatgccgaagtcgtccactcccagggcattcaggaccaggcgcgtcgcgtacagggaaacgaacatggtgacgcccattttcatatacaggaatcctgtgttccttatcactctggagacggtgttcatgaaacggtggaagaagaaaatcccgggaaaaaggctatggggctaatgctgaagaaaagggggcggttaacggctctatccgtcagtttcggaatactcgtcgtagtaatgaaaacgggaatttttgaaattctccgcattgaggataacagctccggaacggaattcgcccttgtccgcaagcccctggatgacggagacgtactgcttctcgatcatgccgcatctgatgacatacaggaccaggtccgcatggcgcgccatgagggaggcgtccgccacggcctcatacgggcagccgtccagaatgatgcggtcataccgggcccgccagtaccggagcagctcttccaaacggccctgggtcagcaaggcgacgggattggggggaacgggacctgccgtcaccaggtcaaatcccgggaatcttttgccggattgcaggacggaatccggagaaacctgcggattcatcagcaggtggacaaggcccctggcattcttccctccgtaaaaggcggaaaggctggccttgcggaggtctccatcaatgagaaggacttttttcccggtctgggcatacgcggcggccaggttcagggccgtaaacgtcttcccctcccccgctcttgtggacgtcaggaacaggatgcggggcgcttcctccggattgggcagcagcataagttccgcattattgcggaggatgtgaaagcactcttccatgaaggaacggccattcgtgacgaccatgggcagcttcttccgctcctttccggaaagcaggggcagctcccctgccagcggcaggtccgtcaggccggcaaggtccttcttgtcccgcaccttcgtattcagggcgttcccggccagcagggccaaaaggcttgcaaaagcgcctccggccatgccgcccatcgtcatcaggggcagtctgggcgctacgggagcattggagccgaacgcaggttccagaatgcgggcgcttggttccgtcgtagccagggccaaggcgttttcctccctctttttcagcagcatcaggtaaagctcctccatgaccttctgctcccggagaagagggaccaggccttcatccttggaggccatgtccgacaaaagccggttgagttcattccgctccttttccagttcacccatcctcacttccagcgcgttgcagtaattggcgatggaacggccaatggattcgcgcatctccttcatattctccgcgagggaggaaaccatgggattctgccttcccgcgctggcgaacaactttttatgctggaggaaattgtcattgaaaagttcgatctgcttggcaattcccgcatcctgaatgcctatattggcggggatcatgtcctgctggcggctccggtccgccagcagcctggcgagcaccttcacctggatcaactccgtcctggtggagaaaagttccgtccctatttcctgcaccctgttgaacgtggcatccagcgtcgtatccatatccttgacgatccggctgttgcgcttgtagtcaatcacctgcttgtccacgccgccgagctggccgccaagcttgccaatgcgcttgacgatgaactcctccgcccgcgaggcggccatttgcttctcccgcctggaatggtcattgtaaacctcaataagataattcagggcgtcttccgccttttgcggatgggaaagcctcaacgtcagctccagcaggctgctttccttggaatcgggccgcgttacgctcagccggcccagcattccgtcggtggcctccttcacggaaacgcgctccacgaaaatggtccttcccatgctgcctgaagaaaaataagaagtagggcatacattcactgtggcgaagggaagcttcagcggaacgccgaactttccgtgcagaacgttttccccgctctccttcgcccggtaagacagggaaaattcccggccattcagcggagtaaccgccagggaacaaggctgaaacgccacctcttcactgaactccgccttcaggggagtcgtatggtaaagatccacttcccggatattccgcttttcccagtaggagacgtcgagccccagccccttcaccacacggcccatcacctccgaggacttgaccacatagctctcgttcgccaggttggcctcccccggcttgaaccccagatcggaaagaatgatttccgagacctgggcattcttctgcttgtcatccctcagcatgatgcgggcggtcttctggtacagatacccctgccgggcgcagatgaaataagccagccccccgcccagcagggcgcacgccagaatccagggccagtacctcctggccgtggaaaaaatgaaccggaaggaaaaaatatcgttgtcctcaggctgtatcactgaaacgggcatggaaggaaaacaggatgaagcgtcttacaggctgatggcgatgacggcgataagcagggacaggcccgaaaggccccaggcgtagtactgggcgctttcgctcctcatgttgatcttgcggtctgacggagtgacgtaaataatatcattctgccggatatagtaataaggagaggagaaaatggacttgctgcgcaggtccagcttgacgatcttccggtcacgctccatttcccggatcagcacgatgtcccggttgccgtcgatattcaaatctcccgcccggctgatggcgtcaaaaatggtgacgcgctggccgtccacctggtaggagccgggattattcacctcccccagaacggaaaatttgaagttcatgatctggacgttgacggaggcgtccttgatgtaatcactgttgcggagctttgcggaaatgtcgtgggcaagctgggaacacgtcttccgggcggccttcatcttcccgatgaccggcaggacaatatatccctcgtcgtccaccaggtaccctttgggccgcgaattgctggcgttattggagatggaattgcccatttccgccatgatgaagggggtagtcagttccggctgcttgctgctgacggaaatataaagctgatcgtctttttgaatagtcgtctggtatttggtgactatatcctgccgggtctcacccgtaatgtcctggatatagagaacctctttcggattgacgcaggaggccagcagcagggagcagacagccagggaggccagccggaaaattccgggagaaaaaagagaggggcggttcatcatcattaaggtataaggttatggttttaaatggataaataatcaggattcttcctgcttggacggaaaaggcacaggcacggaaagatcgttcctgatgagcatgctgcccgagatattcctgaaagcgtcctcgcactgccggacgtccttatgggccagcaaccggacaacggtttggaaaacgatcctggcgtccatgaacagggacacattccgggcgtaaacgatgtcgtagcacaaccgcctgtagaacgggattccgttccttccgtatacctgggccatgccggtcaatccgggccggacggaacagcgcgccatgcggcagcggccgggaaaaacatccagctgctccggaatccatggccgggggcctacaatggacatgtctcccttgataatgttgaccagctgaggcagttcatccagggaatagcggcgtaaaaaagttcccagcggaaaagacctcaagtcatccggaagcaggagcccctccgaatcacgggcatccgtcaaggtcttgaatttaaaaaccctgaacaatttcccgcggtaccccacacgcgtctggaaaaaaaacggagacttccgcgtatgaaccaggagtattatggatataacggccagaagaggcgatacgattatcaatgtccataaggatatggcaatatccaatacgcgttttccaaaaaacttatacatggctccgcacgcaaactaccggatttcaaatccggcatctgactttccggagaaaaacgctcatcatcaatgatgataaataacttgcatgattctaaaatttcctttcacgccgccttgcggaagccctgccatttatatattcaaccacaagtatctgatccgcatgaaaaaatattaattcgtcattgacggcggatttgaaatccgcacttttcatgaacgcaacaacaacaaaatggaaaggcgaaaaacgccgccattcctgaaaaatgaaaccgctttccacgctcacaggaacaaccagaatattccgggttcaaaatgccgcaattgaagaggaccgcaatggaaaaacaggaaaattaaggaaaaagaaacctgaatttccgagggctggaaaattctttcggaaaaggaggcattccgaagaaatgcgcctggggcatgcgccaaaaagcgcacatcttcacggacaatgaattgccggcaacaggcatcaagacaaaaaaccggttcctatgatgccataggccggatggcattccctgccggagttgaaccgagcctttgccgttggagagacggccttcctgaccgctagaagaagggaacgttacagccggaataaaacagcccgcttttcgcaagccgctggaactggcatagcactttcccggaaagagtcaatgattttgccgtatatgttcccttttttaatcaaacacgggattccagcagggatcgtctgccgcatcaaagcacagcagcgcctgttccggcgtgttcttttccaaagccatgggaggcagttcatcccgtccgaaccagcggctttcagacgtttccggattgggctggaaggagccgcccttttcttcacataatacaaagaccttgcaaaccccgtacgcataggggggagggttgtgcctgttcctgtcatgcagggcaatcaggcgcacggcctccacacgcaggcccgactcttccagaacctccttgaccgtgttatcccgtacggactggttcacatccacccagccgcccggcatggaccacaagccggagcctttttccttcaccagcaagattttaccttcccggaaaatagccgcgcgggtatccattttcggcgtttgaaatccggtctcactgcaaaacagcccccggaccgtatccatatccagcccggatttggcgctcatgatttccgcggcaatttccctcaaccgctggaaacgctccagatcataggggtctttcgcatacgttatccccgcctgggccataaactgaagttccaccgcccattccagccattgcggaggcagcgcattacggaccgtttcaccagcgtcatccatgcgtccacgttaccacaagaagctatcccggcgaaccttattttccatccggccgccttccgtggcggattgttcactcaggccttctggaccattccccatccccatggcagatttccccgcgtaaccggcacgattgattcatccagtcttaatggaccaaggtacgggcactccccaggtttgccgttccgcatgaaaaaagacgcctcatgacgctccaggccgcatgaggcgttgatcatttttccccttttacttccggcaccgccacgggttcccccaggaaccggggttcacgcccccacagccacaagtccagcatcatccatacgcgcgccgcgcgctccctgaaccagcttctaatgcgtgaactgcggttgggaacatccggggcgctgacggcccatgcgtccatttcctcatgtgcagcgatcgccagggcgcgttcattgtgaaattcctgggaaacgacgatcatggttgaaacgccaaagacctccttcatcctcacgacggaatccagcgtccgcagccccgcaaagtcacacacaatccggtcctccggaacgccgcgctccaccagggcctgcttcatccattccggttcattgtaggagtgggagctattgtccccggaaacgacaaaaaccgtcgccttcccggccctccaaagttccgccgccgtatccattctattatagaaatacccgttgggacctcccatgaacgcaggggagcaccccagcaccagggcaggcgcgcgaacgggaacatccgcggaatgctcaaaaaccctgcctccggaagcggaagctatgtaccactccgctcccgccgacaacaaggccagcgccagaaaggcgcctcccgccgctttcaaaatgaaaacggctatcctgcccttcctgttccagccacggtccaaatgctttcccatccaataaacggctcctgccagcatagacgctctatttcactttaagctttgaatgtaaatagttcttaaccgcaggatccaccgttttgatatccagcaccgtatcaccccatttattttttgccttaatgtccgctccgtgatccaccagaaatcccgccacgtccagataaccgccttccgcggcatagatcagagcggtttttccatgcctggtctttccctttaccttggctccctttttgacgaggtacttgaccatatccaggcatccccgctcggaagccttcatcaaaatggagtggccttccttgtccgtgccattcaaatccgctcctttagccaccagcatttccattccatccatattccggccatcagcggcatacgccagcacattccggcctcccttgtccctggctttcacgctggctttcctgtcaatcaagtaggcaagaatgtcattgcgcctgcacgttgcggctctcatcagggcggtcgtgccgaattcccggtccttttcattggcgtcatatttgcattcttccatcaaatacttgacaatgtccatattgcccccttccacggctctcatgaaaatggaaatgccgtactggtccacagccttggggttggcgcctttggacagcaggtaatcaaaaatctccttatctcccacatacgccgcccaggcgagaggagaccaggtcatcgcgtccctgccattcacgtcgtttccctttttcaagccttccagctgcaacccgagattcacccagttcttcagcctgttttttgactttaaggggtcgagggcctccttcacttcctttaccttctttaaagcggcatcataagagtcaattccagcggcagcggcgtgagaaatggaagccgcacacaggcaggcgcccaccgcccaaacggagagtttgttcaaattcatggtcatcatagggtgtggggatggataccggaaagccggcagggaaacccccggaatggacttcaatataaaatggaaaaaccttttggtcaataagagaaggaatgggccaacaccggacctctaacaaaaaatggctcctacccaaaattccatgtgcccggctgtccgggaccccggacagcgtcactgcgcaatcctgcaagggacgcttgaacataaatgccccggggccttttacggaaaaccagatgatttcatcgcaaaacagggagaataccccacccggcagtactgggggaggctcctttcaacacattcttcaggtaactattgttgaccggagatacaagtaaaagcggtaatttccgtatgcttgaagacggaaaaggcccgccagaagcgagccttttatctacataatttattgttattcagcgaagtacccccgaccggactcgaaccggcacgtccttgcggacaacagattttaagtctgcagcgtctaccattccgccacgagggcattgaccggacggcactctacaggaatgccgcggggattcaagcacgaatccccttccggtttttaaatccctacccgcagacttccacaaccatgcttatttccaccgccacgttgagcggcagggcggacacgcccacagccgtgcggctgtggcggccgatttcgccaaaggcttccaccagcaggtcggacgcgccgttcagcaccttgggatggtcgtagaaatctgggccggcattcacaaatccgttcacggccacaatgcgggaaaccttttccagggagcccacggcctgcacgatgacggccaggcggttcagaacggcggctcgcgcggcggcctgcccttcttccaccgtcaagtcctgccctaccttgccgaagtatttgtcctccccgttcacggagatgccgccggagaggtgaagcaggttgcccgtacgcacgcattgcacgtaggaacccacgggcgcgggcgcatcgtaaatggcgtaaccaagatcggaaaggcgttgacgtattttatccataatagagaatttgacaaaggttggattggaagaatgcaccggaaatatttgcgtttccagatgcatttcatgacattttgaacaattttcggcctgtttgcacgtaaaatgattgccatctacctcatttagttgctattgaaacaacccgtacatgatgaccgaagaaactccttccacagaccccaagcagcaaattccggacctttccggcttggccgacttccaattcggtccggcctgggcgagaccgggagcccgtcaggaacgttccgcgtcctatccggaacgcaggtccggcgacaggcagggaggcgaccgccgtccgcggcgcgacagccgcgaaggacgccagccccggggggaacgccgttttgacggtcagaatggtgaaagaagattcaaccgggaagaccgcacccgcggttccttccgcccgcgccgcgacggagaccgccgcgaacaggcgccccgcccgcccatggcggaaccggccgaaggcctgcgcgtggagctgcgccccgtggattccggcctggccgccctgcaccaggaggtgcagaagcaccgccgcactatttccctgctggaccttgccaaggtggtcatgggttcctacgaccgttatgacctggtgttcatgaagcaggagaacggcccggacctttaccactgcaagcacggcgacggagcctgcttcatttcccgccaggaggccgtcaagcatctctggcagtcttcctggatgcccaagtattacgagtccgtggaacaggaagtggaagcgcccaagggcgatttcaaggcgattgccaagtgttccctgaacaatgaactggtgggccccgtcaactggcacggctaccagtccgccctgatgaacctgcaccgcaccaagtttgccagcatgccctttgaggcattccgttccaagatcgtgacggacaagagcgaggaagccgtgcaggcatggcaggaagccgtttccaagcgcaccgcctggaagcccgtccgcgaaggcgcctccgaggttcttctggaatcccccgccgccgtggaacaggatttcgagtccaaccactttgaagagtgctatgacgtcacggacaaggtgttcgtcaacggagccgtgaagaaaaaccatctttcccccggcctgtgggcgcacctgatccagttgtccggcaccacgcgccgccatcccagcatgctgattccgaacctttgccacgggctggcgcgccaccacatgcccattttcaagtggaagggcaaccattacaccggcccggcacgccccaaggccatggaagaaggcaccgttctttcggattccctgatgtccatcgccacctgggcggccaacaatccgggcaagggcgtggacgccatgctcagggaactggcccccgtgccggacccggaaaaggccacggaagaggaagtggcccaggctacggaaaaacagcagaatctggtccgcgacctgttctggctgtccgaacagggctacattctggttttctccaacaacaccgtcagccgtccgaaggccgttccggcccagtccccctctcccaaaaaggctcccaaggagaagcagaaaccggaagagaaggcgccggacatgccggtggcggaagccgccgcgccccaggagcagaaggaggacaccccttcttccgaagccccggcagcccgggaggaacccgctgaagaaactgacacggcagccgagcctgcggaagcagccgcccctcccgtggaggaagaggttcctgcggaaaatgttccggagacggttgccgcaaaagcctgacgcctttcccgaattcccccgtcatacagtccgcaggattatcttgattctgcggactttgttttgtagaagaaaaggaaatcaacaggattttacatatgatcagtacaacaatggcaaccgctcttaatgagcaaatcaaatgggaaatgtattcagccaacctttacctggccatgtccgcctacctgcaggacgccggcctgacggggttcgcccactggatgcgcgtccagtaccaggaagaaaccgcccatgccttgaaattttacgatttccttctggcgcgcggaggccagtttaccatgttgtccatcgatgccccggctgcgagctggtccaacattctggaaatgtttgaagaaacgctgtcccacgaacaggaggtcacgcgccgcatcaatgacctggtccgcctctccaaggaggaaaaggacttcgctacggatattttcctgcactggtttgtcagtgaacaggtggaagaggaagaaaccgtcaaggacatcatcagcaaactgcgcatgatcaagggagaaggccagggaatgctgctcatggacaaggagctggcggcccgcacctttacccctccccccgccaattaactcattcagccgcttttccggccattctccggcatgttttccccatgaaaacgcttttccggagaatggccggcagaacagttcggctatcaggagcgcatgaacatcaagataagaccggctgcaagggaggatgtccaaaaaacaagcgctctatatgatgatttttttgcctgtaatgctgcacagctaccgtaaaattgcgttgcggcaactgaaacgggagattgcccgaatcctgtgattgaaagcggcagcggcgataatatgatcgcggaaagagacgatgccgttatcggattcgtgcatgttgaagaaaacgcgccacctccctatccttccgtagttcctcataaatatgcctgcatcatagactttttcgtcatgcgggaatacaggaggaatggagcaggacgcctgcttttggataaagtcaaacgctgggcaaaatcacgaaaccaggaatacctggaactcatggtatgggagaataacggcagcggcagaagattttacaagcgtgaacattttacaacagcatcccggacaatgcgcctggacgtgtaaccgactttttaaatggaattattaaagatgaatgattttgaaacagccttggtgagcccggggaaaaacagcctcattccggaggaggacaactggttcggccccctcgtcggaacctgggatattgaatgggttgacgggcacggcacggagcatgaacgccacgtgaaaggggaatggattttttcatgggtcctggaaggcatggccgtccaggatgtgttcatctgcccttcccgggaggcccggaagatcaaaacctggccggacgccgcctacggcacgacgatcagaatttacaatccccagcaacggacatgggacattttttacggtgtggccggagaagccacgcggctggaagcgagaaaggaaggcagccggattgtcctgacggaaattaccgggcaaaagatgaaatggattttttccgaacttacggaaaatacgttccattggagaaacatggccacggaggacgggacgcgctggttcctccagggggaagcgttcgccgccagacgtacctagaacacgcttgttcatcggcatggctgaacccgccgtctttccctttctgcccccttccaggcccgtttaaaggggttttccctgccttcactcctgtccggcaaataaagcagcccggacccaacaaggagccatgcctgccgatgcccgccaggcatccataagaatttccgggggtagaaccggcttttttctcttctccggcagtccagaactgatgacgggacctgcctccaaaggcggcagcatcctgtttttcctggcgcgcacccgtataaaacttttttgaaacaggcctccctttcccatggagagcccttgcatgaggcctctttccggtccgggcttgtcatgctgacgcgcccttttatgccagatttatgccggtttcccggcagttccggaaaaaactttcattcatcaacagcttacgactatttttaacatgttattcacattctatcttcaaaatacaaccattctattaacattcaacatattgtatccgaaataccatcaaaaggcttattatctgcaaatgtaaaattttaataaaaatttatatttttgacttgctcgcggaaggcggcggcggtaggttggctgaaccgccgccaagcctccggacggcaccgttaccaaacctaccccagacattcaccacgaccatgagctccatttccgaagaagcaaacaagctggcggatttcatcctgttcacgcaacgttcctgcattctgaatctttcttcagaattgaatgagggcaaggtttcctatccccagtttttcctgctgacctacctggccagcgaggacttcctgagcatgtccagcattgccctgaagatggggcattccacggcggcggccaccggcatggtggacaaacttcaggagatgggctatctgaaacgcatgagcgcggccaaggaccgccgcaaaatcatggtcgccatcacccaggaagggcgcgacctggtggaccgcatgcgccagaatatcgtccgggacctggccgccctgatggccggagcggaccccgacgcacggcagacgcttgccgataccggaaaatccatcaggaagcgccgcctggcctgatttccggccttcttccctccgttcctttccgggtaaaaaagtccggaagccgaatctccggcaacgcccgccctttcttttactatttattcaggagcgtggtgaacagggagcagcttccttcccttgcagcaggagcaggccgcgttcttcacggcctcaaaacggagattccccatgaaccggccatccccggcatcccggtccggtcccatcccgatttccggccttccggactggtccgttccgctcccccctgcggatgatttttcccttccccgcttttttaaaagggcttcctgcggagattgtttttgcctgaactggggcatcgtgctaaatactggcagtcacgaatgcaacagaccatggatctccatacctatttacgcaattttccggacgcccagggccgttttggcgaatacggcggcgtttacctgccggacgagcttgttcccgcctttgaagaaattacggaagcctaccagacgatagcccactccgcccagttcatcaatgaactgcgccgcatccgcaagcagttccagggacgccccaccccggtttaccactgcgaacgcctttcccgccacctgggcacttcccagatttacctgaaacgggaagacctgaaccatacgggcgcccacaagctcaaccactgcatgggtgaaggccttctcgccaaatacatgggcaagaaacgcatcattgcggaaacgggcgccgggcagcatggcgtggccctggctacggctgccgccttcttcggcctggagtgtgagattcacatgggagcggtggacattgccaagcaggcccccaacgtcacccgcatgaaaatcctgggcgccaaggtggtgcccgtcacgcacggcctccagagcctgaaggaagccgtggattccgcctttgattcctacctgaacagttatcaggattccatttactgcatcggttccgtggtaggcccccaccccttcccgcagatggtgcgcgatttccagatgtgcatcggcgtggaagcccgggagcagttcatggaaatgacggggcttcttccggacgcggtgtgcgcctgcgtgggcggcggcagcaattccatgggcatgttcaccgccttcctgggagacccgctggatatttacggcgtggaaccgctcggcaaggggcccaggctcggggatcattccgcctccatctcctacgggagcaagggcgtcctgcacgggttcgagagcatcatgctccaggacgaggacggcaacccgggaccggtccattccgtggccagcgggctggattatccttccgtgggaccggaacatgcctacctgcacgacatcggccgcgtgaattacgttaccgccacggatgaggaagccgtagacgccttcttcaagctttcccgctatgaaggaattattcccgccctggaaagctcccacgccatcgcctacgccatgaagtgggcccgggaaaacagaggaggcgctatcctggtcaactgctccggccgcggagacaaggatgtggattacgtcgtggagcattacggctacggggaagaccgccagttcccctcctgatttcatccccttcatcgtttccggcggagggaggatttccctgccctccgtccgccccctttccgtaaggcccttccgccacgcccctccatgaaagaattgtccagcctggttcaacggagtttccacgtcgttccgcgggaagaggatttccataccctggctttgggagcgtccggccgcaccatcgtccgcatccgcctcggctcccgcacatgcatcggcatccgctggggcaatgaccgcgcggataatgattccttcatccccgcggaccggcacctgcacgcccacggcgtgaacgtgccggagatttacgactacgaaccgctcggcgccggctgcggggccgcgctggtggaagacctgggagacgccagcctgctggccttccggggagagtcctggccctccctgcgcctgcgctacatccgggccatggaacagctccatctgcttcactcctgcccgtttccggaggagttccccctccagcccgcctttgacgaagccctgtaccgctgggagcagtcctattttgcggaacacctgctgggggcccacctggggctggaaacggattccttcctgaaccatccggccctggaagagctggcgcaattcctggcctcccttccggaatgccccgtgcaccgggacagccagtcccagaacgtgcacatccacgcgggtaagacctggctgatcgatttccagggcatgcgcggcggacgcccggagtatgacctggcctccctggtttatgacggctatgcccgtctggaaccggagcaggcggaggaattgctcagggagtgggaaaagatttccgggcagcccctggatgaccgcatcttccgcgcctgcgccctgcaacggctcatgcagatgctgggcgcctacgccaacatcggccacaaccagggaaaaacctggtatctggcccagattcccgccgggctggaacacctgcggaagcttctgcccggctccacgcttgcagaaccgctggcggccatgctagcatgatctttctccctgcccctgatgacgctgacccccagattcctgcttgtgctgtccctgttccagatttccctggggctgggctggattctggggtacgtgtttcttccgcccaccattttctgttatgagcgggcggcggaacgttccctggcaggagagtaccggaccgtgcgcccggaaggtctgaatgcggaaagcagcatcgtcctccagccttacgattatttcaacaaggggcagacggcccagcttcccgtggtttccctgcaccgggaatcctccctgaacagctttgccgcctatcctcccaatcccatggattacacggtgctgttccgccacctgtacgagcagggggccaggaatgtttacgtgatggctcccatggcctgggaggaagagccggacagcatcgtcaaggccgccgtggggtatgagctggaccgcttccgccacaaggcgctgggacggcagatgagcgagtcctcccgccacgcccccctcccgccggactggaaaggcctggttattcccgctgccaacatcgtgggaaagacggacctgttcccgcgcgcggacaggctggtgggggaagctccgcaactgaccacggcagcccccgccctgggaaccgtcgtggaaaacaacgaactgttttccccctccccggagaacagggtttctccgccgcttttcatccgctggggtgaggagatcatccccacccttccgctggccgccgccctgaacgcgctggacctgaaacccggcgacgtgagaatcattccgggcgacacccttttcctgggcggcaagcgttccgttccgctggacaaatatggccgcattcccctggcggaacacagcagccccaccatgctggacaccaaggaggtgatcgtccccgtcatgtccggcctgcggccgccggataccaccgccgtcagaaaactgctttcctctgcggacgcggttctcgtttccgaaccgtccgccctttccgacacgccggacgcacaggccctcctggcggcgcaaaccatccgcaccctcatgggggcgctggctccggccccggccgtcctgattccggtagcccccgtctgggtgcagtgggtcatcgtgctggacgtcctgctcctggcagtctgggccctccgtttccagcgccgggggcgtttcatcatctgggggctctgcatcctggcggccccggtcatcgcgtggtacctgttttccgtccatgacacctggttccccgtcatgacgcccgtggcggcggtgctgtgcgtagtgctggcgggctgcctgttcccctggctttcccccccctcccgcgatgcggacgaagaggaggaggaagacgccggagcccccctgccggaggggaatggagccgggcatgtgctccccccggacaacctgtaccaggaactcaacgaggtgcctatcccccaccattccaaaagagaacatcccgactcatgacacagcgcaagcatatccttttcatctgcaccggcaacacctgccgcagccccatggcggaaggcctgttccggaagctttcagcgcatcatccggaatggcgcgccggttccgcgggaacttccgcatggcacgggcaggaggccagcccggaaacgctccacgtcctccaggcgcacggcgtcaacctctcctgccatgaaagccgccccgtcacggaagaactgatggaaaacgccacggacgtctatgccatgacggaaagccacctggccgccctgcttgccaatttccccgagcatgcggacaagatcaggctggtcacctgctacacggacaaccgcagcattgcggaccccatcggctgcggtcaggccgcctacaacagcgtggcgcggcagttgacagccgccatccaggccatcatcgcccggatggaacagcaagcgtgacaactctttccacccccatggccgccccttccatacgcattgacctgtcccgccaggagctggtgctggaagaatccggaaacatcctgctccagtgccccgtttccagcggaaaagctggcacgggccatgaagagggctccggaaaaacgcccaccggacatttccgcgtctgccaaaaaatcggggacggagagccggaggacaccattttcatctcccgccttccggcgggccgctaccccgccgccatcccggaaagcctggatgaacattcggactttatcctggcgcgcatcctgtggctggacggcatggaaccgcacaacgccaacacgcggagccgctacatctacatccacggcaccaatgatacggacctgctgggcgccccggcctcccatggctgcatccgcctttccccccgcgacatgctggatctttttgccctggcggaagaggggatggacgtgttcattcagtgctaaaccgttcttttttagatacaatctaaaaaagttattcagggaaaaggaaaataattgaacaaaggtcctcttgggatgtataaagtatgaaggtaccggtatttggctgccggcctcctgttccataaacatccactcatccccaagcaatcatggacgatccggtcttattatcccgtcttcaattcgccgttacgatcatgttccactacatcttcccgccgatgaccatcggcctgggggtggttctggtcgcgctggaaggcctctggctgaaaacgaagaacgaactctaccacaagcaggccaaattctggaccaagatattcggcatcatcttcgccctgggcgtggcctccggcatcgtgatgggattccagttcggcaccaactgggcggactattcccgctgcgtgggcgacatcttcggcagccctctggcggcggaaggcatcttcgccttcttcctggaatccggcttcctggccatcctgctcttcggctgggacaaggtgggacccaaaatgcacttcttctcctcctgcatggtcgccctgggcgcccatttcagcgccatctggatcattgtggcgaactcctggatgcagacgcccgccgggtacaagctggtggaagtgaacgggaaaatccaggcccatatcaccagcttctatgacgtggtgttcaacccgtccaccgtggaccgcctgacgcacgcgctggccggctgctggctggcgggggccacgctcgtcctcagcgtctccgcctggtacatcctgaaaaaacgcttcaccggaggagctgaaaaaagcttcaaggtggccctggtcatcggcctcatcggcgtggtgggcatgggcatcacgggggactccagcgcacgtgaagtctccatccaccagcccgccaaattcgccgccatggaaggcgtgatggaaaccggcgctccgctggccctccacctcgtcggctggatgaacccgtccacccatgaagtgacgggcatctccatcccgtacatgctcaccttcctgacccatcatgacctggatacgaccatcaccggcatgaacgacatcccgcaggacgaacgcccccccatcctgcccgtcttctactccttccacatcatgatcctgatcggctgcgccctgggcgccctgttcctggtgggcctgtggggctggaaaaaaggctggctcttccagaagcgctggctgctctggtgcttcgtcttctccgtgctgggcccccaaatagccaaccaggtgggctgggccgtggcggaaatggggcgccagccgtggatcgtatacggcatcctgagaacggaacatgccgtatcccccaccctcaccgcggcggaagccctttcctccctgggcatgttcttcgtcatttatgccctgctgctggccctcttcctctatcagatcacccataaaatccacaagggtccggaccaggaagcaaacgaagacgacggcaccggggaaggcaagctccaggtccccttcgtcaaagactaaccttcagcccctcttaaaaccatgttggacaatcttactcttacagacctgcaaatcatctggttcatcctcgtcggcgtgctcttctccggatatgccattctggacggctttgacctgggcaccggagcccttcagcttttcatcaagggtgatgaaaacagaaggctcacgctaaacgccgtgggccctgtatgggacggaaacgaagtctggctcatcacggggggcggcgccctcttcgccgccttcccgtacgtgtacgcctccgtcttctccgggttttacctggccttcatgctcctgctgctcaccctcatcttccgcgccgtctccatcgaattccggagcaagcagcccatgaaatggtggcgcagggggtgggacaccaccttctccatcagcagcctcctggccgccctgctcatcggcgtagccatggggaacgtcaccaagggcattccgctggacgaccagggcaacttcactggaaccttcctcagcctgctgaacccctactccgttcttctggggctgacgacggtggccctgttcgccatgcacggaggcatctacctgctgatgaaaacccagggaagcctgcaggaacagatcaaaaaactgctccggccctgcgtcatcatcttcaccgtcctgatcatccttcacggagcggccaccctgctgtacgtgccgcacgtagcggcggccctgcaccgctccccctggatttacggcatcgcggtgctggcggtcatttccatcaccgccatctggatcttcatccacaggaaccgtccgggctgggccttcgtcgcctcctgctccaccatgggctgcatgatggccctcttcggggcggccatgttccccaacctgctctattccatgcccaatccggaaaactccctgacgctcgtcaacggctcctccacgcgggaaagcctggtggtgatgacgtacatcgccatcctgggcgtgccgctcgtgctggcctattccgccgccatttactgggtcttccgcgggaaggtccagcttaacgaacacagctattaatgccctgcgggcagagaatagtgaccagtgaagagagaatagccccatatcaacccatcccgcagcatgaacgcctccatcttttccagactcgcgcctgaggaaatcacggcgctccatgaatcatggaagaacgaccccctgtccgtagatcccctctgggcagcctggtttgaggggtatgaactgggcagcggcggcgctccgcaggaacgcggaaacaccggaaacggcacggacgcctccccctacaccgtgcctccggaaagcgcggaatgccgcgggcgcgtcaaccagcttatccgggcgtaccgggtcatggggcaccagtgctcccacttcaatcccctggcctccccggacaaggcgtgcacccctgtcaacctggaggaaatgggcttccgggaggaggacatggaccagcccgccaacatcggcacgttcatggacggccggacgttcaccctgcgtgaaatcatcagccacctgcaaaaaacctactgcggagccatcgggtttgaataccaccacatagacaatctggaaatccgctcctggattgaagaaaaaattaagctccgggcgaacggcgtggactacggcccggaggtccggcgggacgccttcttccatctctgcaaggcggaattgtttgaggaattcctgggcaagcgcttcatcggggaaaaacgcttctccctggaaggaggggaaggcgccatcgtcctgctggacgcgctcgtcaagcggtgccccgccgccggcgtctcccacattgaaatgggcatggcccaccgcggaaggctgaacgtgcttgccaatatccttcacaagccgctgaaaaccatcttccatgaattcacgccggactacctgccggaatcccccatcggcaggagcgatgtgaagtaccacctgggctatgccaccacgcgccatgtggacgggcaggaactccacgtgcgcctctcctccaatcccagccacctggaagccgtctatcccgtggtggaaggccgggccagggccatgcagcacaatctggaagacgcagagcgcaagcatgtgctgccgctggtcctgcatggagacgccgcctttgccggacaggggctcgtggcggaagtgctgaacctctccctgctgaaaggctaccggacggggggaaccgtgcacctcatcatcaataaccagatcggcttcaccaccagcccggacgaggcccgctcctcccgctacgccacggacgtggcgcagatgctccagtcccccatcctccatatcaacggggaaagcccggaggacctggtctgggcggcggaattcgccctccagttccgccagcagttcgggcgggacatcattctggacatgtactgctaccgccgcctggggcacaatgaaacggaccaggccgccttcaccgcgcccatgcagaccaaacggattgaggcgcgccccaccgcagccgccctgtacggaacggaactcagggagcgcggggaactgacggaacagcaagagcatgacatccgggaacacatctgggacgggatggaacaggccctgcagcagatgaaggaaaacccggctgattacatcctccccgccacctcgcaggacgcggatgaaacgcccatcccgcgcaccagcgtgcgcacggggatcagccctgaactgttccaaagcgtcggaaacatcctgacggaactgccggacggcttcacaccgcatcccacgctggaaaaacgcttcctctcacgccgccgggatgccttccgtgacggcggactgctggactggggcatggcggaagccctggcgtggggcagcctgcttacggaagaccaccacatccgcctgtccggccaggactgccagcgcggcaccttctcccacaggcacgccgtcctgcatgatttcaacgacggctccctgtatacccccctggaaaagctgaaccacggcactaccacgttccgcatttacaattcctccctgtcggaagcctccgtgctgggctttgaatacggctacgcgctggacagcccggacgcgctggtcatgtgggaggcccagttcggggacttcgccaatggggcgcaggtcatcgtggaccagttcattgcggccgcggaggccaaatggcaccagaaaaaccgcattgtgctgctgctgccccacggctatgaaggggcgggctcggaacactccagcgcccgcatggaacgctatctccagctctgcgcggacgacaacatgcaggtcatcaaccccaccaccccggcccaatacttccacgccctgcgccgccaggtgcaccagaacgtgcacaaaccgctgatcgtcttcacgcccaaaagcctgctctcccgtccggaggccgtctccccgcaccgggaattcctggccccctcccgtttccacgaagtgctgccggacccggacgctcccgcgccggaccaggtaacgcgcgccgtcttctgcaccgggaaagtttactatgacctggccgcctaccggaaggaacggaacatttcagacacaatcattatccgcctggaacaaatctacccgctggcccaggaacagctcacctacctgctggccccctaccagaaagtgcgcgacttcgtctggtgccaggaggaaccctccaacatgggggcctggggccacctgcggaacaggctggggcgcctcttcgccacctccttccgctatgcggggcggccgcccatggcctgccctgcggagggcgccaaggccctgcacgccgccgcgcaaaaaagactcatcgccaccgccttcgggccgcgggcgcaatcctgaacccatcttcctcccatgagcgacatcctgatccccaacttcggagaatccatcaccaccgccaccgtagccgcgtggcacaagaatgccggtgacacggtagccaaaggcgacaccctggtgacgctggaaacggacaaggtttccacggacctggaggcggacgaaagcggcgtgctggaaatcctcgtcccggaaggagcggaagctcctatcggggctgtcctgggccatatctcctccgctgccggaaccgccgccgcaccggaaaaggaagacgctcccgcgccgccggaaccgcagaaaaccacagcgccggaaacacgggaggaaccctcttccacagcccccgccgccaggactgaatccccggagcaaaaatcggaaaagcaaatgtccgccccggaacagaattccgctggagagagcggaaagcctgaaaaggaggctcccccgcgtttcatcaggaaacccatgagccccctgcgccgcaccatcgcggcccggctggtggaggcccagcaccaggcggccatcctcaccaccttcaacgagtgcgacatgtccgccgtgatggagctccgcaaacaattcaatgcggcgtaccgggaacggtacggcaccaagcttggtttcatgagctttttcatcaaggcggtggtcaaggcccttcaggaagtgccccaggtcaacgccagaattgacggcacggacattgtggaaaacctgtattacgatatttccgtagccatcggcacggacaagggcctcgtggtccccgtgctgcgggactgcgaccggaaaacgctcccggagctggaactggaactcgccgccctgacggaaaaagtgcgcggcggaagcttgtccatgcaggacctgcaagggggctgcttcaccatctccaacgggggaacctacggttccctgctctccacccccattctgaacccgccccagagcggcattctgggcatgcacgccattcaggaacgccccgtggtccgggacggccagatcgtcgcccggcccatgatgtacctggccctttcctatgaccaccgcctggtggacggcaagcaggccgtgcagttcctcattgcggtgaaaaacgccgtggagaatccggtgtttgagctatgaggaccggagagaaaaagactaaatactaaagaggaaagactgaatgtctttcctcttttacaggggttctccgggatcaaaatcccttcattccatggaacgggaaaaccactccttgccataagcatggatatgacgctccaaatcaggattggtgattctgttacgaataatcaagtccacctccacaggcaggttcaactccgtgagacgcgcttggagagtcaaaaggacggacaaatccaggtcctcgccctccagggcaagatcgatatcggacgcaggcttccacgtgcccagggcgcgggaaccgaataaaacggctttcctaatctgcggagtctgtgaaagaatttcccggatgcctgagcgcactttggccgtcaggccatcgttcagtcctctttctccgccatcatgttcagattttccacacatggggccagcatgggaaagaattttcccttaatcagggaaaccgcctcttccgcgctggaatcatcataagtatgtacaaacaaattgcggctttccaacgccagaaaccagcaatcaatatggcctatcaagcctgcgccaaacgcctgcctgatggcttcgcgggggctgttaacgctgtagccgtcatagaccagtttatctttcaacgttttccagcacagctcaaacgtaaattcataagtctgcaccagtccggccatttccaattcattgtattccggcaacgcgcaagcatggcgcaaccgggaaaaagccttattcaggttttgaagcctttgtttccagcgcaggttaccgttcatcttttttaacggagaaaaagagccccgttccggggctcttcccgtgaaaaccgttacatgtggatggcgattccctcggaagccagcatggattcatggatggcctccgacagcgtgggatgggcaaagatggtggcgtggatgtcctcgtccgtcagttccgcctgaatgccgacgcccagcgtggcaatgagttccgtggcttccggccccacgatgtgggcgcccagcagttctccgtgtttggcgccgtacagggttttcacaaagccgtccgtttctccggcggccacagccttgccaatggcctggaaggggaatttacccaccttgtattccacgcccgcttccttgagggcgcgttccgttttgcctacggaagccacctgcgggtagcagtacgtgcagcttgggaagaagccgacctgcctgggctggtagtccggattaaacatgccttccacggcctgcacggcttcaaaggtggccgtatgcgccagcagcacgccgccgatcacgtcgcccgccgcgtaaacgccgggaatggatgtggcgtagcggtcattcaccttgatgaatcccttttccgtcagctccaggccgggagcggcgggaacgaccggcttcacgccgatggccaccaggcagacgtccgccgtgatttcctcttcctgtcccttgctgtttttcacgttggccttgaccttgccgtcgcaggtttccgtgacggattccacggaggctcccgtcatgaccttgatgccctgcttcttgaacgcgcgttccagcgtctggcaggagtcgtcgtcttcattgggaagcatgcgcggaagcgcttcaatgagcgttaccttggtgccgaaggagttgtaaatgtaggcgaattccgtgccaatggcgccggaaccgatgatgatcatgctttcaggccgcttttccagcaccatggcttccctggaaccgatgatggtggcgccgttgaggggcaggctgggcaccgtgcgggtgacgcagccggtgctgatcaggatgttttttccttccagaacgctcgtcgttccgtcggcggccttcacttccaccttgccgggggcggtgatggaggcttcccccgtgacggagtccaccttgtttttcttaaacaggaaacccacgccgccggccaggcggtcgctgaccttgcgggaacggccgatcacctcgctccagtccacgctgacgccttccaccgtcatgccgaattccttggcctgggccgtcacggtcaggtaagcctccgcatttttcagaagcgccttggtggggatgcatccccagttcagacaggtgccccctacccggtcgcgttccacgcacaccacggattttcccagctgggcggcgcggatggcgcccacatagccggcagggcctccaccaatgacgatgagatcatattgcatgaaattactataaaggcatccccccttgcgggtaaagaaggaatatgagcatgcgccgcctgaacggcgccccaatgacaaaagattaaatagaggggaaatgcctgttaaagactattttctcttttgtatttagtcttccgtctttattccttccccttcacccactccaccaggtcccgcatttccgcggcggtgtctgcgtacaggccgtccgtgtaggttccgcggtcgtacaggatgtttccttccaccatggtgaacacgcagtccttgccggaagcggcataaacggcatgggacgcttcgttgaaaatcgggcacaggttcggttcatccaggtccagggcaatcatgtccgcgggagctcccggagccagcgtccccagccccggcgtccggaagatgcgggcgccctccgccgtggccatgttcagcgcctgcgtggcgggcaccgcggtggcgtccccgctgcatcccttggcaagaagggcggccagcttcatcgtttcaaacatgtccaggctgttgttgctgcacgctccgtccgttcccagggagacggagatgccggcccgcgccatgtcccgcacgcgggcgaagccggaagccagtttcaaattgctgaccgggttgtgggcgattgccgctccggaagaggctaccagctccagttcctcatccgtcacgtccaccatgtgggccagcacggtgcgttcattcagcagccccatgtcccgggcataagccaccgggcgcctgtccccgtgcagggagcggcactgctccacttctccggcggattcggacagatggatatgcagcatcaggtccagttcctccgccagcttcatggaacgccggagcacgtcgtcactggtggtgtacacgctgtgcggcatcagggccacctgcaccctgccgcggcccgcaaagcgcgccgcctgctcccggtacagggcttccgccgcatcccatccgccgtatgccggggaaggaaacgcaaaaagagcctccccgcccacacagcgcattcccatgcgctccgcctcccggagcacgttgatttccagcaaataggagtccacaaaagccgtcgtgcccgtccgcatcatttcatacatgcccagccgcgcccccagggagacgattctatccgtcaggcgggcttccacagggaaaatatgcccggtcagccattccatcagaggcaggtcatccgcaaagccgcgcaagaaggtcatcggaacgtgcgtatgggcattgaccagccccggcatcagcaggacatttcccaggtccctgcgggcggcaggcttccacctggcttccagttccgcggcgctccccgtttccagaattttcccgtcccggacggcgacggccgcctttccggcggcgccggcctgccccgcgcccgccagcatgcgggaagcggtcaccagcaaatcacacgcttgttgttccatggagcagaatgtaccccaccgggcccgttctggcaacttcatctcccggcgcccggggatttcatgcaaatttgacatttcatgtttgacttcaaaagagaaaactgccaagaatgaaccacagttaaattcaccatttatccccatatgaacaagactatactgctaggtttggccctcgtggcctccgtgtccgccgccaatgcctaccacgccgacaaatacgacggccagttcggcatgtccctggaaggagcttacggcatcgccaccaaggatgccatgcccaacgtggccggcggcaatctgagcattttcaattacattgaaaccggcagcattgttcatcagatttccctgaacggcggcattctggcaggctcccaccatcccagcgtgcatgacctgggcatcagcggcccctataccgccagcgtccgctccacctacgttccgatgatggccggctatacgctgaacctccccatcggcgattacacgatgttctatctgggcggcaaggcgggcgccacgtacggagacattaaaaccaccatccacgggctggaagacgggagccgttcccacaccatctccaccaccaagttttcctgggcagcccaggccgggttcaagttcagcatctccaagagcgctgacttcctgatcggctatgaatattaccagattcagggctacagtgatcccggctaccacaccatcaagctgggcttctcctggaacttctaacaattaatcattgagttcattactgcctcacggcggctccgttcaccacggagccgcctttttcatgccggggggggagacgcacgccatgcggtaaccaaggcatcagcaaacacgtgttcttaaaaccagcgcgtgccgcgttcgcgtgaagattccgttgcttccaaaagtgctccaaaaagaaaaaggccgctccatcccaaaggatggagcggccctggaaagatcaggatttccgggaatccctatttggcaggcttgaacggcttgggagacgcgtagacttcatagtccttgatgcggccgttttcccggttctggcgcggcaggtagcggaagccggagagcttctgcaccttgcccaggtccagcacgatcatgtgcgggtgcgtggggttgtctccctgccacttggtgtgccagtaggtggtgggctggttgtccatcaccaagcccgcctgggcggcttcccccgccgtttcatgggagtccgcatagaccacggaccactgttcgcggggaagcaggttgccggaggcatccaggaaatccagctccgcaatggcggcgtgcggaccgttgtcatgggcgttcttgctgacgagggcgatgtagcgggcctggacgggagcgcggaatttgatttcctgctggtccgcgcccttggcgaaggttcccttgtgcaccagctggctggcggcgggagctacgggcttgcccacgcggaagacgtccgccatggcagggtccctgttgacttcgtaaatggcttccttcacgcctttcaccgtgccggagccgccgtccacgtccagcaccacgatttcatttttccccggtttcaggtattcgccggggcagtaaagcgcctgctgggagccgatgaaccagaagcggcccagattgtggccgttcacccacacgacgccctttttccagccgtcccgcatgtccaggtaggtatccttggggttggagacgttgaaatatccacggtggaacacgggctggtcgccgcccggcttcttgccggagaaggacagaagctccacgcccttgcaagggaggttgtagatgaggaagttttccagcttcttcccgtccagcgtgatggggccgcgtattcccttgcgttctccctggatttgtccgccgaagttgatgcggcccatgttttccacaaagatgtccaccgtatggaggcccgcgggaatgaccacgtcacaggcgtcctgcttgtagcggcggtccgccgcaccctgccttttgccgtccacgtaaacgatggcgcggtcctgcatgttgttcatcttcaactcgcccttcaccgggccgttcaccttcgtccggtacaggatgaagcccaggctctgccccagcgcttccatgtgcacgggctccttgcggatgacaggctgcgggagccggttgaacatgccggctttctccgtgaacgtgatgggcggcagctccatcatttccggctgcgcgggcggttcggggagcttgtacgtatcaccgtaatagtcctgaatggtctggcggaacgtgcggtagcggtccgtcagggttccgttttcagagatgggcgcgccgtagtcgtaattggtcacgtccggcgtgtaggccccttcccagttcgccccgttcatgaagccgaaggaggtgcccccgtgcgccatgaagaggttgggggagacattgttttccagcatccacttcaagtcgcggttgaagccttccgtactgccgccgtttttgggcttgccccagtggtcaaaccagcctacccagaattcgccgttgatgcggggagtcttgcccttgtgcttttccaggttggcaaaggcgcccttggctccgccgccgaagttcatggcgggaacgatgccgggcagcgtgccgttgttgatcatccagtcattcgggccgtccgaggtaaagggaaccacgcccggaagctccttctggatgacttccaggtgttttttcacgtagtccttgtcggagccgtaggagccgtattcattttccacctgagccatgatgatggggccgcccttggtgatctggagcggttccagcatggagcagactttcttgagataagccatggccggttccaggaaacgggggtcctgggagcggaccttcaggtccgcatccttcagcagccagccgggaaagccgccgaattcccattccgcgcaaacgtaagggcccggacgcacgatgacccacaggccggctttctgcgcctccttgacgaattccacaaagtccaggttgccggaaaagtcccacttgccgggttccggttcatgcacgttccagaacagataggtgcagacggtgttcatgcccatggccttcatgcgctggaacctgtcctgccagtgctcacgcggcacgcgcgggtagtgcatttccccggagatgattttgacgggctttccatccatcaggaatttttcctggttggtggcgaagacatgcttggctccgtcattggattccggcaggggcatgggagcggccatgcaaagatgccctgccagaagaagaacggaaaaaagtgataatttcatgatgatggagtcaataaacggttacagagaatcaggggaattatgatgaaaaaccgcctcctttcaatttaaaaaggagccggcgggctggttttattacggagcggcgtcatccggtctttcaacacgtatcacctgatgcctttcctcaaacggaacgccccggcgccgggcctcctgcgtttccttcttcattttttcatccacccagtacaggtgggattccagggggttgtaaatccggggggaacagaaccgcgtgggggattccggccagcgtatccagcgccagcaggcgacgtacgtgtagggttcccgccagccgggaatccagacgcagagttcatgaatgcgcttttgggcgcggtgaagggcttttttcagggcggcgccatccggggcattccgctccgcgtccagggccgcatccagttccgtgtccgccacggcaaaaatattgttcgtgttgcccacggagttgccgcgggcatcgtacgccagctcggaagcaaaggtttcataaagccgggggaacggcgtctggagcggccatgcccacagggcggcctggtaccgtttttcaaataccttccgggaacagacattataggtcagggggtccaggcgcaggtccaccccgcatttcagggcctcctgccgtaggatggaacaaacattggtcatcagggtggaggagtccgcgaaggtcagttccaccaccagccgttccccccgttcattcttcagcacgccgtcttcccccatttcccggtagccggcgcgggcaaaatgttccatggcttttttcttgctgtattccggcgctttcagcggaagcgtcagatcgccgtacccctccatgtaggagcccagccttctcatattcccgcggaacagggtatcaatcaccatgcccatgttcacggaatgcgccagccccctgcgaatgccgggttttttcagaagcttgtccgcacagttcaggtacaggccgtacggagggcaggcataaccggcttccaggctgtacttgtctatgtagccccggtgcacttccggcagttccagcctgttttcccacacttccggcttgcggacgttcatcatgtccagctctccgcggcggaacatttcaaccgccttgttttccaggtttacaaatacatgctccacctggtccgcattgcaggaatagcggtagtatttcctgtccttcgcccaccagtccttcacgcgggccaaggtgatgcgctcgcctatccggattttaccgggaactaccacgtagccccccgtattcgggggcgccttccactggtagcgttccagaaacagggagttgaaatcatggtaaaaaccgggatgggccggatggaaatccacacaggccatgtaaggcagcagcggcccgggtgacggaagcgtcagggcaatgacggaatccccgtataccgtaatctggtcatacgtggaacggaacagggtggtccagaaggggtcccgggcaaagccggacgtgcggaggcagatattcagcaggaaatcctgcgtcttcacggggcggccgtccgagtatgtcgcttccgggtccagatggtaaaaaacggtttttccgtccgcggagacggcccagcggtccgccagccccggaatggggcggaaggtttccggatgcagtcccaccaggggaagccacacgttgtcaatggctgagtagttgaaaaagttttcgcttcccggtccgaacgcccgcagggttccgggaaacggcgtattgatccacagccggaccagcccccctttcacggcgcggtggtcacccacttccggctcctccattccggtctgccattccaatcccgcaggaacttccttcaggggaagctggcggatatggtctttcagctccagccttctgccgatgcgttccacggaacgctcctgctcggccagacgccgcccatccccatcgccacgggagacggacagcaggcttttcttccgctcgccgcctgccagttcccggagcagttcccgctccacagacctgttccaccgttccacgaagccgtcaaacacggcaggcatgcccctgccgtccgtccgtccggaggcctcatgccaaacgtccgcttcccgctgggcgaagtaaaggactcctcccagaaagacggcgaggaccaacgcccccagaatgtacagccagcgaaacacagcttagattaccgccgcatgttaaccgattccggaaccaccggaaaacaaaaagcccatcttccgcccgtggctgttcccttcgcctgaaacagcccgcaagacggaagatgggggtgcaatcaacaattagtcctgaaaagcaattagaattcgaccgtcacgccgccgaagactcccagcccccgggcctggcgcggtccgaagttatagtcattcgtgatgatgaaattctggtcaaacaggttttccacacgcacatgaaacgccacattgtccgtcacctggtacctggcgaacaaacgcgccgtaaagaagttgtccagacgggcatagttgtagtccgtacggcccatggcggatgttacgccgaagccgaccgtcagtttttcaaccggagaggtataaacctccgcgttgatggtgtggcgggcagtattggccatctggatggtttcatatttgccgatggagtcgcgcttgggcatcgtgaaggtgtagttggcataatagccgctgttccacgcatccttgaactgccccttgaacgctacttccacgccataggaagtggcgtgggagaagttgtcgtaagtcgtgtaggagttgggccacgtgcctacgctcctggttccgatttcatcgttaatgcgggtccagaaccccgttacggaagcgtaatggttgtccgccaggcgctgttccacgcccaggtctccgcccagggatttggacacgtccaggtccggattgcccacgtagccgtaattggcggcgtactgttcaaagtaggtgggggcgcggaagccggaacccacggaaccgaaaatacgggtgggggaatccttgcccgtcaccttccaggaattggaataacgccacgtgaagtggttgttccagacggaatcatgctccaggcgcagggccacgctggcgtcaaagttgtccgtgggcgcccacatctgctccgcaaagaaggcaagcgtgctctgccattcatccttggcaacgtaattgttttcgctcatgtagtcggagcggtcccaggccatgccggcgaccgtcttccattccttgttccacgtaagggcattgcgccattccgtctggaagcggcggttgcgcatcacgttgggctggaaatcgaagcccggcgtatgcgtggaatagtccatgttgtaatgcccgatcatgaagctggtggaccacagcttggtaatctccgcatccacgcgccccgtcaccaggttgctgcggttcttgtcttccgtgttgtacaggtgggggtccgtcacggcgggccactggtcgtaatccacatacggcgtggggtattcaaagtaggaatccaggcggcggtaggtaaagcccaccttcaccttgtcattgacgtcatagcccaggcgcacggcttcctgccactggcggaagtcgttcatgcctttccggttgtcataaatggccggataaatggtgggatcgttctccgtggattcaaaccccacgcccacaaagtaggaaagcttcttgatcttgccggaggaagtcgcgtagctgttgaaggaatggaaagaaccggcttccgcaaaaatcctggtcacgggatcgccttccccttccggagtgtccatggcgacaacgccgccaatggcgccggaaccgaagacggcgccctgggcgcccttcaccacttccacattgcccaccgtaaagagattggtgatccccagcagcttgttgccggacatgttgacatcactgatgcgcatgccgtcaaccatggtcagggtgtaggtttccttgttcatcccgcggatgacggtgttgctcacggaaccgcgctgccaggtgccgccgccgtccagcgtgaagacgccgggagtctgggaaagggctcctgtcagggtttcaatgcccgctttctggaattcttccggattgatgatggaaacggataccccggaccggttgtacggcacgcccgtaaagtgggacgccatggtcaattccggcatgacctgcatggtttccgaactggcggagggcttggagtcttcttttttagcggactcggcaagagaggactggcctgcgaatgcggcaaggccaacggcaatagcgcccatctgaagggctttcttcgtataaagcatggttgtggtgccttacgttcggtaactcgccgaacagttggacaaccccacaggctggtcttctggcttgcgagccaggctcgcttacagtggcggtaccgctccggattcacaccggtattccccaatctatttcctgcccggctacgggcgtccctgaggtctgtaacccttcccataagggttcatgagacggatgaaataccaaagagaccggtatgacaagccaaaaaaatttttctttgaacattccgccgctttatggacgcttccttttttcagccgccgcgcgccatcccgtttttccaaccggagtcctccatttttgtcttgtcacccccggcgcgtacaggacatgatgcgcccatgacgcgcctttcaccctccttcccgcagcggggaaggatttccgttttcagaggagttcccaacttccggaaaaaccgtttcttcaaggcgtttccttcctttttccggaacaggcgccatcccggaacgccggtctcaattactacggcatgaacagtttttcacacggaggggatttaaaatccctggcggcggacgccggacggcccgaacgggagattctggatttcagcgtcaacctgaggccggagggaatgccggagttcattgcctccgcgctgtggaaggccatggatgcagccgttccctacccctccccggacatggcggagctgcgggaactggcagcggttcattacgggctgccttccggctgcttcaccttcggcaacggggccaacgaactgattcacgccctcccgcgcgcgctggaactgaaacaggccgttattccggaacccgctttttccgagtacaggctggcctgcctgcgccatggcacggacgttctttccatccggacggaagaacggaattcctttattccgtcacccctcctgacggcggaacaggccgcaggcggaagcgccgttttcctggcgaatccctgtaatccgtccggcggcctgctggacgttccggccctgcgccaggccgtgcgggaccgcgccggagtcatctggattattgacgagtccttcattgactatgcggacggaacggaatcgcttctccgtgacgcggcccttctgcccaacctggtggttctgcgttccctgaccaaattttacggcatggccggcgtccggtgcagcttttccgtctgcgccgctccgctggcggaacggctgaggcagtccctgcccgcgtggaacgtgaacgcctttgcggcggcggcggcgcgggccgtgctggaacagccgccttcatgggcggacggagaacgctccctgaaccgggaacgccgggaagacctgttccgcaggctttccgccctgccgggggccgcagtactcccgtccggagccaacttcctgctcttccgcctggcgggggcgccttccggcctggccgcccggctcctgaaaaaccacggcatcgcgctgcgcgactgctccaattatccggggctggaaaacggcggctggttccgtgcaggcgttcgcacgccggaggaacacgccctgctggcagaggccctgcgggccgagctgaagggcgacggccccgccattctccgcaaactgcccaaaccggccctgatgattcagggcacctgctccgatgctggaaaaagcgtgctcacggcggccctgtgccgcatttttcttcaggacggccaccgggtggccccgttcaaggcgcagaacatggccctcaactccggcgtgaccgcgctgggggaggaaatgggccgcgcccagatggtgcaggcccaggcctgccgcatcgacccggatgccaggatgaaccccatcctgctcaagccccattccaacaccggctcccaggtgatcgtgctggggcgcgccgtgggccacatggaggcgcgggaatattttacggccaaaaggcgcttctggccggacgtgcgccgggcgtacgattccctggcggacgagtatgacgtcctgtgcctggaaggggccggaagccccggagaaatcaacctgaaatccgcagacgtggtgaacatgaacatggcccgctatgcgcgcgccaaagttctgctcaccggggacattgaccggggcggcgtgtacgcctccttcctggggacatggatgacgttcgccccctgggaaaaagagttgctggcgggttttgtggtcaacaagtttcgcggagatccggagctgctggctccggcgcacagctacatgctggaccgtacgggcaggcccgtgctgggcgtcatcccgatgatacggaacatcaatattccggaagaggaccgggccgcgctgccctttgaacaggacgggcaagccaggcacgcggacagcctggacgtggccgtagtaatgcccgcccacgtctccaacttcacggacttcgccccgctggcggcggagctggacgttcgcctgcgccaggtgcggacacgggaggaatgggggaatccggacctggtcatcctgcccggcaccaagagcgtggcggcggacctggccggactgcgcgccgccgggctggaagaacccatccgccggcacgccgaaaagggaaagtggatgctgggcgtctgcggcggcctgcaaatgctgggaacggacattctggaccctctgcacatggaatccgcggaggaacggacgccggggctggggctgctggaactttccaccaccttcgcctccgccaaaaccctgctcaacgtgcgccgggcaagcacgccgctgccccctcccgcggcgggctatgaaatccaccacggcgtcacccgccatgagggagcgagcgtccccatcatgttccgggaagacggctccccctgcggctacggcaaaggccgcatctgggccacgtacctgcacggcattctggacggggacgagttccgccgcgcgttcatcaacatggtcagggaggattccgggttgtctcccaatccatccctgcacgcctcctatgacctggacggcgcgctggaccgcctggcggacgtggtccgggagcatctggacctcaaggccatctaccgtattcttcaactgaaacgctgacccatgcttccgtgcccgttcatcctgcccgcggcccttctgctggatattctggcgggggatccgcccaacaggttccatcccgtctgcctgatcggctggtgcgcgcgccgcgcggaaaccctggcgcggcggctgtggggagggacttttacggcggggatggcggcggctttaggaacctgcgccgccgcatggcttgcctgcgcggtattctgccttcccttttccgtcttcccctccccgtggattccctggattccggccgttctggtcatttacatctgcatggccccgcgcggcctggcggaacatgcgctgcgggtggcgaacgccctgcgcagcgggaaggacggcgaggcgcggcacgccgtttccatgatcgtagggagggacacggaacggctggaccgtcacggcatggccagggcggctattgaaagcgtggcggaaaatctgacggacggcgtcttttccaccttgttctgggctacagcaggctgtttggcaggaggtcctttcggcgcggccttcgccgcgctgacgcaccgcgttttcaatattctggatgccatgtgggggaaaaagaacgaccggtacagacgcttcggcacctttgccgcccgcacggacgacgcgctcaactttattcccgcgcgcctcatcctgccgtgcatctccctggcggccctcttcgtgaagggaacctccgcccggagggcgctcactacgggctgggccttccgccgcgcccatgccagccccaactccgcctggagcgaggcggccttcgcgggcgcgctgggcctccgcatcggcggcccggtctcttacaagggggttcctgcggactacccgtggataggaaccgggcgcacggaagctgtcgtcagtgacctggccctggccatacgtctcatgtggatgaccgccgccgcgggcacgctgatcttctccctcatccttttcttcattccccgcttctgaccatcatgaacaaactgcatattcccccgctggacgaacaggccgccaaaaccgccctggaacatcagaaaatactggccaagccccctctcgcgctggggaagctggaacccgtagccatccagattgccgccatgaccggcaatcccgcgccgcgcctgaaggacaaggccgtggtcctcttcgccgcggaccaccacattgccgaccacggcctcagcctgacatccacggacgtcacttacatccagacccgcaacttccttcaaggcggcggcaccatcaacgccttcacgcgcaacgcgggagcccgcctctccgtggtggacgtgggcgtgaattacgacttcggcgacctgccggggctggtgaaaagaaaggtcatgcacggagccagcgatttcagcaggggcccggccatgacaagggaacaggcgctggaatgcctgcaagtgggaatcgacatggcccgggaggaaaaagccagggggctggacatcgtggccgccggagaaatgggcatcggcaataccacgccctcttccgccatcgtgtccgtgctcacgggcaccccggtggaaaccgtgacggggcgcggctccggcgtcaagggggaagtcatccgtaaaaaaatagagcttatcgaacagggaatcgccctgaacaagcccgacccttccgacgccatcgacgtgctggcgaaggtaggaggaccggaaataggggccatggccgggctgatgctgggcgcggcctccctgcgcgtccccatcgtcattgacggcttcattgccggggcggcggctgccatcgcccagggcatccggccggaagcggctcagtacttcatcggctcccacaactccgcggaaccggggcacaagctcatcatggaccacatcggcgtcaccatgtacatggacctgggcctctgcctgggggaaggcacgggagcggccctgttctttccgctgctggacgccgccacgcgcgtgctctctgaaatgaaaaccctgccggaactggacatcacggttccgcgctaactcctcctttccctgcgctatggccgtcattaccaccatccgctccgccttcggcttcctgacccggctgcccgtaggcccgtggccgctgcaaaacgacctgaacggcatctccgcatggctcccgctggtcggcctcgtcgtgggagggctggcaggcggcctgacctgggcggctaccctgctcttccccccgctggtctgcggcgtcatcggctgcgcctgctgggtagccatcacgggcggcctgcatctggacggagtggcggactgcggggacggactgcccgtggaagtgccgagggaacgcaggctggaaatcatgaaagactcccgcctgggcaccttcggcggcacggccctgttctttaacctggccttcaagggcgccgcgctggcggcgctggcggcctgcggttcatgggagctgctgctcacggcgtgcgcgctggccgggctgctggcccgcagccagatcttcatcgccatgcgctttccgggcgcgcgccccggcggcatgggggaagccttcaagcaggggacgcgccccgtccacgccctgatagccgccgccgtcaccctggctgcctgcgcgctggcagggtggcacgggctgtacgcgctgctcacggccctggccggttccacggcgttgctcctgtatgcccgccgccgcctgggaggcgtcaccggggacgtgttcggctgcaccgtggaatgcacggaatggctcgtcctgctcaccttctgcaccttatgaaaactccgcacaaatgccgcgttccgggcctcaacatcggctgcacctccttcatcatcccggactactacgtccccgccatcagggaatgcgtccattacgcggatgacatcgccctgctcctgctggaagccggagaccacggggagggactcattaccccggcggaaatccgggagctggccggaatcgccgcggatgccggggtcaagtggaacgtccacctgcccacggacagcggcttcgccacggaggaatcagggcgccgctacacggaaaacatcatccgcgccattgacctgacccgggaactggagccccacacctgggtcatgcacgtggttacggaccacattcccggcccggacatgcgcccctatcttacggagcgtgaaacggaacgcatcctccgcagcctggagcaaatcacgccccacctgcccgcgccggaatgcctggccctggaaaacctggaacgccacccgaccgactacctggacaagctggtctccgccacgccccattcccgctgctttgacataggccatgtctggaaggaaggcctgcggccggaagaacttctgccgctctggctgccggacatacgcatgtgccacctgcacgggctggaaaaacgggaccacaaatccctgcaccacatgcccgccgccacgctggacgccatcctccaccccatgtgggacatccgtttctcccccctcatcactctggaagtcttcagcctggacgactttctgaactcccaccaggccatgctggaatcccatgaacgctacatctccaaacactgacgccaatcccgcacgcatgacgctcgtcctgggcggcatcagaagcggcaaaagccaatacgccgaacaaatagccgccggattcggggaaaaaatcctgtacgtcgccacggcggaggtgtggcccggggccggttccatggaataccgcgtgcgcaagcaccgggaacggcgcccggcaagctggcttacgctggaatgcccccgccatgtggccgccgccgtccgggaatccggcctgctggaccaggtggacggcgtcattctggaatgcgtcaccctgctcgcctccaataccctgtacgcccagaaggaccctacgaactacgagccgttccaggaagcgctgattgaggaaatagaggccttgaaggaacttatcccccaatcccccgtgccctgggttctggtctcctctgaaaccggcatgggcatcagccaggcggacgcggaaacgcgccactactgcgacggactgggaatagccaaccagcttcttgccaaaagcgcggacgaagtttacttcatggttgcggggctgcccgtaaccgtaaaaaaatagcagacggtcaattcttcagcgcaatatacttcaacactgccggacacatccgcgccagtaaaaagtacagtccgctcagagccagaaaaacaaggggtacggccattccccatatccagaagcttccccttggaaaaccgagcctgagcatgcactcataaaccagggcatgcgcggcatatacaaaaaagacggagggagccaaacgggcgcagaaagaggagattcccggaaaataccgcatcatcaagaaggcgcaggatgccagccacagcacgcccatgcacaaggataacgcagactcctgaacggtgctgtacatttcccatataaaaataacgggaaacaccatcagcacgtacagccacgctttaccgactgcattcttcaactcttcaagggaataacggcacaaaaacatgccaagggcaaatgctccaaaacccctgggatggataacgcagaaaaccttgtccatgtattcgaaggacaagtaaagggaattgctcgtactgaaaagcaccagggaggccatggacagaatgagcagacaggcccgcgacatccggaataacgctcctgaaaccagcacaaacaccattaaatcccgcaaaaaccataaaacagttcccaaaggagggcgccctattcccagaccggtcatccattttacaatgtccgcgggaaacccgaacaaggccatggaaacgaaaatccaaaacaaataggcacacagaatcagaaacgcttttctccagttaagccagggcaccggggccgggctgcccccatacttccgggccaggaagtaacccgccgccatgaaaaagaaaaatacgcccgcacgtgttgcatacacaatgaagccatgggaagcgggagtatgctggatcatgataagcaacatggccagcacacggataatatctacccacgggtcacggcacttctccgtcagtttccttccccggacgatgcccggcgcatgtgaaggagagttcgttaacgcttcatacatatgccaaatacaatcacgaacatccggggcgtcatgatagcatggccatccttcatggcaatacgaaacagggagccaaactcaagaaaaagttccaattgacaggatccggaggatatgttaggcatgccatgcctccctcaccaaccggaggcgcttccgggaagcccgtggtacgggcaggaaatagatggggaatccggtgtgaatccggagcggtaccgccactgtatattgcacggcttaaaaacctgcaatgagccagatcgccagccccgaagtattttatgaaccgccggcgagtattccggcattcagaccatacacatgcattcatccaacacgctccgcttgaacggagcagactatgatggtccggcctccttgaagtccggaatgttcaacactcctgaaaaaacaccgtgccacgccaggcaccggatgcaggctgtggctatggccctggcctgcctcggcatgctgggaacggtccatgcccaggatactgccagggaagacctggccggcgcttatgacgccactgtagccagaaccgcctcagatgcggccctgggaacggtctccgccacattcaacgtgacaggctccagcaacgtgcgcggaatctggggaaaatcaggcaccctcagcattggcgcgattgccggggatgccgtattcaacgtctcctccacggcaaacaacgccttcggcattgacacctcctccggagtcaatgtggacatcggcaccctggcaggaacattcaacatctccgcagccagaacgaatgccaccggcatccggagctacgggaaaatactctccatcggaacgatcacggaagacgccctcatctccatcacggccaatttctcctccaatggcatttatgcctatcaggggcgcctggacattggaacgatggccggcaaaatctccgtggatctgggaacaggaaattatgcgaggggactgtatgcctacggaaacaccatggactaccagggcccgcgctacaaggacgtcaacatcggcaccttttcctccaccggcagcatttccgcggcgacggccggcggctacggagccagaggcatccagtccaactacgggcaggtgaacattacccggctggacggtcaaatcaccgcagcctccggctccaatgatgaaagcgaggacttttccgccatcggcattgaagccagggaaaacatcacgctgggcgacatgggagcaacgggaagcgttaccgccacgaccaacggcatggacgcctacggcctcttcgccggagaagaagggggttaccagacccattccaatattaccatcggcaatgtgggcggctccatccgggcggaagccatggccggaacggccgccggggcacgttccacgggctccctgtccgtgggaaacgtcagcggtttcatctccgcctcctccacgggagctgcggaagcctacgggctgctggcggaattctccctgaccaccggcactatcaacggaaccgtcagcgcggcaactgccggcagcacggcggcggccctgatgggaggagccggcatcacgacgaccatcggttccaccggcgtcattgaagcaacggcgacgggggacgaagcaacggggtatgccctgtacagcgggtccaatacgggttccggcttttccacggaaaacacggcggacaacgtcaccgtccacgccggagcttccatcagcggcatctgggaactgggcggctccggagcggaaggctccgtggataccattacgctgctgtccggaacggaaaccgctccgggactgtttgactatacggtgcggacaaccgtcaacaccagcaagtccgatacggccacccaccattcctccgtcacgctcaacgtgggcagtgcggacaacgaagcgaactggaccatctccacggaaaaaactgccggcctgttcaaccgggtcaacgtgggccacggctctgccgtcaccttgaccgggaactcccagatactccgtgacggggccgtcgtcaacaaccagggctccatctccggcagcggcacgctcaccattgcggaaggcatgacgctgctcaacgggaccctggtgcagaatgcggcgggaacggccctggaagtgggctttgacggcctgaacgtaaatctggatctggcgcaaaacgccacggtaggcgccacggtgctcaatgccacggattccgcctgggtcgtcacgctggaccagatcaagaacggcatcaccgccatgtacggagccagggtggacaacttccaactggaaaactaccgcatgagctaccgcctccagggccaggtattcctgggtgaaggcgcccccatcgtcgtcaaccccggagaaagcatccatgtgggggaaggctccaaggtcatcatcggggaaaacctgcctgagcacggcatcgtgctggaaggcggggaggctgacttgagccagtcggacgccgtcatttcctccggagccgtcagcggcgtttccggacaactgacgctggcgggcaaggatgaaaaggaacagaccctgaactgggaacactccggcacggcaggctacagcgcctccgccgccgacggaggcgccttcgcgaacctcaacgtcacggcacaggatgtgaaggttgtcgccaggggttcctatgcggcggaaaacgtcgtcatcagcaacaacgccaccctcgttctggacggctgggacgccagtctgggcgtggaaggcgggagcatccgcctgggtgaggcattcgcccatccggctaatccggggcatctggtgctgaacggctccaccgttctatccggcgtggaaaccaacagcggttctaccgtctccggttccggcgccttcaagggagaggttacctattacggcagtgaaatcgtgatcggctccggctcctccgcaggctaccacaactatgaaggcggcctgaacgcgtgggggggagtgcaggaactcacgttcatcgtgaacggaacggcggcggcggacgccgcccataccggagcggacacctattcccaaatgaacgtctcttcctcctaccatgtggatggagcgcacgtcaatgtggtcattggagacaacctgcttttcagcaaggaacaaagcttctccctctccctggtcaacctggaccccgatacggtcattgatccggacggatccctgtgggacctcaccggcatcgaccccacgctgaagggccgcacggacctggtcacggataccggcttcacggtttccgacgacggcctgcacctgattttcagcggcaaggtcaacatcaacgccgtgaaggccctgcgcggagaggaagcctcccgcatcgccaacacgctgtggtcctccgtccgggtggtggacagcttcgcccatacggcggcttcccaactggatttccgcggaccgggagcgcgcaacatctggttctccgggctgggggacttcatgaacgtctcctccgccacgggagcctccggctttgactacaagggcggcggctatgccgtgggcttggactacgcctggacgaaaaactggatatccggcgcggccttcggccagaccttcggttccttccactccgcggacaagcagttcaaggcagaccaggacggcctgatgctggccctctaccagcgttaccaccgcgacctgctccgtggaaacagcgtggacattgacggctacttcacctacggccgcatggacaacgatgcggacggcacgctgggcggcagacccgccaccgcctcctggaacgatgacgtgtacggcttcggcctgaagggaacctggaacatccgcctgagcagcacggatgtgctgaaacccttcgcaggcattgaattcctgcacggctcccagggttccttcggggagcgttccggttccggcaccgcctggtaccaggacggctccgtgcagaactggagcatccccgtcggcggcacctggcagaagcagatcgccgtcggcaggggccagtacctgctgccgcaggtgacggttgcctacgccggagacgtctcccgccgcaacgcttccgtgaaaacggacgccttcggcacgcccttccgggtagacggcgtccatccgggacgccacgccctgatcgtccatgcggggctgaactgggtcatttccagcgcctggagcgccggagccttctaccatctggaacagagggaacacatgaccaaccagagcgttaacgccaccgtgcgctattcgttctaaacgttcttcccattcggaaacaatccggagggaatccaccgcggattccctccgttttttcggcaggcttcccatattccacaggaaattcttgactccacagccctcttgccgcttaattcctccacttcacgtgccgtcgtggcggaatggtagacgcgctcgactcaaaatcgagttccaaaagagtgtgggttcgagtcccaccggcggtaccaataaataaaccctgaaagcttaatgctttcagggttttcttttatcagttaacagctctcggctaagaagcagaaaactgaatgcaataatttccagaagaaacactcgtgtgtttatatagatataatttctgaaactttttccggaacactatatctataaataaaatcatcagtaattacatactttatattaaaaattattctactgtaattttcaaatattcgccctcgcgatgtaattttacatgcaacaaatgaactagtctttctgctcatccagagaaccgtaaaaggacacgaaccttccgccaccgccatacaccacatgccgatgaggtttttcctgcgccggcagatgatggcgacggaaaaactgccgcgtggcgatgtcaataagcaaatctcctatgttgccatggttggcgcaatattgaaatccacccagtttaatgagagcaggaagaatggaaatggattcaggcatgcggtatgatttcaaaaaattcgttaagagtgcccaggcaatccctggaagaaacgtgtggcacttccagtcccatcttgcgccagacgcaaatctggtggagaagctccgttccagagccttcgcagatgttatggaatccgttgacgaacaatcgtttaattggaatattcataattgtatagggaattgcaatgaataagaaaaagagatggtccatgctcctgacgaatatggcgaatccggacgtgctgaatctctcgttgtgcggttaaaaaatgagctgcatgcagcgacgcctgctccattcggagcatccatgcctattggcgtaaaacggaaagctcccgcctttgggcatccccccttgaacgaggacggatgggctgcctgttattgacggctatccgtaaaatgtttgaaaaatgccaccgcccccgcttccggaattgtaaattctggataatttgcgttggtgaacagtttacgggctccccggccattgacagcttccacggtcagggtaaccgcttccactgttttgaccatgtcttcgctaccctccgtggatgtgccggtcacgcacatatccagcctcgcccatgcctgaacggccttccattcgtcagacaggacggtaagggcggacactacttcggaaaaagcctgcaactgttccggcgtcagctcccggtgcctgtagcgctgattctgaacaaaccccgccatatccgggaaaacggcagtcaacgtgaattcatcccacttgccgggtcgcgggaaataaaattgtaattctttcatgttaaattgtttctattttaagatagtcagccggattaatcccttggatgacgcttaccctgaacatggccatctctgcggagcaagtatctataatagcgtagttgacgtcattgctgacgagccccaaagaaacttcccccaggtaataagcttgcggattaagatgacggcggttgaaattgtagtggttcccgtgcccggagcttatccccgtatgccgggccagataaatactgcaggtaccggatgaagagggaaccgcaatcaaatcaagccgggatacccagtccaggctcaaggcagcccaggaaagctccgttacaacctgtccgtctccggacctggccactacttttctgctggctgcatccacataaaaaagcggtccgggaatattctccaccgttgtggcggtgacggttccggaatacccggtccagccgaatttagtttgagtcgcggccaaattcacaccggaaagcagagacatcaccagcgcatagctgccggttccggcagggctgatggctcctccgtaattggtattggtgacggcagacttgaccaggacgcatttgtgcgccgtcagcgtgcccgcccaggacagcccgcaccagtccgccaaggaacgctccatcttgacgttgcttccctccagggtggtaacggttccgttcgcgtggtccagatggtacacattcctcagaacggacatgacggcgtggctgcccgcgttgaggccggtgttggaggctccggccgcaagcgcggatacggcattgataccgccgttagcattgacggttccggaaaaggtggacgcctccgccgtcagatttttcaaaacggcatcttctcccagccgaatgccgccctgggcagccaatcccagagcggccgctttaaaagtctgtgttaccagtgcatgttcgtcggacacctccaccgcatccgtaggggccacaaagatatactgtccggagttttccgtttccagaacagtcaggcaagaagcatcggagagaagagcctggacagagcatgctgccgtacatgtcagcgcataagccgcgcccggtatggtattcactttcattgagcagatttagcaccggaaaagagacaggaatcatccatgctgatacgtgcatgcctcctgccacttccccggagagaggcacgccgcatgcggagccaaccggcatgaaaaaatgacaccgcttgacagaaaagataaaccaagatgtttattatgaatattttataaaataatcacaaaccacccacatgcgaacgcgggaaacatgtaatccattgataataatatatcctttacccatgatttctccactttccgacattaaaaaagaccagggactcatatttttatctagattacagaattccaacaacttaccgcaacaaggacattcacgctgaatttagccgcggaaccaatccctacaattgactcagattcacgcaaggcagtacgtatataaaagagtatgacttcgttgcccgcatcttcattggttgaaaccgtagccaataaaatcaaacagatgatcctcagcggcagcctggtcaacatcctgcccggcgaacgggagctcgggcacagattgtccgtagggagggagaccgtcagaaaggctctggctcttctggagagggaggcatggatcgctcccgcgcgcatcaaggttccgcggcgcatcctgaaaactacggaggaaggagcgggaaaaaccgtcccctcccatcctgttcaggaaaaaaggggcattatcggctttctgacgccccagcccctcaagaggctggcgcaaagcgtgctggcggaggtgtacaccatctccaagattctggaggaagacggcatcagcgtccgcatttttgaagctccctggattttaggcaacaacccggacaagcgtctcgccaagctggtgaccaaatccgaatgcgtctgctggatactccaccgctcctcggaacagacccagctctggttcaagacgcacggcattccctgcatcgtgcgcggcacttcctaccagagcagcaacctgccctatctggaccgccactgggcggccaccacgcaccatgcggcgcagcacctctggaacaaggggcaccggaccgtcggcctgtgcctccccccggacccgttgaagggccaccagttaatgcagaagggctttttcagctttgcggaaaagggctggaaccccgtgctgattcccaccccgtttgagacgccccttttctttgaatacctcgccaaagcgttcaaggaacatccggacatgtccgccctggtagctacgcggggcaaccagatcgttcccctcctctcctgggtggaagcccgctctttaagcattccggaccagctcagcctgatcagcctgacgtatgaacccttcatggagcgcctgctgcccaccatcacttattacgaggagaaccagacaaaaacggttcacaagctcatccggatgctccgtgccctgactgcgggcaaaaacatcaagagcatctccgtcatcccggaaatctaccccgggcaatccgtctccgtgcgccacacgccgccgtccgcataaatacgctttcccggaaggaacgagggacgccatgggcataaaaagacgcgtaaacgccatctgtgccctggcaataagccccaggctgtacagcacggatttccgcatgcctcttccgcacacaaaacccaccggaccaccggcggcgcccgccttgggagaatacctggccgccatcccggaaaagcatgaaaaccgaatagaggatgcccggcgtttccctctcttccgcccgggctgcgggagtccctccggcagaccaataatgtttgacatccctccgggctccagataggttcgactctgatttcatcccccggcccccacgctgcggaacggggctccacagaactcttccatccaccatttcccccatgaagccattgaaaggagcatgcatcatcggccagtccggcggccccaccgccgtcatcaatgccagcgcgctgggggccatccagacggccctgcaatgcgaaccggtcacccgcgtgctgggagccgccaacgggattgaaggagtgctgaaggaacgcctgttcgatatggcgcaggaagacccggaggaactggaattgctgaaatacaccccggcctccgccctgggctcctgccgctaccggatggcggatcccgccgtggatgatacggactaccgccgcctgctggaggtgttccggaagtacgatgtacgttactttttctacaacggcggcaatgattccatggatacctgcaacaagatatccaaattcatgcagcaatccggctatgaatgccgcgtgatcggaatccccaagaccattgacaacgacctttacggcacggaccactgccccggcttcggttccgccgccaaattcatcgccacctcctgcatggaggtgcaccaggatctccgcgtgtacgacaaagggcgtgtcaccatcgtggaaatcatgggccgtcacgccggatggctggccggttccgccgccctagccacttatgcgggcgccggaccggacctggtttacctgccggaagtccccttccgcatggaagaattctggcaggatgtggaccggatttacaagcgtaacgggagctgcatggtcgccgtctcggaaggggtgcaatatgcggacggccgctttgtcgcggaatccggggacagggacgtcttcggccatacgcagctgggcggactgggcgccatgctggcggaatccgtcaagcggcagaccggggccaaggtcaggagcattgaactttccctcctccagcgctgcgcctcccacgtggcctccaaaacggacattgatgaagcctacatggcggggaaagccgccgtggaagcggccgtttccggccagacggacaagatggtcgccttcgaacggagcacggaaaacggcatctactcctgcaagaccaaattgaccagcctgggagacgtggccaacgtggaaaaactcgtcccccgtgaatggatcaatacctgcggcaatggagttgaacagccgttcatcgactacgttctgcccctcatccagggagaaacggccatgcagaaggaatgctccctgccccgctttgcgaagctcaaaaaagtgctggcggacccggtacagggatagcttttttctggcagcacctttttctccattttccataacagagaggaattcagcctacccggaacttctcccggccaggtaaaacactcggccagccactagcccaaccccttttccggctcaaggcaaatacgcgggaaggagattgcataattgaccgcaactgcggcattcacgctgtttccataaggtatgtacagctccttgaaaaagaaaaatcccggcaggaaacaggctgaatggcacggcaggggcggaagaacatgaaaaaagagaaggcggatgcaacccatgactgctttttttccagtccaagaggccttccgtaccggcttaaaaagaacaccgtaataacaggaacgatagttcccttcatcatccggaagagaaaaataaattcgggaaaggaatcggcctgtttcctcatccatgaactttattttctccattcaatttctccgccgcgcccggataattatggaaaaaaccggcttcccgtttaatcccccgataaactttccactatcatctttaacgaatttatttgcactttattagaaatgtttgaaataaagttttaaattccattttattcattttccggtcttatattagcgcgacagaggaacatttttcccgatatttctgcaagtgcacccataaagtcagcttccttttcttttgaatataatccggccctcaatcacctttcccccagggaataaaacggaacaacaagataaacttttggttcagaaatcacctgcgccaaaactctacatcaagataaaaaacactcattgccaacaagtttaaaacttttcttcccgttatcatttatctttcaataaaagtgagccggacccgaagaaaaggctcccctggcaatccgtcccccccaaggaggagccggaacggagacggtacagaactccgggacggggatatgaatcacttttcggcttcacggggatgggaaactcctttgtgccgtttcccgttgttttgtaacccgcaattccgcaacacccttttcttccgatagccctgcgccctgtttcctctccggaagatgatggaaccggcttttcctccatattcaattgtagaataattcttttccggcatattaaattcaaatagcgggaaacaaggaaatgaaaaatcttgcaagcaagggtgaaaaaaggctaaaatgataaagagctccaaaattcgactcctatcatttcatcatgtaaaaacggcttgtttccggatattttttcggaaactggcatgaaatcggtccccgaccagctactatccaagttttccccgcatgccatgctcgattacctgtttcaacatttttattctacgctggcaattgttgctttttttattgccatcctcattctgcgcgcctgcggcaagcgcggcaggcgctggattcccgtctccacggcgcccttcggctgcatggccttcctggtcgtctttctcctgctgacggccttcatcatctggttattcagctttttcaccacgggtcccctggtagaggacctggccttcacgcttgcatggctggcagccatggcctgcgccctggccgtcatttcacgcctgaccgaatactgcctgcagcaggacaaatccgccagcaagctttatccgggggaatcccggaagttgcttcctgtccagctccggaacaagggcatcctgctgttcgtgctgatcggcgtcatcagttgcgttattgacatcatcaccgtacccttcccggttccggaactcccgccggggtccgcgctgtctgctgccacccttgttcccctgccgcaggaagtgcccgtggaggtccatatctcctcccgtgtcaccaacaggtttttcggagaatgcgactttgacctgaccgtccgggagaaaggcggggacaagcatgttttccccgccatcctgatcaatcccggcggggaaagcgccatcaccatttacaggctgcggccggaggaaaaacaacgccagggcagcttgatattcaccaatggcatgcaaagctgcctgttcaacatggataccatgcggatgaagtccctgagcggtcccgcctccaattatcccccacccacccaggaggatctggatggacaggatatggacctgcgcctggaaacggtggggctctaccaagggctttcctgcatacgcggcgcggagcatacggatacaacgcgcgcctatgttctgaaaatcctgaaggatacgcagccatgaccggaacgcctcaaaagggtcgttgacacgggctctcccgctcccttactctggatacggccaaaacagccatagccatgattaagattacagccaaaagcatcgtcaaagcaggagccagggaagaattcatcgccaccgcccgggaactggtggaaaacagccgtgcggaagccggcaacgtttcctaccacctgtatgaggacattgatgaccctaatatcctgacattcattgaagaatggaaggaccaggccgccgtggacgttcatgcggattccgagcatttccagcgcatcatcccactcctgagcgacatgacggaggaagccattgaaatttccctgtaccgggaagttctgtaactccggcaggaaaaaccgcagccttattccctatcccttccgggaaaggaaaaagcgccccgtcccaccagggagacggggcgcaggaagcttcgcatcatttaccgtcagaatgcgaagcaaccacacccggagccccagaaatcggaatacctgggccgcgacgcattcgccgcgccctccatcagcatgaacgcggaatgcatgcagccgtgttcatggcagtgtgaggaatgccggtgctcctgctggaaaggcacgccggccctggccgccttcttcgggtccaggggagcgccgtatccgccgaacacggcaatgggagaccactcgggcagtaccggaatgggcgccgggtccaaatccttgaacggtcccgcggcataaacgattttgccgtccatgacggtcagcacggattctattcccttgatctcctcttccggaacggagaaataatcttcgctcagcacgaccatgtccgccagttgaccgggaacaatcgctccttttttgcccgtctcggaggaaaaccaggtgctcccctgcgtataaagccggagggcttcctcacgggaaaggcagtcttcctcccggtacatcggttctccgcccacggtcttcccggtggtcagccagtacagggaaacccatggattgtagctcgccacgcgcgtggcatccgttccggcccctacgggaatgcccatttccagcattctgcgcacgggcggcgtatgttccgccgcctccttgccgtagcggtccatgaaatattccccctggtaggccatgcggcactgcacggcaatgcctccgcccagcgccttgacgcgttccagattcttctcgtcaatggtctcgcagtggtcgaagaaccagtgcaggccgtcaaagggaatctcccggttcacttcttcatacacgtccagaaagcgggagatgctctcattgtacgtggcgtgcagccggaaaggccatttgttggcggccagcaggctgaccacccccttgagttcggattccatgtctccgggaaggtccggacgcggctccagaaagtcctcaaagtccgcggcggaaaagacgagcatttcacccgctccgttgcagcggtaataatcgtccccctctcccggcctggtcatcctgatccatttggcaaagtcctccttctcttccttgggcctctgggtaaacagattgtaggcaatccgcacggtcatttccccgcgcttgtgcagctcttcaatcacctggtagtcctccgggtaattctgatagccgccacccgcgtcaatgatgctggtcaggcccaggcggttaagttctttcatgaaatgccgggtggaattgatctggtgttccaggggcagttttggccccttggccagcgtggcgtaaagaatggtggcgttcggccgcgcaatcagcaggccggtgggattgccctcactgtcgtgctggatttccccgcccggagggttgggcgtatccttcgtatacccgcaggcgcgcagggcggccttgttgagcatggcgcggcagtacaggtgaagcacaaaaacgggcgtatccggcgccgcctcattaatctcctccagcgtaggcatccggcgttcggcaaactggaactcgctccagccgcccaccacgcgcacccactgtcccggcggcgttctgcgggcctgctccttgagcatgcgcatggcgtccgccagggagggcacgccgtcccagcgcagttccatattgtaattcaggccgccgcggatcacgtgaaggtgggaatcgttcaagccgggaatgacggtccttttcccggcgtcgatcacctgggtatccggccccttgtactgggcaacgtcctcgtcggaccccacggccagtatctttccatccttgacggccacggcgcgggccatcgttccgcgttcatccagcgttgctatgttgccgtttgagatcatcaaatcggcgtaaaccttatcattgtttttcattgttctcatcatggttcggggttgttcccggaatggttccggcctgcgccctgaaaagccagggagacagaatgctgctgatcagcggcatgaatacccaggtcagcagcgccaccacacaggcgttgaacaggaaaaaggaaagccatccgggcagcacgctgcggatgggcccacccacggtaatgttcagaagaaagatgaccaggcacacgcccagataggtggccgccgccgtcttgtagcgcggcggcgtcatcatcggggtgcccggctggttcagccaggcgtccaggccgttcatctcctggatatgggcctccccttccgtatgggctcccagcagcttcatccagcgttcgtactccggggaggaaaccagggcttttctggcggcggcgctcgcgaaacggtccaccaccacatactccccgtttccgtcggagggacgcaggacgctgatgcccacatgcccggggcagctcagcacaaaattgacgaaatcccgcatggcgtgctcaaactggccttcatgccccggcagaatatgccggcgcaccacaacggtcacttcctctgaaggattgatggcgttcatgcctgacgaatgttcagggtttttcttccggcgcataccccgtgttaacggagggagcgccggaaaaactctgcgggcaatcaggcgtcatgcttcaccacctgcggggacagggcggactggggagcatggtgaaccatcgtgtaggcgtactccacgcccacgccgtaagcgccgccctgctgcttgagcagattcatcagggcgtcgtaatgttccttgttcttccagtcgcgctggaactccagaagggctccgatggtcgtcagccgcgtgccgcccgcctggacgatgcgggaaagggccgccttctgggcgtccttggaggtggcgccgcagcagtcctccaccacgtaaatgttataaccgtcgccgatcatctcaatggcgggccacgtgacgcacacttccgtccagagcccggtaagaaggatattcttgcggcccgtcgccttgatggccttccggaactcgtcggaatcccaggaattcatggacgtgcgttcaatgacgtgctggcccggaaaaatatccaggagctggggccagacatagccggaaaagccctccgtttccacggccgtaatcacggtgggcacctggaacagcttggcggccttcgccagcagggtgacgttattgatcaggtcggcacggttgatgttggctacgccaaaggtcatttggggctggtggtcaatgaaaactacggcagcgtcttccggcgtgtacagctgatgataatgcgaggatatcagggacatcgtcttattctccttataatctatgtttaattaatgaaatcgggaccgcaggcggtcagaaaaccgctggtccatgattggttggagaccagtttccctgtttttgttgacaccatgccagagtgtgacaaaccgttttaagacggcaggctctcctgaaaagacagtcagttccccgccggaccggaggcttccctggaaaaggcagtcatctccgcaccaaaaacgagcgcattcccggaaatcacgcctcctcttcgcggaaaggaggaacggcacaggtttcccctcatctcgttccctccggaacgggaaaccagcctgtctttcctgaaaacgtcctccagctgcggaggcggcgcgttccgttacttctcttccccgtgcttgatcttcaaggcatccagaatcttctcatagccaggcagccgcctctggaaatcctgaaaattcttgtcctccttccgggtccagcccgtttccgcataagcggcaatgcgggggaacacatggcggtgcagcttgtccacatccgcaatccattccgtccagacctggcagcccaggccgatgacgttctgctgctgctccggcttcaatcccgcgaaaacgggttcaaaggaataggatttggacagggggagcttgtcgtaacccttgttcatataagtcatgtgggaggtggaattcaccacctggtgaccgtcttcaaccgccttggtggcaatcttgtcggacccgtaccagaaatggatgatggccttcccgtccagcttgcccagagcggccccctggccgccgtcattgtgcacgtcggaacccagaatctcattccatccgatcatccgtattcccttcttagccagcatgccggaaatccggttcgtaaacatgatctgaaggtccgggaaattcctgatgcccttcttcttcatgaactcctcaatgtggggcacgcccgcccagtacttcttataccgcacctcatcgccgccgatgtggatgatgccgccgggaaacagggccgccagctccgtcatgacatctcccagaaactggtaggtccgctcgttggtggggtcaaacgcggttccgtcattgaagctcacgggaatctccgtcacgggcttggcggacaacttcaattccggataggagaacgtagcggcggcggaatgcccgggaatgtctatttccggcacaatcgttatgttccggtcggccgcatagcggacgatgcgcctgatctgctcctgcgtataaaaaccttcatggggcctgcccgcatacttgccgctcccccacgtctctatctccgtgtctctccgcttgctgccgacggaggtcagcttgggatactttttaatctggatgcgccatccggcatcgtcggacaaatgccagtgcaggatattcattttcagaagccccatctggtcaatcagcctcttcacctcctcctctccaaaaaaatgcctcgcttcatccagcatgaaggcgcgccacgcaaagcggggataatccagcatggaaaaaggcttctccgccacggtccagcttaccgcccccttgtccgcgccatcgtcaaaaaacgcggcaggcagcatctgcgccaggctctgtccggcgtaatacaccccttttggtgcggcagccttgatcacgatatttccgggcgccgcttccaggcggtacgcctccggtccgtactgtttcagggaagcatccttctctattcggatggcccccgttccccccatccccgccaggggcagtcctgttccgcctgataaaaactgccgcagcagacgggcctgccgctggaacccggcgtccttctcccggcacacgatgcgcgtgcctccatccagcttcacgggcttcgcctcgcttttggccgcaatcctgacggaaacgggccggggaataatctggtcctgcgcattcacggtcaggcagcatgctccggagagcaggaaaaggaatacaggggaaacatagcggaacatcacgtccagtatacaccgcttctgccgggagtctttccttttcttcccgttttttccttaatcccgttaaaagcggtcggggaacctcccgctccatgacacgccagcccatccgctccgcctgaaatgccatgatgcgccccttgccttcctttttcccgcggcgtatgatggacaccatgaaaaaagacgatacgccgggcctgtttgccgccttcgcggaccggcccctggcggaccgcctgagaccggccgccctggaggaaatcgtgggccaggaccacctgctgggggagggagggcccatccggctcatggcggattccggcaagctgaccagcttcgtcctgtggggaccgcccggctgcggaaaaaccacgctggcgcgcatcctggccacgcgcacgtccatgcacttcgtcgcgctctccgccgtcttctccggcatggcggatctgaggaaagcctttgacgaggccgccaaacggcgggaatacggccagggaaccctcctcttcgtggatgaaatccaccggttcaaccgcgcccagcaggacggcttcctgccatacgtggaaaacggaaccgtcacgctcgtaggcgccaccacggaaaacccctcctttgaactgaacagcgcccttctctcccgctgcaaggtcttcgtcatgaattccctggacgctccggcgctggaaagcatcattgagcgggcggaatcccttctccagcgcaagctgccgctcgctccggaggcgcgcgccaccctcattgaactggcggacggggacggccgctacctcatcaacctgatggaaagcgtctttgacctctgcaagcctgacgagacgctggacacgccggccctgctgaaaatcgtccagcagcgcgccccggtttacgacaaggaccgggaaggccactacaacctcatcagcgccctgcacaagtccctgcgcggctctgatacggacgccgccctgtactgggccgcgcgcatgctccagggcggggaagacccgctctacctgctgcgccgcctcacccgcttcgccatggaggacatcagcctggcggaccccgccgcgctgcaaatggccattgccgcatgggacacctatgaacgtctgggttctccggaaggagagctggcgatcgcggaactggtcatctacctgggctgcgcccccaaatccaacagcgcctacaccgcctggggagcggcccggaaggcggccagggaatacggctccctgatgcctccggcgcacatcctgaacgcgcccaccaaactgatgaaggaactgggctacggaaagaattacgcgtacgaccacgacgctccggacgccttttccgggcagaactactttccggacaaaatgccccgccgccagttctacaagccgccggaacggggctttgaacgggaaatcaacaagcggctggcatactgggacaaactgcgccgccagcgggcagaggaggattccggaagctccggcacgcggagaggccggaaaaagccccccgctccggaggaacaggccccctcatgaggcatccgccggccacacggccacttccgcaatcccctgccccggcgacagccggatgcggacatacctggccttcgcctccccggagcacgcggcgaccaatccggccccgtccttcagaagaacggttttcacgtccttccaggttttgccgtctttgctgacctgcaccacgggaggctgccccttccagttcccggaggctttcgcctccacccggtccaggcggaattcaaactccatgtccagccgccaccatggctccctgtcttctgcggacggcagccatgcggaagcgccgtcgccatcggacgccttcatcgcgtcctgaagattggaggaagcggaacaaggcctcaaagccgccaggttcgccttctctccggctccggttccggactgcccgtaccgcgccacctgggcgtccctctcctgcgcggaaaaacgcctgtagggcctctcccgggtttccgcgctcctgcccgccacgtacgccggggcgttccgggaaacaatctggatgctgtcccccttcaatcccggggaagacgccttgatgaccgttttcccggcgtaataagaccggaactcaatagccgcgcagccgtcaatgaagtcaatgtccgtcccgggcgtgaacgtgatgctcttgccggtggggaactctccggggcctgattccaccgtgagcgttaccggaacggcattggctatctgcctgccggaggcatccgccaccttcacggtcacgtgaacgtcgtccgtgccatcagccgggctgatggcctccttgtccgcggtcagcttcacctgcgcaggcgttccctccacgggccattccggcgggggaatgtttttaaactcattcctgtaccagtaccaggccctcttgggaatgcggaagtaatccacaatgcccatgcgtccgccggagggccagatgctgccgtggtcaaaaccgcaccagaccgcctcccccgcgcgccagggatagcgctcccccgcctgcttgtccccggccatgtccccccagcccggcgcataagcccccggcctcctgcagctcacggaaccgtactccgtcaccatgctgggcctgccgggcgtcttcacatgggagccgtccccgttgaaggcggccatgtcccccagcttgtcaaaatctccgcgctggcctcccccggcacacacggggcgcgtcgggtccagctccttcaccagggcaatcagcttgccgcacagggccctggcctccggcgcatgccgggtgaaaaacggttcgttgctgatgctccagatgacgatggaagggtggttgcggaattgcagcaccatctccctcacctggcgcatgcagctctcctcaaacgcggcgcggtccttctcgtccgtggggtaggcgtcgcaattccagtacctgtcgtgctccttgaagccgcccatgccccagaaaatgccttcattcagcatgcacatcccctcccggtcgcaggcgtccagaaaagccggggaatgggggtaatgggagccgcggatgaaattgaacccggcgtccttcatcagcagcacgtcccggcgcgctccggcgtccgtcacggcatccccccatcccgcgtggtcctggtgcacgttggctccttgcaggtaaacgggcttcccgttaatcagcatgccccggtccgccgtcagctccagggtgcggaagcccaggggattctccgcccggtccagcacttttcccccttcgcccaccagctccgtcgtcacgcggtacatattgggaacggccggactccacagcctgggagcggccagcggaggcaggtccgtctgaacgcacgcttcctttcccgcgcccagctccacgggctcttccccgcggagaaccacgcggccgcccttgtcctccctcacggtatggcgcaccgtcaccctctttatcctatcgctatcattcttcactgccgccagaatgcggaccttcccgcgggaaggagtcacttccggcgtctgcacccagatgccgtgcgcgggaagatgcacgggagaacacacgtgcagatgcacgttccggtacaggccgccggaaaaggtatgctctcccgcccgcggggcgatgcgggggttccagcggttatccacgcgcacctccacccaattctccccgcgtttcaggaaaggcgtcaaatccgtccggaacgccgtataccccccttcatgccatcctgcggcctttccgttcaccgtcacctccgccacctggaaggctgcgccgcaatccagaaaaaccttctgccccagccattcctccggcaccacaagcttcttgcggtaggagccgcgccccgtgtaaaaggaatcggacatgaaatagggcaggctgaacgtatgtggcaaatgcgccgtctgccagccgcttttaccgggctcgtcttccagccggaactcccagccgcggttccaggccatcctcctgcagggagacgaagctttctccgcggcggaaacgggcgtttccgctccggccatggaaaaacacagggcggcggcgcccagcatacaggcaatcatcttgcgcatgcgtatgctaccattccacggtgctctttctttcaaccaaaaaacatttccgctccctggagcgcccgcagcaacaagccgcgcaccccttccgggctgcacggctggaaaaaagccttcattcaggaaagcagcgcgcccgccgatccgttactgggtaatgatattcagttcagcaacggtggcgctttgctcgccgcccttcaccggggagcgggcatccagcttgaaatagcgggcctccacaggcttgccgaagtcgatgcgctgaacagccggatccttccggatgtaatggtaggtgaactggccttttttcacttccttccagttctgcccgtcatcggaaacggagaacgtgtactggctgatgaggcccttgtccttgtccattctgggcgtgtagatgaatccggtgaacttcattctggttcccatgtccacggcaatggagtgggggaagcccggcaggccgttcgtataggacgtatgccagcaggtatccgggttcccgtcaatggcaaagtgggcgaagccggtatccggctcttccgaggaagcgctcaggatcttccattcgccctgccccttgataagggggaatttccgctcgccgggagatgtgggaggcactttgccggatttcccggcggcagcccaggccctcacttccccttcgggaagcttgaagggtttccggtacgttttttccggccccttgttgacggaatacttcatctccgttccgggcgtggaggaaaccaggctgaccatgccgtccccgtcccgttcaatcacgggggaatggggcacgcccagtcccgcgcgcgccaggttcagcagggcggacgtgggggccaacacaaagcccaggggggtggcttcgctcagcgtctggtacttcgccagggggcgcggcccgcaggaggaaccgcccagccccatctggaaggcgtccagattaacgatcaccttgtccttctccggcagcctgtccaggcttttggcgttgttgagctccttcggcgtataacgcaggatggacacttccagcggggccctgggagaagcggagcctacccacaacgccggagccgccttgggtctggacagggccacccagtccgtttccatgcggttgcccatgtcctgggggcgggaataggcgaaaaacatgtcgtccacggaagtgcggaacacgtccttccagcagctcgtgcggcggtcccggtaattgtcccacggccccagccccaggtattccacctggtcataggcggcaggcatcccgaaggtgacgcccagccgcaggagctcttcccccttggcggagggatacattctgacggaggcattgatgacgccgttgccgaacaccgtccaggcaacctccccggagaaggaaaggtcggagcctttcgtccggaattgcgcggtaatgcgggccacgccgggagaaatgacggcggccttcacgtcggaatactccgccttcatgttctgcatcttcatcttcccctctaccttgcttctgatccaggagtcgttgtccaccggggaacggtacgcctggagcgccaccggatagccgggcagaatcaggtcctggctgccgtaccggagggcggaaagcatgccgtccttgaaggaggcggaaaagcccttcccctgcaccaccacgggatcgccctggcgcacggagacggcggccaatgccgccggagccttcacggaagcctccttctccacggccgccgggaaccactcgtaagcttcgcactcgtccgccacatgctccagttgtttggcggaaagctccttcacgtcttccgggagcttgaaccgggcatccgccagaaccatcagggagcccgtctgcatggcggcggaaggcagtttcaccgtcacggacttgccgggagccgcctccggcagagccatgcgctccacggcatgcttgccgccgggcgcgagggacaccaggtaaagcgtatagcccttcaacggcttgtggaaatacttgttgcgaacggtcagggaaccgtccttgcggtcaaaggccatgtactggtacaccttcttcacctccttcgtcttggccgtggtgttccggttgcccagaataatgccgttgtcgcagaaattggcctggttgggcctgtccccgaacatgccgccgtaggcctgcgtcacgcccttgaagggagcgggcttgtaaatgccgttcccggcaggattggcgcggagggactggtccacaaaatcccagatggccccgcccaccatgcgcggggaggactcaaaggcttccatgtactccttgaaattgcccagggcattccccatggaatgggcgtattcgcacacgaagaagggacgggaagtcttctgcttcccccagttttccacccggtccacgggcggatacatggcggaatccatgtccacggccttgtggccgtgcgggaattcgcagtaatggagggggcgcgtatcgtcataggccctgatggcttccgaggccgcttcaaaattcggcccgttgccggactcgttgcccagggaccagaacacgatggagggatggttcttggaacggtgcaccatgctcatgttgcgttccacatgcgccttcttccaggaaggcttccgggaaatgtccatgccgctgttgcggatgccgtgggcctcgcagttggcttcatccatcacgtacaggccgtagcggtcgcacagttcgtagaaatagggatggttgggatagtgggagcagcggacggtattgatgttgtgcgccttgatgatctgcacgtccttttccatcacctcccgcgggatggcgcgcccgtagtccggatgcgcttcatggcggttgacgcccttgaacttgacggtctttccgttgaccagcaccgcgccgttatcagcgatttccacggaccggaacccggtattgacggaccgggggtctttcccgttcagggaataagtcaccttgtacaggttgggcgtttccgccgtccacggcttcacgccggggtactccttcttcagagaaacctgaacctcgcctccggcgggaatggaggggacgtcaagcgtgccggaatccagcctgcccctgttgtccgtctgcacgcgtccggagccgctcccgccctcccaatttaaattggtggaaaccccttcaacggaataatccagcttcattccggcggggatgtccttcttgccggaattgcggatggtgaacgttccgtccagcgtccctgtcgcgtaatccttcctgtccagccccgccttcagaaacaggtcgcgcacgtgcacctgcggctgggcgaacagggtcacgtcccggaaaatgccggaaaggcgcaggaaatcctggtcctccagataggagccgtcgctccagcggtacacctccacggcaatcgtgttcctgcccggcttcacatagggagtcaggtcgaactcggctcccgtataggaatcctcggaatagccgactttccggccattcacccacacgtaaaaggcggactccactccgtcaaaccggatcatcacctgctcccccttccaggaggcgggaaggttgaaatcccggcggtaggagcccacggaattgcgctccttgtacgccggccagttcctgggcggttctcccatcaccttgggaggattcggcttgaagggatacggaacgttcgtgtaaatggccgttccatagcccgcaagctgccaattggaaggcaccttgaccgtatcccatccggaaacggaataggaaggcttgaagaaatcggcgggccgcccgtccggcgtcatggaaaacttaaacttccattcaccgttcaggctaagcgtcttgtctcccgccgggagaacggaggcgcggggagcctccttgttgattcccgtcacctcttcattctcccagtccgggacttcccccagcaggggcagcgccggagccaggcacaccatggaaaacaaaaatgctcgtaccgtcttcatctcgggtcaggtgctggattgcttacttgtacttgttgatggaagggtcctgatagcgctcggaatccttctttccttcctccccggaaggcttcaaggtccatttgcaggaatccgtgtacgttttcccgcccatggaggccgtggccgtgatggtgttgacgccgggcttgagagtcacttcaggccagacggcgcgcttcaattcatccggcttgacgcttcccacggccttcccgttgacagccagcttcaccgcgggggcattgctgtaaaccttcacgggcaccgtcttctccgtgcgttccgcaaacctgcgggacgtgatgtacacggtcggctgggggctccagttggccttgtagaagaaataggcgtccttgggcgtcttgcggtcataggtcaccagccccttgtcattgatgccggggctttccccctcaaagcgggaggcggaaccgaagtcaaacatgttccagacgaaggagccccacacctccggcctctccctgatgcacttgtaattgatctcatgcgcctgggactgccactcctccggatgccagaacccggtgggggacggccttttggccggattctcatgcatgcccgtgctggcgccatggccgtattcgctgacggcgattcccattttgccgccgtaatcgcggatgtagccattcaggttccccttcatggttcccgggccgcccccgtaccagccgggatacgtattgaacgcgatatggtccggaatattgttcagcttcttgcggcccgcctggttgctggcccccaccgtcatgcgggaggggtccgtctccttcacgaacttgttcagttccgtcaattcagcctccatgtccacccctttggaagaagcctccggctggtggccgatttcattgaaaatgccccacatgcagatggaggggtggttccagtgctggtaaatcatttcccgggcctggaggcggttgttctcccggaactccggcgtatcccgcaccaggttgacgttgggcacctcggaccagacgaccagccccgtcttgtcgcacaggtcgtaaacgttggaagaagcgggatagtggcccgttctcaagccgtccgctcccatgtccgcaatcagccggatgtcccgcgcctcatcatccggagaaagcgcccagcccttccccttcatgtcctggtggcggctgacgcccttgacctgcatgggcttcccgttcaggacaaagcccttcccgggatcaacggaaacggtccggaggcccagaggctgcactatttcgtccgtctggccgtccgccgtcctgatggaagtcttcacctggtagaggtagggattcctgactccgttccagagcacgggcttggcgatcgccagcgttacgggaacctccaggttcttcttttccccggcggcggctttcaccgtctttccggccaccttcctgcccttcatgtcgaggatttccacggctacatccacgtcccccgcctttccgtccgagttcagcagggttttcacttccacctccgctttggacttgtccagggacttcgtcgtaatgaagacgccgggggaggcgtaaaagagggggtcaatgcacacgccgtccgtttcaatcagctcaatgggccggtacaggccgccgaacatggaaaaatccccgcgctggggcgcgatgtggtcccgctgcgtattgtccaccaggacggaaaccgtgttggagccttttttcaggaggggagtgatttcataacagaaggcggtaaacgccccctcatgcctgccggcaggcttcccgttcacggaaacctcggaaacgatgctggctcccccgccgcggatgaaatacctcttgcccggcctgggagccaccggaagagtacgggtataaacagcggggccgcgccggtaaacctcgctgttgacggacttggcgtctccgcgcttccccttcacgccgtccgcggcatccttcgcattccaggtgtggggcaccgtcactttcccggaggggcttccgttgaagctgtaatcccaggaaccgttcagaggatagacttcacgggcatcagccgccagaatggagcccagcgcacagcacagcccggcacacgatacgttgaaagagtggattctgatgttcatggtacagcggaataatttatctcatacgttcaggcatgtaaaatactttcatcctgcgggggagttctccccctcttctaacaagaatttattggcgtcaaatggatagtgttcaatttgacattcatgaatataaccgtgctttctaacattttcggttcctgcactaccagaaactttgattttccgatcggatcaaagaaaacataagtaacaacatatcctttacggttacgcgttttccgatggaaagcataagttttctttactataaggatggcctttttcattaaaaccgtgtttgtacaaacacgaggaatgagtatgagaaaagcaccgaatacaaataagttgaaatacgttggagccgcgcttctggaaggggaatcagtcaccctgatccaggctgcaaggctggtattggaaatcaaggaggccctgggagatgaaatctgcaccatcacccggtgcagggaagtcgtctccctgggactgaacgccatcaagaacaaacaccataccgtcagcttcggtacggcggccgtggaatgcctgcgttccaaaagccatcgccgtccccggacgctgacggacatcaggagcatcatccacaagctcaagaagagcaacccggaactggagcacacgcccctccggaacctgagcgtggaggaatgccagagcatcctgatgaacaccttcaccacgtcccgtcagaggcacaaggcgaggctcatcctgagcggcatcttctccttctccgtcaagcgcggatggtgtgatgaaaaccccatcctccgcgtggatacgcccttcctgcgggagcaggaaattcccgccctgacgctgaaagaagtgacccagcttctcaaggcgtgcatggatgaatttgacggaagctgcgtggctggagcggccctgatgatctttgcgggcatccgtccgcaggaagtggaacgcctgctctgggaaaacatcgccatccgcgacggctgcgtgatcctgaactccaagcataccaagaccggaggcgccagacacgtcaccatcctgcccgtgcttgccaaatggctcaaattctgccgtgacaaaagcaagcccggacccggcacgcccatctgcccgaagggctggacgatcaagtggcgcaaaatccgcaaaaaagccggctggggcggaagaaagaaatcatgggtgcctgactgcctgcggcatacctatgccagctatcacgccaagcacttcaaggactacaacctgctgcaaatggaaatggggcaccgctcctcctccctgctccgcacgcggtacctgaacatgaaaggcatttccccgcaaacggccacgcgcttctgggggctgacgccggccaaggtcattgcggagacggaaccgccggaagaaccgccggcggcctgatgggcaaagagaaaaacgctttggaacggaaggcccttttccctgccggggcatggaaaaaaggccgtttcctacagctcgtaataggtatatccgttcaggccggaacggaacacttccagagccctccggcgttctgacggcgatattttcccgtcggctacggcctgttccgcaaacgtgcggaacttgttgatcagctccttggggtcatactccacgtaggaaaggacgtcggccaccgtatcgccctccacttcatgggtgtaaacggggcggccgccttccaggtgcacgcctacgacgttcgtatcccccagcaggttgtgcaggtctcccagggtctcctgataggcccccaccaggaacacgcctatgtaataatcgtcctctccgggcttgatggcatggagggggagagcggtagccacgtcctcacggtcgatgaaatggtctatcttcccgtcgcagtcacaggtgatgtccgccagcacggccttgttcgtgggccgttcgttcaaacggtgcagaggcatcacggggaaaagctggcggatggcccaggaatccggcagggactggaacagggagaaattgccgtaataaaagtccaccatggagcaggaaagctcccggagatcttccggaatggtttccatctccgccagcatgcgggaaatgcggctcaggatgtgccagtaataggcctctcccagcccgcgctggcgcagggtggcgttcccgtaaaaaaactgggcgcgcagctggtcccggtaatagcaggcgtcattgtagcactcctgcatattcttcctggccagggtccggtccgtatccgcaaaagccttcagcaactccggagcatcctccggcaaatccggcggaggttcctcgcccggcgcgctggtcacgtccagcacgttaaacaccaacacggaataatacgccaccacggcgcggccggactccgtcaccagcgtgggatggggcacctcgtacttggtgcacatgtcccccaccacctccaccacgtcacgggcgaactccgcaatggaatagttgcaggaggaatggaaattcgtcttggacccgtcgtaatccacggccaggcccccgcccatgtccagcgttcccagcggcgcgccttccttcaccaggtccacgtaaatgcgggcggcctccgtcagcccctcgcggaccacggaaatattcgggatctgggacccctggtggtaatggagcagtttcaggcagtccagggaatccatctgcttcagcttgtccaccacatccaccacctgcgcggcgttcaggccaaagacggacttgtcccccgcggactcctgccacaggccggaacccttggccgccagcttgatgcgcacgcccagattgggccggatgtccatcttccgggctcgtgccagaatggcgtccagctcggaaggcatctccagcacgatgaaaatattcagccccatcttctgggccgtcagcgccaggtcaatgaactcgtcatccttgtacccgttgcagatcaggtaggcattcggattgtgcatgtgggccatggcggcaatcagctccggcttggaaccggcctccagaccgtaatcatacttggtgccgaactccgcgatctcctccaccacctgccgctgctggttcaccttgatggggtagacaccctggtacttgccctggtaatccgcttccttgatcgccttccggaagctgtcgttcagctccgcaatgcggctgcgcagcaggtcccggaaacggaacagcacgggaacggtggtgccgcgctccttcaggccttccagcaggtcgcacaggctgatatcctttttcccgccgtcctcgtcgttcaggcgtacggtcacctcccctttcttgttgatccggaaataaccgttcccccagtcgtcaatgccgtacaaatctgcggaatcatgatgactccaaccccggactttctgcttgatgccttctttagctgctgccatgtcaatctgtctggtcaaatgttctagcccaggcgggcttcaaaatcttcataagtaaagcggcgcaccgtctccacggagccgtccttcctctggacggcaatgtccgggtggcgcacgccgttgaaaaacgtggtcttcaccatcgtataatgcgccatatcgtcaaacacgagttcgtcgcccgccgccaggggctccgcaaaggaataatcccctatccggtctcccgccaggcacgtgggcgcgcccaggcggtacgtatgggagccctccccggcgttccccgccagcgcgtagctctccccggccatctgcacggcgggctgccgcgcggaacggagggaggcgtcccggacaatctggaatacgtccgggcggtagggcatttccagcgtatccggcatgtgggcggacgcggaaacatccagaacggcgtgctccaccccttccgaggaaaaaatatccagcaccctgcaccgcagcacgccggtatggatggctgcggcctctcccggctccagccagacctccaccccgtagcgctcgcgaatgcggcggacgagctccgccagcagcttccggtcatagccgggcttggtaatccaatggcccccgcccatgttcagccacgtcatctccgggcgggacaggatgtggccgaagtgccgttccaccgcgcccagcgtagccgccaggtcatccgccccctgttcgcacagggtatggaaatgaaggccggaaataccggccaaatccgccccctgcatcacgtccggcgtgacgcccaggcgggagccgggcgcgcaggggtcatacaggggcgtgtggccggtggaaaaccggggattgacgcgcaagccgcacttcagttccccggaaagaaagcggggatgccgcatcacctcctcccggaagcggctccactgcgtcaggctgttaaaatcaaggtggtcggaaatctccgccagctccgctatttcttccggagcatagccgggagaataggtcagcacatgcttcccgaacctgcgccgggccagccgcgcctcccacaggccggacgcgcagcagccgtccagccagggggacagggcatcaaagcagggccagcaggaaaaacctttcagagccagcacgatacggcacccggcagcatccgccacatccctcaggataagggcgttgcgttccagggcagactcgctgatgacgaaggcggacataaagcaacgacaacctaagcgattcagaacgatttgcgagaaaaatttgagtaatctaccatcataccctcaaggcggcacgcatgaaaggcttccgctgcgcctgcgcggttcccctcatcaaacggaaacgtcaaaaaacgccacaaatcggcacttcctgcattcttttccttgaaatgggatgtgttttcctcttttataacgtaaccattgcgattgccatgactaacattcatcccttcaccactgcagcagcctgcatcctgaccgccggagcagcgctcttcaccagctcctgccaacctacctctcccgagagctacgcccgtcaattcgctactgcccagcacgtttccgtacacgggtacaacggccgtgaaacgctgaccaccagggtttacgccgactggggcggcatgccggccaatgcgcgccgcgccatggaggaatacatcaagggagccgaatggaaaacgatggactacatccgtccgcagtacttcatccaggtggaccgctcctactgggcgatctgcattgacaatgacggcaacctggtgggcatcattcccttccgcaatggcagggacgcccgcaagatgtccgtcaacaaccacttcaagatgctggtcaacacgacggaccgcgctcccgccctgggctatgccatcctgaaaaacctggcttatgcggacggcctccgcgtcagcacacgcaaggctgacggcctggaaacgcccgttccggcgccccccgccgtgaaggtggtcgttcctcccaaggaaaccgctccggctgccgcccccgccgccaagcctgccgcagctccggctgccgaacccggcacgacggaggaaactcctgcggaagacgctaccggaacggaagaaactcccgctgcggataacgcgactgaaggcggcgacgccacggcgacggatgacgccgcttccgacgacttttaagatgcttccccttccggggatgccatcgccttaatttccatcacgctccgccggcacgtacggcggggcgttttttatccccgttcctccggaacaaaagcaagtttgccgttattttcaccttctccccatcctgaaaaaagagaacggaaaaaatgcgtttttaagcgggaccgtatttccgggcaggggaaacttcctccgctgaatatcggaaaagctaccgcaggaaaggcagggaggctccctgcccggatgggggcagaatggccgtgccggggaatacgccgttttcccgtgtttttccatggacagcctgtggaggaatggcttgcctgaaaagcccggaggattccacgcggaccgcatggagcgccgcaagcctttgcggcagatgaaaagaaactgagcgccagcgaacggatattgaaaaaagtccgttaatcaaaacagcgtacgccctccgtccgcctgttcatgcggaagccgcagaaatttgaggcgcttaccgcaagtcttttcagaacaggaacgcggcgcggagaaaagcgcctgtgaacagcccgtttcatggggaaactgcccttccggcaaaggcggtcacaagctgaatgccctgccggaagcagggcattcccattcacccgccttcaccagaggcacatctgccggccctgatggaaaagaaaccggaaactgctgcggaatctcaattcccgcccttcttcacctggtcgggccacggaacggagcttccttccggcgcgcccagttcattacccttcttgtaggtgggcatctgcgccttccgctcgcggagcagcttgcccatcaggccggccatttccttcaacttccgcggctccctggcagccaggttttccttttcaccgatatccttcttcaagttgtacagctcaaagctctggttcccatgacggtaaatcagcttccagtccccgtggcgcagggcggtggaagcgccgtactgaggagcctgacgattgttttccccccagttgttgggctggtggaacagcaggggacggtccgcagggaaccggcctcccttgagcagcgggaccaggctcaggccgtccagcttctgcggaaccttggcgttccggcatcccgctatatccagaagggtcgggaaaaagtcgtcaatcaccaccggaacagcgcacctggaaccgcccttcgtcacgccgggccaggaaacgatcatgggctcccggatgccgccctccatgcacgatcccttgccgaaggaaaggggataattggcgtcctcattgcccagcctgccggaaatggccaggccgccgttgtccgacatgaacaccagcaccgtgttcttgtccatgtcatgctccttgaggtacttcatgatatcccccaggctcttgtccatcccctcgatcaacccggaataatgcttctccaccggagaccacttgtgcccgtcctccggattcttgtaggaatccgcaaacctcttgtcgtaggcgcgttcatccagcggggagtgcagggcgtactgggccatgtacaggtaaaagggcttgccggcctccttcggattggtcctgatggcttccagctgcttgagggcctcaagagtcagcgcctccgtcaaaaatacgtcgtcctggtaataattattctcatccagcccgcgcacatggttgaacccttttccgtaatgcttggaaccgcggtaatctgccgggtgaccgatttccgtacccgcaatattgtagtcaaaccccatattcaacgggttggatcccggcgttccctgggtgccgaaatgggccttcccgcagtgcacggtgacgtagccgcacttcttcagcatctccggcagcgtggccgccgtgacgaaggggcgcgtcatgttgtaatgcatgtcttccccggaaatggggcgtttcgtcgtcccccgggcgggaatcccgaccggctggaggccgttgagggcccagtccggcggctggagatttttgttgttgcggtccgtcgttccgttctgctccctcacccagcaggtcacgcggtgccgcgccggattcatgccggacatcaggctcacgcgggaaggcgtgcagagggggtgggcgtacgcatccgtaaacgtcatgccctgcgcggccagcttctccatgttgggcgtgcggtagcgcttgttcaggaacgtcttcttcgggttgccccggtcgtcggaccagaacgggtgggacgtatcctgccagcccatgtcatccaccaggaaaacgatgatattgggcttctttccggaaacggggtgggaagtattgctctgggcggacgccccggcaagcagggaaaacgcgccgcaggcggcggacaggagacaggcggagaacttcatggtcgcaacatatttaatataatcgtcaaaatcctttcaacctaaaaatacgcacaagcaacctctggtctttcctcttttttccggaaaaaggcatcatcctccgggaagcggcggaaacgcttttgcgccaccgggtttaggcttgattggccagcgggcggagtatacattcctccccatcatgtccgagcgcaagaaaccatatccctttgacgtttttgaacccaaatggcagcagatctgggacgaaaggaaaacctttaaagtaagcaatcccggagaagagggctttgacgcgtccaaacccaaatactacgtgctggacatgttcccctaccccagcggcgcgggcctgcacgtgggccatccggaagggtatacagccacggacatcgtggcgcgcttcaagcgcatgaacggcttcaacgtccttcaccccatggggtgggactccttcggccttcccgcggagcaatacgccatcaagaccgggcagcacccctccgtcaccaccttccggaacattgacaacttccgccgccagctcaagatgctgggcttctcctatgactgggaccgggaaatagccacgacggaccatgaatacgtgcgctggacccagtggatattcctccagctttacaactcctactacaacagggaactgaaaaaggcgcgccccgtctccgaactggaggaacaggggctgagccgggaggaaatcgaccagcgccgcctggcctacgtggcggaagcggccgtcaactggtccccggacctgggcaccgtcctggccaacgaggaagtggaggaatggaaatccaagggccaccgggtggaacgccgccccctgcgccagtggatgctgcgcatcacggactacgcggagcgcctcattgacgaactggagccgctggactggccggaatccatcaaactgctccagcgcaactggataggcaaatctgaaggggcggaagtggacttcaccctgaacgggaaaaccatcaccgtttacaccaccaggccggacaccctctttggagccacctacatggtcctctccccggaacacccgctggtggacaccatcaccacgccggaacagaaagacgccgtggaacagtaccgcgcccagtgcgcctccaagagcgacctggaacgcacggacctctccaaggaaaaaacgggcgtcttcaccggagcctatgccgtcaaccccgccaacggggaacaggtccccgtctggattgcggactatgtgctgatgggttacggcacgggagccatcatggccgttccggcccatgacgaacgcgacttcgccttcgcccaggtattcggcctccccattctccaggtggtccagccgcccagtgaagacattgactggcgcggcttctgcggttatgaaggcgccagcgtgaactccggcttcctgacggggctgcccactccggaagccaaggaaaaaatgatcctctggctggaggaaaacggcaagggccgccgcaaggtaaactacaagctccgtgactggctcttctcccgccagcgctactggggggaacccttccccatcgtctgggaagacggccgccaccgcgccctgccggaaagcgaactccccgtgctccagcccgatctggacgacttcgcccccacgggcgacccccgcggcccgctggtcagggccacggaatggattgcgtacactcccacggcccaccgtgaaacgaacaccatgccccagtgggccggctcctgctggtactacctgcgctacctggatccggaaaacacggaacgcttcgtcagccgtgaggcggaacaatactggatgggctccaccggcaaccccggaggcgtggacctgtacgtgggcggcacggaacacgccgtgctccacctgctctatgcccgcttctggcacaaggttctctttgacctgggctacctcaccaccagcgagcccttccagaagctcgtcaaccagggcctcattctgggggaagacggccagaaaatgtccaagtcccgcggcaacgtcgtcaacccggacgacatcgtccgcgaatacggagcggactccctgcgcctgtatgaaatgttcatggggcccctcaaggacgtgaagccctgggccaccaagggggtggaaggcatctcccgcttcctggcgcgcgtctggcgcgtggccttccgggaaaaccaggaaggcgaatgggaaatcaaccccaagctggcggcggacgctccggaagccgacgtgctccccgtgcgcaaggaattgcacaaaaccatcaggaaagtgacggaagacatcaatgacatgtccttcaacaccgccatcgccaaaatgatggaatgcaccaacgccatgacctccgcggacgtggtggacgtacaggactatgatgccttcctgacgctgctgaatccctttgccccccatctcacggaagaaattcacagccgcctgcaagcaaaattccccgccctggcggaaacgcagctctgccagaaaaactggcctgtctgggaggaagccctgctggtggaaaacaccgttcccatggtcatccaggtgaacggcaggctgcgggacaagctggaagtgcccagggacatctcccgggaagaactggaaaagctggccctggcctccgccaaggtaaaaatcttcctggacggcgtcaccgtgcgcaagataattgtcgtgcccggccgcctggtcaacatcgtagccaactgacaccccggaaagactctgccatcatgaccatgatcgccccgtccctgctggccgccgacttctcccgcatcggggaggaagcgcgccgtgcctttgactccggagccgactggctgcacctggacatcatggacggccactttgtggacaacatctccttcggcccggaaatctgcgccgccgtcagaaaagcggtggggccggaccgtttcctggatgcccacctcatgattgaacggccggaccactactttgaccgctttgtcaaagcgggcgtcaacctcatctgcttccatgtagagctgggggacccccactacatccgcgacaccctcaggcgcatccggaaagcaggagtgaaaaacggtctggccgtcaacccggccacgccctttgacgccgtagttccctacctggaggaaatagacctgctgctggtcatgtccgtggtgccgggcttcggcggacaatccttcatgccctccgtgctggacaaggtggaaaaagccgccgaatggcgcacggagcaccaggcccctttcctgattcaaatggacggaggaatcggcaaagacaatgccgcgcagtgcgccctggccggggcggacgtgctggtggcgggctcctccaccttcaaggctccggacatggcccgcgccattgcggaaatgaagtaacctgcggacggtccttacccagcccgttattccggaaaatcaaaaaatccggcattcccgggaggagtgccggactctttcattcatggctccgttaatcagaacctgcggcggcgcatcagcagggcggccagccccagcaggccgagggaggcggaagccggttccggcacggcggccagcgtcacttccgccctcaacgccggtccccatacggaaccctccgtactggtaaagcccgcattcttatacacatccccgatgtccacgccgtcggcttccttgccaagcctcaacctggcggaggaaaagctcacgtcaccccaactcgtggcatctgaaatctgcgtcgtcgtaaaagccacgtaataagttacgccgctatcaagctgcaaattattgaacacggccttctcccaggaggccgctccgtctccggcgccatctccggccatgtcaatggtggtcgtggactgccccacgaacgtcgttccgtccttggtagcggcggaggaaaaaatcgtcacgtacagcccgtcggtggcatccgtcctgttcgtcgccttggcaatatccagtgattgcaggaacaccgtggaattcggtgaaatcccttccccggaggaaagaagcatgtggtccaggtcaaaggaaaaaccgtaataggctccgtatcccccggaagtcagggtggaaggatcgtctttggtcgtcgtgctcaacacagtagccgcctgtgccgttgccaggctggccagaacaccaagaatacataggcacttcataaatttattcttattaatgggtgaaatacggaatggaacccgttgcccaaggaaatagcggattatgaatccggagtcaagcttacaaaattgaaagaaaaaggttttggagaatttgagcttgtccatatcatgggaattgtcagagggtgttcctgatgtaatgggctttcttttcgttccagtaatggttaataaccgtctttacgcttcggcggcggcctccatcagggcgggaggccctggctcccgggagatatgcgactgtgaaaggggacggtggaagtgttgatggagtgtggctttgcggcactggcgcctgaaagcggcagagttcctgcttttcgttgttgaaactctttctggagcatagcggaagttttttttaatagccgtcactgcattccggtgagggcatccatcagagccgggaggtcctggactaccagacgagatgcggccgtaaaaagtgaatgtgggaaatgttgatggaatgtccatttggagttttttccagccaagccggagcctggagaaggacagcttttccggattgtagaatctttaacggattcataatccggagacatcatggccgcaccccttcccggaccgcagctactccgcagagacgcccatcatatctccctgacgggcaaacaactccatgccttccgccgtcttttccagaaggtcgggagctaggcgtattctgcccggttcaaaaaagcacatcaccgtggagcctccaaaggcaaaataccccttctccccccctcttgcggcgggaacgtccggaacatacgtctcctcaatcagccccaccccggtggcgcccacctccagcatggcgacctctccccacaactccgaccggatcagggtcaaattccttttattagtccatagccacgccagccggcggcgcaggcagtacggagacacgctcgccagcggaccgcccagcctcgtccacgggccgggcactccggacaccggaaaatgaaaacggtggtaatccgtggggcacaggcgcgacaaaacgacggcgccttccgcataccgtccggccagcgcttcactccccagaagggcgggcaggtcaaaactctgccccttcacgaaaacgctcttgattcggtcagcgcgttcccagcccatgtgccgggcatccgcgggaaaaacggccgtatcctccccaccggccagagggcgagctcccggtttcaggcggcggtagaaaaaatcgttgaaatgcttgaactctcccatccccttgagggaatcctccatattgatgccgtactcctccacaaaggagtggatggaacgcgcgctggaaggacggttcttcagccaccccagcagacgggaaaaaacgccgcgcttgatcaggacatgcagtgccgcccggcctgtggaagtgccgtaaatccattgcaggtacttctcccccagcacctgttcccgttctttcctgcccgtgtagcggttgtaatagcgtatgccctccatgaaacgcctagagtgtcgcccgcttccccatttgtccagccgaaagaggctcgccgcctcctatttcccctgtgcgcgctccggatcctcctccgtaccggaatcctttccttccgccgcgcggtcataccattcccgtgcaagattcaaatcctgcggaactccattgccgtgttcataacaggcggccagcaggtactgggcgtccctctcgtccgcctccgcagccttacgcagccagtacatgaacaaatcctcattcttctccaccaggccgccttcccggtactccagggctaggtcaaacatggcctccggcttgccctgctccgctgcaagctgcagccagtgcagagcctgcgtatcgctcttctccgcgcccaggccttcatgaaaacaatcatacaggtcaaaggcggcatccgcatctcccgcatccgccttctgcttcaacccgggcaacgccctgtgaaaccaatcctccgcccggtccgggtccttctccacgccgtccccctcctggtaaatgcgccccagacggaactgggcggagggattcccggcttcagcctgccggacaatcttacgtttccactcctccagaaacttcttcatcctgccgcttctccatttcagcgccaccagaaaaacgaccgctaccagcaccatcagcaaaataggcgtccattccaaaaaatcattcaaccagtctatatgcatcttatctttatattggattgctccggcttcatccatcacaaactgtgaacgcggaaaaatatcccatgccgcaggaaacgcaccgcttgcctgcttccctttcccggacaggctgtccggaaaccataataaaccatccggaaagttgtccatccggcgtcctccccaacataaaaaccctccttaaaagaatattcaataaataaccatttatcaaaataatcacctcccttaccatgcagacatcattaaaaacaactgcactattcattctacgcaccccgtgagggtgcgactgacatggacaagccgctttgtcttggctccagggtttcaatctgtaacgtcgcaacgctttgtggaaaaatttatcaagcagtgtagaaaaacggccttaaacgcctccccgctacatcctcattgcaacgccgtttcctcgcccctacaagcggccagcaagccgccccaatccaccgcctcgttgtcctccctagccactcccccctcccggatcatccgctccctggccttggccagcaggtgcatcactctggctcgatcgctggcgggttgataagactgtcgagggctacccgtagtaaccatagcaaatctggcggcgtaactctcggcgcttaccgtccggctgggccagcaccaagccgtccacgtgctccaggaggctcgctgcctccacggctcctcaatccggcacaaggttgccggaaccctggccaacacctcccggccgatcgtcacatcctccggagccaaatcctccaggagcgtccaatcaagctcccggtagagacgtctggccacccatccccgcaaggcatacatgcagccgtatatcctccatgcaccattgacaaaatccccggaggcgtacatcggacatgcagggtggtcaatcatccaacgcagccagccgtcatccaggagagccgtatcacagtcgatcttgaccaggatatcgtcatcctcggcctcacggcacatctcggaaagcatcccacggatacagtccgctccgcgcaggttgccgttacgctcccaagtggactgcacataatccgcacccaagcaccggagagcggccgctatgtcctcatggaccggattggacgcatcatcaaccaccgttacgcccgcatagggcacagacatccgggcgcaccgcacgcaagccaccgcctcggaggcgtctcctgaatatgaaaaaatgaaaatcctgatcatactattatatatagggtaaattttaaacagccgggccgtatggataaaaggtgccgtgattgaccggtatctggatagtgcccagcatgtgctggtacacctctttatccttaagggtggcaatgtggaaggaataagaaaacacctccgaggggtcggcctcctcggtctggagtcgaagaggattgaccgtgccttgctcgtacatgatggagcagccagtcagctttccagtgccgttaaatttgacgtctagccatatctccccggaggtgtagccagccacagcgtaccatccggagctgtcgtttcccggagttttgccaatgtacaccccctggagcatcagcttgccgcgacgcatccggtagccggtcacatcagcattgtcgtcatcccaatccaactccacctgaagatcgtaaacggggggcttgtcgggagccgccgtccagacgatttccccggccggtcccaaggtcggcgcgtccggagatttgtaggcctccgggtcatactggatcgtggttaccggactatcttgcccctcttcttggtccagggcctcctgaccggaggccatctgctggatgcggtccatcatgtcctggagggacagatgcgccggcacgccagtgttgatgccggtggactctccggccagatcgacgctcaccccctgcacggcggtggccatatcccggtactcgtgccgcgcgccggtaagcgccagacggcgaccaaccaggttggcaggagagagcgcccgcagggagttgatgctaccctcccaaggtacggtgcgagtgatctcatagtatgaccgcaagatggaagtgtaatcaggccactcctgaactgaagagggcggcgtgcctccgccactgatgggaggatcgccaccgtcatcccctccggcatccccggacttgttggcccggtagcgcatgcggcgcttgttaatcgtgcgcccctgccagcgcagccagttgtaccagcgcgtcttgcctcctacctgcttggtgtgcgggaagagcatctcgcaacctttaggcggccgcttgtccgtgtaaatgtactgtttcagctctacataacaccacttgatcgtcttacaaacctcactcaactggccgctcgcatgctcataaacttgagctgatgcggccgtggaataattactcatgtcggccccctccacgccggccatgacggatttcttgatggatcccagttgcagtcccggcacggatgccagctgggataccttgctgtaccaccatttcttggatgcctcatccgtgccggcaggcaacttgacgccgcgcacctccacgatcggcttggtaaaatcccagacggggtcctcgctgctcgcgggaggatcgtcccccgtcgaggttgctccgccgggcagcgccacctggatggtgacacatccctcctggtgcaaatcggagcccttgggccagacctgggactggtaagcctgccttccggccgtcagtacgacgcccacggccggaggcaccaggtccggacggggagacaggttgatgccggacaaccgatcgcgcacacggtccagtgtcgccaccggcaaatcctctccatcggccaccctgatcacgggagatgctgatccgcgcacgatgccgcccggcaagctggccgatcatgtcggggctgtacgcattgttaccactcctgggccgcataagctcgccgagcggggatatagcaacacggtcgttttccctaatcaggaggtgcaatcatgagtgatcctgactatccgctcacctggccgaaggctcttagagctgccaaggagggagccatgattgagtctgcctgcttatctcaatcggatggataccgcattatggcagtattcagcccatccaagggggtgctagtcgatcatatttggcaggactgggttattgacatcggcagtaacgaggtccgatctggatggcgtatcgtcccacaggaggaggtgcagtaggactgatcatggtccgaccattgatagaccatgacgctcttatacaattcaggccgccaggttgttcctggcggcctttttcatttcaatcatcatcttcctctctcctgatcacaatccacacgttgtcgagtacatccctcacccagcatgttgttttggccccttcacgagttgcccacatcaacacgacagcggtatcatggagatggtaaatttgaggggcctttttcctccgatcttctggagagataacgataatagagccgtacaatggcatgcaatatgtagatgtacacatgcgggaatcctatcatgattattttccacgatgcttgataatttgcattcctgacgccgattttttccacactgtctttccctgatcacccgacgcttgcaccccttgattttcctagcgttcacccttattcaccccaaattcacccctttccacccttcactgataatgatcaaatccacgcacccgtgaaggtgcgacccttcctctgctgaagcgtcaagcgtcggaatgtttcaatccacgcacccgtgtgggtgcgacacaacacacccgtcatccctctccacacatccgatttcaatccacgcacccgtgagggtgcgaccaaactttaaccctaaaaaggtgtaactaaacttgtttcaatccacgcacccgtgagggtgcgactccacgtaaagctgataggagaggacagtaaacggtttcaatccacgcacccgtgagggtgcgaccctacaagccgcaggacaacaaggacaacgcgccgtttcaatccacgcacccgtgagggtgcgacagatggcgttaagcgagattccggcgaagagcaggtttcaatccacgcacccgtgagggtgcgaccctccctccatcgtggcagaggcggaaagggattgtttcaatccacgcacccgtgagggtgcgacagttgtggttgaattaagcatgaagtatgaaactgtttcaatccacgcacccgtgagggtgcgacttgcgctgaacacggtagcctagagctccaccgtagtttcaatccacgcacccgtgagggtgcgacctcaaggtcgtcactgccgggggcgcgcatcccgtttcaatccacgcacccgtgagggtgcgaccggacaagccaaacgtcttgatggcagaggcgtcgtttcaatccacgcacccgtgagggtgcgaccaatccccccactaacaaggacagggactgggcggtttcaatccacgcacccgtgagggtgcgacggcctggaggatacgggttgagcatcaagggcgcagcaaggggtttgcgccaacctgatgcggaagccggatacggtcaggtccgataagaggtgattcttttgtcaatatccatttcccaatcacttgcagcaagcgccggtctcccgggaattttctgtgagcttggggttggcgcaaggcggcatcagacgcggcgttattccgtaatattccatcttcgccgcgtccggtccggcttgcattcaacttggttcattgatgctagccgttcccctctgccgcgtccagcaacatcttccatgttccttcaaacagaaccgtgcatccccggagccgccaacatggagacacataaacaacaggcctcccgggcggcgcgccgttttccccattgccggaagccgaattcccctccggtttccgctgccattaaaaaggagccgcccttgcggacggctcccgttaacgaatgaatgacggaatatcccttacagggccgtcggaatttccttgcccagttcggacgccttcttggcggagccgtccccggcaatgcgttccagaatcacgtccttgtagctcatgccgcccaggatgatcggcagcacatgcacgtcgtgaggaaccattacgtccagcacgtacgcctccggggattcaatcatgcgggtgatggccgccggaagttcctctatgcggagcacgcgctcgcacttgacgccgaatccggcgcagatgagcgggtagttcgggtagatgacgtcttccgtcttgtgggtggggtcatagctgtcgtgcgggtccgccaggaaggtctgggcccggttggagtcatacttcaggtcttcccactgcaccaccatgcccaggtgctggttgttcaggatgatgcatttgacaggcaggcgctccacgtgaatggtagccagctcctgaatgttcatgagcatggagccgtctccgtcaatgttcaccaccagcttgtccggacaggccaggcacacgcccatggcggcgggaaggccgtagcccatggttcccaggccgccggaggtagccagacgacggggcttgtcgaatttgaagaactgggcggcaaacatctggtgctggcccacgcccgtgcagataatgggatccttgtccgccgtctggcggtagagttcctcaatgacggcctgcggggagatatagcccttgcggtcttcataggagaaggggtattgcttcttccagtcttcaatcactccgaaccattccggagtgcgggtaaagccggaggatttgcgttcccagccttgagcggccagagcggcgttgagaacctggagggcgtccttcacgttcgcgcggatggggtgcgccaccttcttgttcttgttgatctcgctggcgtcaatgtcaatgtggacgatggtggagtccgggcagaacatgttgacggcgccggtcacgcggtcgtcaaaccgggcgcccagggcgatcaccaggtccgcttcattcacggcgttgttcgcaaacacggctccgtgcatgcccagccagcgcagggaaagagggtgggtttccggcatggcccctatgcccatcagggtggttgccacaggaatctgggtgcgttccgcaaattccagcaggtccgcggaagcttccgcagagatgatgccgccgccggcgtaaatgacgggacggctggcgccttcaatcagcggaaggagttcttccagctttcccgtgggaacgggcagcaccggattatagccgggcaagtccatttccatgtcaaagtccggcgcaaacacggcttcctgcacgtccttgggcatgtcaatcaccaccgggccgggacggcccgtggaggcgatgtaaaaggcttccttgatgatgcggggcagttcttccggttccgtcaccagatagctgtgcttcacgatgggggcggtcatgccgaacacgtccgtttcctggaaggcgccgcggccgatcagggaacgcatgacctgcgccgtaatcgccaccagcggagtggagtccagataggcgtccgcaatggaggtgatcatgttggtggcgccggggccggaagtggagatgcagacgcccaccttgcccgtgacgcggccgtagccttccgcgccgaacgcgccgccctgttcgtggcggggcaggatggtccggattttgggctgatggctcagggcctggtgaatcggcatgctggcgccgccgggataggcaaagacgacgtctacaccttcacgcacgaggcattccacgagcacttcggctcctgtcatgcgggttttcgtcggggcggatgatgttttgtcgtttgtgctcatgtgcaaataatattttatttgttcaataggaaaaaaggttctagcgcattccgggcgtaatgtgaagccttttcattaaaatgcgggcgtgcatcccgggaggaggggaaggccggaaagcgcccctctgcggaagccgctggagagggaatcaggccagggacgcgcggcggacgtgcacgcagtccattccggcggctgcggcggcctccatgccgggttccgcgtcttcaaaaaccacgcagcggtccggggatgcccccagaagttccgccgctttcaggaacatgtccggcgcaggcttgccatgctccacttcatccggcgtcagaatcacgtcaaagagacctgaaagtccggcggcggccagcgtccgggacgctcccggcatggcgcttcccgtggcgatcgccttgggggcgtctcccagggaatgcacgaattccaccacctcccggatgggctgcatgccctcctcttccagcatttccagataaatgcggcgcttgtccgcagcggtagaagcagcatccatgtgcatgccgtaccgttcattcagaaaacgcaccacgtcgttggcggatttaccgccgcaggaataaaattcatccgccaggaacacgcggtccggcgcccccgcacgggccagggccttgcgccatgccttgtaatggagcggcatgctgtccaccagggtgccgtccagatcaaaaatatatccttcatattttttttcaggcaaatccacgcgtttcttcataacggaggcacaggatgccacaaaccctttttccggtaaagcccgcagtctgcccgcgcttaggaggaatgccttaaaaaatatatcaagagcttgacattttgtcctgttattctaatgtttctgccacctcgaaacggaaaccgaacctcttttaaaacatggccaataccaaatccgcactcaagcgcatccgtcagacagaaacccgcaccgcccgcaaccgcgctgtgtcctccaagctgaagaccctccgcaagaagattgccactgcggtggaaacgtctgacaaggaagccgctgccgttgcctataacactttctcctccgccgttgacaaggccgccaaggtgggcaccattcccgccaaccgcgccgccaactacaagagcaaggccgccaaggccatcgcaaaaatcgcctgagttttcacttcggttttctgacgatctttatggcaagccgctctgttctgctgagcggcttgttttattttcccctcccatgcagcaatcccgcctggataaagccaaactgattattgaccgtcccggggacttcaaggtttgcgaagcctgcggctccatcgtgtccctgaccactgccgtgtgtcccaactgcaacgcctaccgtttcgactccaatacggagtacgtcgtggaacaggccgtactgcttgcctcccgggaacagcgttccgtcaccccggaagacctggaaaattaaggagtcctgcccggcaccgtattcctgtttctctgttttcctctcccgcgggttcggccaccgctccgttttcgtgagaaaaacggcaaatgccttcccggcggaaggcgtgcccatttctccgcatccctccagctccggatgcgcgccgctacttgcgcaattctgcaatgcgcaggatagtggcctcaatcaggttggccgggcatgaagcgcccgccgtaatccccaccttcagtgatttgcccagattctgcaccactggttccgtggtcatgcggcggacttcccgcgtttccgtgtcaaaggcatccacgtactggatggatttgatgctttctgcggattcaatgaaatacgtgggcacatgctccttggcgatatccaccaggtgcgtggtgttggaactgttgtagccgcccaccacgaacatgacgtccagagggttcttcaacagctcgtacagggcgtcctggcggtcctgggtagcgccgcaaatggtgtcgaacacataaaaattatcatcgtccccgtccctttggacgacggcgtccttcaccatcctctggagcgtctgcgtctccgtcttcagcatggtggtctggttggcgatgcccacttcctccagatcccggtccggatcgaatcccggggaataacagccttcaaaccgtttcaggaacgcctcgcggtctccgcggcccagcatgtagtcgcacaggatgcgggcgtcctccagatcgtaaaccaccaggtatttcccctttccccgttcccccagggcccgggaggccgtggcgctggtttcctcatgggtggccttgccgtgaatgatggaggtaatccccatggcggcgtaattcttcacccttttccagaccttcatcacgtccccgcaggtcgtgtccacaatctgcacgcccttttcctccagcgcatccatgaagggagtgggcacgccgaacgcgggaataatcaccacgtcgtccgcggcaatccggtcataggaggaatcaagctgcttccagggaagcttctgaatgcccatttcctccagctgccggtttacctccggattgtggatgatgtccccgatcaggaaaatccgccggtccgggaataccctgcgggccgcatacgctatgtctatggcgcggcgcacgccgttgcagaatccaaactccctcgccaggaaaaattccgtgtggcccaggttgtacacgttgcccgcagaccggatatgggaaatcaattcactctggtaatgctgctggatttccttctccacctgttccatcacctcggctcgtctcacattcactctggctttgcgggttgagtcctgattcatgctcacagcttccacactttccttctttcgtcaagacaatcacagcttgccaaccggggcttttcacggtatgcacaggcgcatgctcctggccctggcccccatgaaagatgtgacggatctggctttcctcaagacgttgaaggacttgaattcactgccggattatttcatcacggagtatttcagaacggtggcccatcataaaaagatgtcgccatacatcttgcgctccattgatgaaaatcccacggggcgccccatttatggccagctcgtgggccatgagccggagtacctggcgagggacgcgctggccctgatggagcacgactgcgcgggggtggacctgaacatgggctgccccgctccgatggtgtgcaggagaaacgccggagggggcatgctgcgctccctgaaggccatggacgcggccctgggcgcgctccgggacgttcttcccgccggggccttcaccgtcaaatgccgcctgggatacgagactccggacgagtttgaacgcattctccccgtgattgccgcccacaccccggacagggtgtgcatccacgcccgcaccgtacgggaaggctaccgctccccggtgcatccggaatgggtaaaatgggccgtggaagcgctggactgtccggtggtcgccaacggcaacattgtggatgcggccacggcggacgcgtgggtgcggctggcccggcccgcaggcctgatgatcgggcgcgcggccctgcgcaatccatggatattttcccagctttacgaccgtttccagggtagagcccctgcttcccccaccttccgggacgtgctgcattacatccgccgcctccatgagcgcacgctggaaatgcaggagcgttatgtggaggaaaaacacatccaccgcatgaaaaaatacctggtttacaccgcgcgcgggcttccggattcctttgaccattacatgaaaagggcgaaaacctcccgcgatttcatgagcatttgcgaggatatcctggacaatgacgccccgtttgcccccacgccgccggaagacacgcacctgttcgcccatttccatgccctacttgcgcaagaggaagcttgtctccctcccgggattcaggtatgaattccggtgttcatgaatccgctgccttccgcccttctcctgggcctgaccgccgctctctgcgccgcccatgacgccattccggacggagtgggattcctgcgcgcctacatgcccgcgcaggacagggaaacgatcacggaagaacggctgaaccgggaagtccgcctggcgctggacgcccgcagccagttcccctgggccggcaaggttccgtgggagctttatgaaaacaacgtgctcccctatgccgtggtcaacgagccgcgcgacgaatggcgggaacagttccacaacctctttgcgccgctggtttccgcatgcaagacgggccgggaagccgccctcacgattgcctcctgcatccagaaaaccctgaatgtgcgctattccacggaaagaagggttcctcaccagggggtgaaggaatccctgcaatccggcaaggtttcctgcacgggccagagcatcctgctcgtctgcgcgctccgctccgtgggcattccggcccgcatggccggcgtccttacctggaaccatgtgcgcggcaaccacaactgggtggaagcctggtgtgacggggaatggaaaatgctggagtacaacgagaaggatttcaacaccccgtgggtgatgtccgccatcagcatgctggacccccgcaagccggagaacgccatttacgccacctcctggaagaaggagggcgccggagagttcttcccgctgatctgggaagcccgctacgacgaaaaacggcgcgcgctgaccttccctccggaaagccggaccgtccccgccgtcaggatcacggaccgttatatgaaactggcgtcggactgggtggcggcacagccggagtacctgccgggcagcaggctgatgctggatatcagggatgggaaggaaggcagcggcagaagactgcccctgcgcgtcgttctcaagtcggaagaagggaaagtcctggcggaaggcaccacccccggcccatccgacgacatgaggaagtttctggaagtgcgcctgccggacaacgtctcccgcggcattctggaattcatgctgcccgacggaacagtgcgccatgaacccgtggcccatacggaagccccggtgcagattttgaatttctccgtgaccgctccatgaggattcccctgtttttcaataatacggcgcgcagcgccagggccgaccgcttccgccgctggctggacggccaccgggatctttttgacgtcattgagccggaaagcagggaagacatgctgcgccacctggccgcccgggcggattccggaactcccgtcgtggccgtggcgggcggggacggcacgctgggcgtggcggccagggccctctgcaatacggaaacggtgctggcccccttccccgcgggaaccatgaacgtcttctcccgtgaaatcggtatccggcaggattttgaccacgccctgcatgttctgaatgcgggacgtcccagggacgtggacctgttcgccttcaacgggcagccctttctccagatggcgggcataggcgcggacgcccgtgccgtggaactgaccacgtgggaaatgaaaaagaaatggaaggccttcgcctacgtcattgccggcgcccgggtttgcacggagcggcagccccggctgaccctgtccacggatgacgggcgggtggtggcaggccgttccatcctcttcggcaacgggcgcaggtacggaggaccgttgaatttctttgcggaagcggataatgacgacggtcttctggacgccgtggttttcaaacattccattccctccatcatcggggaatgcctgatggccgccgtccacggaggcttccattcccggcggaacggctcctttgaatatatccggatgacggggggaaccgtcatttccgccggacaggccgcctgtgaactggacggcgattatatgggcaacgccccggtccgcatcacgcgccacggcacgctgaaggtactcgccccctgaagcggagccgcaaacaggccgcccctgcgcgccttaactgagcagaaaacgggtaaacgtatccagcatgcaggaaagatggacggtgtggccctccggaagcccggtgaaggccagtacaatggcggcatccatcagggccgcgacgccaatccatttgaccatcgccggaagcggggaggcggaaggttcgtaaaagctccaatcttccttcacaaaagagaaatcctcccctgaatcaaaacggcggaattgttcctccaattcctcaaccggcatttcatgggggcagacgtagccatgggcgttatcccccacctcgcaataataaaggccgttacccaccggaacggactgcatgcgcattccgtccccgccaacaagggagatatgggctttatgagaagagttcccgtagcggaggaacaattcatccaagctgccgcacgtttctccgttaaacagataacgaggggaggctgtcattttcttatttataaaaatgagacaccggaacacaagaatttttgacaggagagatggcgcatccctgtcatacccgcggaaacagcgcaaaaagaccgtaccggcaagcggtacggcctgaaacaaaggggaaattttcccggagggaatgctacatgcccatgatctgatagccgccgtccacgtaaatcacctgtccggtgatcgcggctgcgccgtcgctggccaggaagacgccggtagcgcccagttcctcgcccgtgcaggaacggcccaggggggcatgttcctcatacaccttgaacatggtgttaaagccggaaacgccgcgtgccgcaagcgtctgcatggggcccgcgctgatgcagttgacgcggatgccgcgggcgcggcccagatcatacgccagataacgggtgcaggcttccagggcggccttggaaacgcccatcaggttgtaattcggcaccaccttttcggaacccaggtaggacatcgccagaatgctgccgttgtcggacatcatgggctccacggcgcgggaaagggccaccagggagtaggcggagatatccagggaaatcttgaacgcctcgcgtcccgtatccaggaaactgccgccaagggcttccttcggggcaaaagccacggaatgcagcatgcaatccaccttgtccgtgtgttcccggactttttcaaagaatgcattgatggattcatcattgctgacatccagatcgtaaacggggacgtcttcgccgaagttttcatggaccagcttgagcacgccgtccttgaggcgttcgccctgataattgaagatgagctttgcgcccgcttcatgccatgccttggcaattgcgaacgcgatgctgcgcttgttcgccacgccgattacgacaccaactttgccttcgagtaatttacttgacataatggtaagtgaatactgccctactttccttcatttgacaagaaaaacggacgtcacggcgctccgtcaggctcccgtctgctggcggcaggccttgaccgtgttagccatcagcatggcgatggtcatcggccccacgccgccgggcacgggggtaatggcccggcacttgggcgccacttcatcataggccacgtctccaacaatccggtagccgcgcttggcggaggcatcttccacgcggttgatgcccacgtccactaccacggcgccgtccttcacaaaatcagccgtcacgaatgcgggcctgcctatcgccgccacgatgatgtctgcggaacggcaaagctccggcaggttcttcgtgcgggagtgggccaccgtaacggtggcgttcgcctgcttggacatcagaagatgggccatcggcttgcccacgatcatgctgcggccgatgaccacggcattcgcgcccgccgtttcaatgccggccgcctgcaacagcctcatgcagcccagcggggtgcagggcacaaaaccggtttcatcctccagcaccagcttggcgacgttctccgggtggaagccgtccacatccttggcggggtctatttccaggaccacggccgcctcgtcgatatgggggggaggcgggctctgcaccagaatgccgtggatggaggggtccgcattcaagtctcggacgacctggagcagttcttcctgggaggcatccgcggagagaacgattttacgggagttcattcccagctccgcgcattttttcaccttggaattcacatacacctgggaggcggggtcctcccccaccagaaccacggccaggccgggcgttattccctgttccctgagccgggcaatgtcctttccaacctcttccagcacctgggaggctacctgttttccgtcgatgatttgcataataatgattgatgaagtggcgggaagtccggaagcccctcgctcagcagcccggccagaaggcgggcgtagtccgctacctgctcatccgttgcgtccggaggaatgaacaggcgctttttccatagaatgttcacgttggaacacggcttgggaatggcgtagcggtcccaggccttgttcagcctccagcagctttcatattcgatgcacacgggaacgatgggaagaccggactgggaggccatcttgatgatgccgtggtgcacctggtaaatggggccctgcggaccgtccggggtgaggcagaagcagacgtccccctcctgcaccttcctcatcatttccatgtaggccagggctccccgccgtcctgaggaaccgcggacggaatccaggccgaagtgtttgcatacggcctccaccagggcgccgtccttgctggcgctggtgagcacgcacatcttgagcggcttctgggccagggaccaggcgtagccgggcaccgtcgtgcggttgtgccagagggccaccaggaagggcgccgtgtagacgtcgtcgtgctcctccttgatggagcggatattcaggctcatgcagatgggctggagcaaggaccacaggccgaagccggccagcttggtccaccagcgggaacgcttttcggacgtttttcggacaatggggttgagcagcaacatgaatcctcggcaatatcacatgaatccgtccaccgtaatgcgggcgggcggggtacttgacggagcgggaagagccgttccgcgggagggggcagtccccattcccggacggtccgcgcgcggctccacttcctggagcatgccggcggagttgtcctgcggggatgccggcgtaccggaaattttcacggggagaatgatttcatgcccctcctgcgtaacgccggacggcaggcgtcggctatccaccatgtaggaggggattttaaagaccagctctcccgttacggcggaaccgttgctgtacagaaccccggtcactcccaggaagccctgctcaaacagggaaatctctttcagggaggcggaacggtccgttccgtcgctttccagcagaaaggagccggacgtaaagactggggaagagtaaggcagccttatttccgtgttccgggcggtcatggccgccagcaggcgcaggacgggcagcctgagcatggtcgccttgatgacggaaccgctgtacccttttacggagggccttttctgttcgtccatcacgggcagcgcaaagtccagcttcaattcatgcttttcatccacttcctgttcccccatctgtaccttgaggaaggaagcgaagtcatcccccaccagggagaggaggtcaaaattcctgcccgtcagggtccaggcctggtggcggaaatccgtacccaggaggaaattccccgtaatcatgaaggggctgaggtccgtaggcttgttgagcaggcgccccttgtccagaaaaccggagaaggtgagctgcttgacgccgtttccgtttaaaatgatggagccggagtcgacgcccatcagaggccagcccttgattttcagcttttgctgtgacaggtccagcacgtattccggttccgtaccgtttccggacgtgcggatgtaggcttccgccgtcatgtagaaggggccgtcattccgctccagggtaaattcctccgtcttgtgggcgtaacctacctccaggcgcggagaggtgtaccgccggaagacgaacgggagttcccgtttcgtctgcggcacggcaaatttggagaatccggggcgcaggccaatcgtgaccttggccatgttcaggctttcccccttgatttttcccatgaacagggacgtggcggagatttctccggaaacgccttccatcattacaaaagacaggcaggaatcctgcgggaaagtgaccttgatgcgggcggccttcatggaaaggccgtccatcgccatgccggaggcttccaccttcccgccccaggcggcggagaggtccgattgcagccgcccggcgaattcctccgtattgaaggaagtcaggcggtacatgtacgttcccgccagggcgcccacaaccagcaggaccaggatgcagaggccaatgaggaaacgcttgtttttcagcacggcctgcttggcgtccccgtggtcgtcattgtaggtccgccggcgtttttccacacggatgaccttgctgccgtccgggcgcaccactacttccctctttcgctccacgccctgggaatccgaggcatgcagctggcgcatgatattgtccgccccctgggaggaagaagaggactcaggatcggaatcactgttcttcaatagtcttaatccggttaaaggttactgggcattgctgagggcgggaagaggcgcgagccctgccggagcttcctcatccggaacagcggtgcccggcgtgtaaagctgcttgccgcccgggtccaccacttccgccttcaccatgatgatgatggccttgcgctcttccttggatcccttggagcggaaaaggcgccccacccagggaatatcccccagaatggggattttatcctcatacgtgatggaggtggattttttcaaggcgccgatgacgagcgtgctgccggtggcaatgcgtaccggagcggtcaggcggcgcgtggagaatacgggctggagaatgaagttgtcggaagctttcaccatgacgatgtcttccttcgcatttttctcctgggaggccacggggacgaagagcggcgtaccgtagttgatgaagccgtcaaagtccacgatttccggcactacggtcatttccacgatggatttgtcatcgctgatgcctgttacctccacgttgaataccgtgccgagctgcctggtttcataggcggaggggtgggcgggcgtgatgggcatgaccggcaggcggtctccgccatcgtcgtcatagtcgccccagtcgtctccgttattgttgttgcccgtgctgttgggaacttcgggcggatcgtattccgtggggtaaatcagttccttgccgctgaagaaggtggctttttcccctgggcgtacaatcacggaaggatgctgcatgatgtccgtgcctttcttctggctcaggccgcgcatgatcatcgtgatgtccgcctggctccacatgccgcgcatggtgacgatgctgggcgcaccgccgggaacgtaggccacgccggtgcttctggcggaggaaccgcgctcaatcatgccgtcaatgctgtcttccgtaaaaacctggttgccggacctcagtccacccaccacccctgccgggacggcggctccgaccacgctggcggcgctgtccagcacggtgttgttgtagtcattcttgttggtgcccgcaccgcccatgaaccacttggaggggtccaggttcaggttcacgatccagttgaagcccaattcttccaggtccgtctgattgacttccaggaacgtcgcgctgacaaccacctgcaggggctgttccgccgtcttggacgccaccagctcctccagcatgctcaagtccttgggcgtgccgtggaaaaggagggtggagttgcccgagttgtatttgatgaagctgccttccgggaatttcacgcccagggaggccagggccttctgcgggtccacccgtttcagggtcatgccggaagaaccggcatccccggaaccgaagggatcggcattttccgaatcggaggattccgacaggccggagaagaagcccggaggaagggcaatggccttggtcaccatgtaggaggtgccgtcggagctggataccagctccgcgccaaaggcgttcgtgcgcagaatgaggccggaagcgcgcgccacgtattccagggcgtcgcggagcggcacgttttgaagattaagcgtaattctcttgccggcggtctccttggcggaaacgctgtccgcaggaccggggtccacggaaatgttcacgccgcgctccgccgtcgtcatggccgttgtatcatgcgtcctggccaggctgcgcagatagtccacggcttcctgcaccgttgcgccgtccagctgcacgcggggcagacggatcatgcccagcttctggtccacattcaccaccggattgtccagcggctgggagaaggaagcgggttcctccggcgtttccgtcaggggaacgggcatctcccacagcttggagacgtccgccagggcgctgctccgggtttcatccctggcagcgtcaaagtaggcggtcctggcgcggttgaccagctccatgccgcgccgcgccgccgtgttgtaagggtccgtctggaggacggaggtaaattccttcagggccgcatcatactggcccagttcataatagccgtaagccaagcgaagcaggcggttgacttcctccacgttcttgacgtgttccggggatagggccggattcgtgcgaaccgggtcccgggctatttccagcgtgcgcttggccagggcatggcccggcgtggctttcaaggcatcttccagcagcttgacggcctcgtcgtaacgccccaccttgatgtattcctgcgccacggccacgctggcgtccgcaatgctggtttccagaaaacggcgccgcttctccatgttgggggacttgggcagcgcggtcaggctcctgcggtaattgtccagggcttcctggtacttgccctcggaatacagctgacgcgcctgccccagcagcagcatggaagcctgggcctgctcttccatccgggccgcagtccggcgggcggcccctgctccttcctgggccagcccctggccggctccaataccggcaacggcaagcgccagggcaatttgctgaatggcagacatggagtgagggaaacgtctagtcataggaatttccgggactataccgaattaaaaaccgcccgtcattataaaaacgcccagcagagcaaaaaatatcggaaagggcagccgcacccctccggagggaatgcccctttaaacggcagagagttccagcacgcccacatgccccggtttcaggggatggggaagcccgcgttccatcagttccttccggtcaaaaacccggtcttccccctctccgtccatcaggttcctgacacgcacgcggtccgtctggatgccgcaccagccgaaggcgtgctggggaatggaaatgaggaggttgtagaagttgatctccggggaaaggttccccaccaccagcacggtggccctggcacgggcatcatgccggagcatggcgtacacccagtggccggaggtgtcttccgcaggttccctgccaaaggtggtgtttttcatgttggcccagttcaggccgtaaaaatccccgcggtccagcgccggatgctgcatcaggggaagcagccgctgatgaaagttcctcagctccgcggagtcctccggcagcagagaggcgtcaaaccgtccgtccgccacccagggctggagctggggcaggcaggtgtagtcaaaaatgctggtgcggccgtcatgaccgccgtagccgccgggactttccgcccgctctcctacttcctgcccgttgtacaccagcacgggaccgcggccggacgcgtacaccagcgtcatgatcgccggaaggatgatgcggcctaccccgccccaggagagcggggagcacacgcgcgtttcatcatggttttccacgtagcggacgccgttggccatgtatttggggtcgctccggaaaaggcggtcgaagtcgtttgcccagtttttttccgtgtacacatggagcgccaggcggtagcaggccgaatcgtaaacggcattgaacccggattccagcagcgcggcgcagggatcgccgggggtggttttcatgtggtcattgtacgcttccgccatgaaaaacacgtccggcaggcggacgcgggagcgggagatggcccatttccagaaggccatgggaatcatgtgggccatgtcgcatctgaaaccgccgatgcccaggccctgccagaaggaaaggatgtcgtccatgatgcgccaggtcttgggcacgcgctgcttggggctcgtccagtccggcagcaggcggagggccggcagtccggccaggaagttatagccgtagttgagcttgaccgtttcataccagtcatacctggtggggttccacgtaacggcattgttgcccgtgacgcggccgaaggtcatttccccttcaaacaggccgtccggcaaatgcaggggagggccgtcccccgggctgttggaggtcaggtaaaagtacccctgctccggagagaaaaacgtatggtggtcgtccccttccccgaaatcgtcatggccgtcccagtccgccaggtaggcgcgggaaacatggttggggataaagtcgatcaacggcaccagccccaccgttcggcagcgtttcacgagtgccttgaattcctccattcttttttccggcgtggaggccaggtccgggtccacgtcaaaataatccaccaccgcatagggactgccggccaggccttttacgatggtttccggctgggcgggcagctcgggataggccgtctgcgtggcgtgcctcagcaccccggtcagccagatgtgggtaaagcccatccgggctatttccctcagggccttgtccgtcacgccgttaaaggtgccgcacccgttcgtctcccgggtcccccagtccaccccatgggtttccatgttggagaaatggcggacaaacagttgataaatgaccgggcgcatgagctgaaaggatgaggtactgagggctataatgctaacttttccaggtattctgcaagtgtattctgttccaccggggcaatttgccccagcatcagcagggcctccttcctggtccggagcgttccttccaactggagctcctgcaaacgggacagccatttcctgaaatcgggaccggggggcagccccaggtccagcagatcgcgcccggtcaccaggggcggaggcaccaggggtgcgtcccggtaggaatccatggcgtccctgacaaactgccagttgtccatcaatccgttggaggaaaggcagtccaggcggtgaagctccagctcgtcgctgaaatgcggagcgctcatgaacatccgcagggtggacttcttcatctgctgcacgttcatgaagcgcatgtggcgctccaccatggcgcacaccgcatcaatcacggcattggaatacttcaatctccttaaaatgtcccgcgccatggaggcgccctccttgtcatgaccggaaaaacggatgcgccccgtttcatccacctggcggcagggaggctttccgacatcatgcagcagcacgcccagggccagctccagagacacgggggcaccgtccttccccagcgcgtccagcatcatcagcgtatgggcgtacacgtccccctccgggtgccactggggaggctgcgtgcagccgatcatgccgtatacctccggaataacatgcttcatcagtcccgtttccaccagcatttccacgccccgtttccttcctgaagacaatagaatccggtccagttcctcccggatgcgctccggcgcgatgcgggccagcagcggggcgttcctgcaaatggcggcataagtttccgcttccacccgcacttccctggtaacggcaaaacggacggcgcgcatcagccggagggagtcctcctcaaaacggcggtccggctccccgatgcacctcagcacgcgggcccggatgtcctccacgccgcccacataatccaccacataacccggaggaacggaaaacggatcttcaaagaggccgttcatggtaaaatcacggcgccgggcgtcctcctccgcatccgtgaagcagacggattccgggcgcctgccgtccctgtagctgccgtccctgcggaatgtagccacttcaaaggagaaaccgccacggcgcaccagcaccacgccgaaggcggcgcccacttcccaggcatccgggaacaggcgcagcacctcgtccggacgggcggaggtggcaatgtcaatgtccttcacgggatatcccagcagcctgtcccggacgcagcctcccacaaaatacaccgtgtgccccgctccggccagcacgcgcgccacagcctccgcggcctttctcaatggaatattttccatggaacaggctattcgggcatgggccgcaaggggggagcggaaagagaagagggctgctccgcaccggaggaagcaggcggggccgctggccggggcgcggcaggctgcggaacggagggaatgcgcgtatccggagagttgatcctggccggcagcggagccggcttcacggcggcgggggcggccggggcctttttctcgtccgcctttccattctttttcccttccagcttgcccatgaccgcgtacaaattcgcgtcaaacagcatgtccggcgtgccgcgcatcaggattttccccgcagggtccagcagatatacccgcggcgtgagcatcacgcggtaatccttgaacgccgccgccttttcatccaccagggagggagtatccatctccaaattcagcagggcctttttcacgtcctcactgtttccgggggccaccggcatgaccgtcaggcccggaaattccttccgtagggaaacggccttttgcaaaaactggacagagcgcacatcccggggatcccagaaaaccagcagcacgggcttgtccccggaggggaccgtcacttccgcgcccgtggcggtggaaggcaggcttattttgggcccggtctgtccaatgttgagattgcgtatttcatacagctcttccttcaccagattccggaccggaacgggaccgaagctggaatcatagcatttgatgatggcgtctttcagcagctttccgcgtgccgccaccagcctgacgtcatcctggagcattcccgtcgtttccttcatcaccatggccagccccagggcggacagcccctggtcttccggaaactggttgtaatccttgatttgttccagaataacgcggcagcgcaggtcgcgggagttgcttaacgcatacgccgcctttcccgctcccttttcccggaacagggtattttccagggagtccaggcaaaacacgacaattttcctggcaatgtctccgttggggaaagcctgcgccacggcctggggatgatccaggaaccaaatgacagccgggagaaggtagggtttttgagtctcgggcttttgaaggtccctccccacctgcctccacaattcctgcgccaccggaatggcattcggacggctctccatcagttccgctcttttttcatcgctttcagccgttttgaatgcggattcccagtcggactgcctcatttgccagtccgccagcgcattcttcatgccagcctcgtccgccggagcccatccaagcaggctgcatgcaccggctatcacgcaaaacgctctcttcataccctgccactatgccctgatgcgtcccgctcgtcaatcaaaccccgcggcaaaacgcctcctattcttccttccccgcttccttccagccgtttacggcgcggaacgcgccatccggagacgaacaaaccccggcgaatcccttcgccggggctgctgttcaactaactacctatgaagacggttgagtccttaagtggatgaagtgctctctctttcactgcatccggatcataaccgttatgggtgagacagccgggcgggaaatatgttcaaacattccttcttttgtatgacacaaggtccggccctctcctgcgggggcaaaaaagcggctgcggaattccttccgcagccgctccaactaactacctatgaaatcagggtcgttcctggtgattcggaaggctctcgttccttccttatcgaacacccctgtccattcagcatacttgcatgaaccaaacgctcaagatttttctttccttttcatgcaaaaagcccggttccccgccgccttacgccgccacgaagttccgttcgtcattggtcagggcccgcacctgcacggccatgaacctcatttcattaagcatgttcagataaaggagggaggaacgggtgcgcgtctggttgcgctgggcgcgcttgatctggcgcttggtggcctttgccaccagttgaaggagctgttcctgggccaccatggtatagtcgaactggatgtacgttcccgtctggagcatcttgcagtattcatccagaagcttcatgagagcggtatgcacctccttcaagtcgtccacctggtcaatcgtgaacggcgtgtggttgttgtccacatacgtgaagatggactcggaaaactgcgccaggctctgcgtggcttcgttcaaatgctccagggcctgcacgaagtggtagcccatgtccagggaacgggactgcatcttgtacaggatggggagaatgtcatacttgtggtgctcgctgctggtcagggccaggcgttccgcggcgtccgccagctctttcagggccttccggtccccctggaagaagttttccacggtgtcattgtagatttcccgcagcttgagcgtgctgtccacgacctggtggctgcacacgtccagaatgttttcctccgtaatctggtcaaaacgctctacggaaagcttgttctcccgcttgcggtgcatgatggtggatttcaccaggatgacgaccaccagggccagcagcccgaagatggcgtacacctgcccgtagtgcaggacggtcgccatgacggcggccagcgtgaaggcggccaggccggtcatgaaccagccggagattacggtcagtacgccggtcacgcggtaaaccgcgctttccctgccccacgccttgtccgccagggaggaacccatggctaccatgaacgtcacgtatgtggtggaaagggggagctgcttgcccgtggcccacgcgatcagcagggaagccaccgtcaggttcaccgtggcgcggatcaggtcaaaggccacgcggtccttggggttcagtggctgcggggcagcatcccactgatggttcatgcgcaccagcatgcgggcggggataagctttttcaccccgcgccccagcgcgatggcgctgcgcacgatggcgcgggcggggggaacggagccgaaacgttcaatgcctccttcaccctgccgggaaagctccacgccggtggcgatcaccgtcttcgccttcttggagaaccacagcgcaaaaatcatcatgcatccggcggcaaaaagaatgtaatggttcaccggagcgccctgcccgggcatcaggcattccatggcggtgatggaggaggcggagccgccggcctccactacgcccgtagcgtactggaaggaatccaggccgcccatgaacacgccgatgaagttcacgaggtcgttgcccgcaaaggccagggccagggagaaggtgccggccagcacggtcaggcgcaggatgttcgtcatgaacaggtgctggagcaggaacatgagcacggaaaaactgccgaaggccaccagcagggccatgcccaggttctggtcaatgtattgaatgaaggaaggctccatcagggtggattccttcaagcccttgaacacggcaaagtaggccaccgccgtcatggcgatgccgcaccagaagcagccgaaccacttgaagcgggactggtatttgaacgtaaacgccaggcgggaaacccacatgacgatggtgcccaccgtgaaggcgatggctacggaaaggagaatgccggtgacgatttcaaacgccttgtccgtattgatgaagtcccacacggactgcgtcatgtgaagcttggaaatcttgaacagggccgtcgccacggcggagcccagaatgccgaacaccagggaaacggtggtggacgtgggaaggccgaaggtattgaaggtatccaggagtatcacctcgctgatcatcacccccaggaagagcagcatcacttcgtggtaactgaacatgttcgggtgaaaaatgccgttgcgggccacctccatcatgccgccggagaagcaggcgcccaccagcacgccgatggaagccacggtcaggatcacccgcacgggggcggccttggaaccaatggcggagttgaggaagttgacggcgtcattcgctacgccgttgatcaggtcaaatgccgccagaagcagcagggctacgatgataatccagtaaattgagtccataactgtctcttgtgaatggtgggcggagggcgtccgcgagctgcaccaccgcctctttacacggaaacggacgattttgctactgttttgttacagaaaaatcctttcgccttctcaacgggaacgggggaggaaatccagctcttcaggatcgggccagcggtgccggggatagcgccccgccaggtcttttttcatctggccgtagccgttccgccagaagctttccagggaacccgtcacctgccaaggcctctggctgggggccaatacctccaccttcacggtcacggagccgttggcaatgcgcggagactccgccacgccgaacagccgctgcaccgtaaggccgatcacaggcgtggaatcctccccgtacctcactttcgcgtgctggccgttggtcagcgtgaggctcaccggagcgtagtcgtccagcgccttcgcctgccagccggagagccagtcccggagcacgggaatgatctccctctccttgatgtccttgtagcccacggccccctcgcaaaccagggagatggctaccagcttgtcttcctctgaaaaacgggggagttccagttccggcatccagatgctcaaaccattcaggcggcgtatccactgctccacggcgtcgttccatttcaccagcttcaaggttccgtccactaccttttccgccagaatgggggcggccagctccggcggagcgtccccgcggtcccggtcttccagcaccaggtcttcatacatcagtctccggtgcaggcgcacgcggcgcagcgcggcgtcaaagacggccgcctccccgccggaaaaacgctccggccagacggcccgcagctcctccgggtcaatgagcgtacagcggcccacacgggtttccaccgcctttccggacaactccgccacctccgccgccacaaaatgctccccgtggaacgccacgctgccttccgccagcctgccccccacgccgccggccatgcggcacgtgttggcggccactccgttccggacgcccacatggtccgcaaagctctccatcatggcgcggaccacggcaggccgcgccgccgtgaaatcaggctccggcatttcccgggatttcccccggctgccgatggacaaaagctgccggtacgccatccacacttcccgcgccccgcgggcggaaatgccccagcgggtgcacgcccccgcctcaaacccggcgtccacagccttttccaccgcgcgccactccgcctgaaaatccgtatagtccgcagaatcgcgcaggttgtcgttcaagccgcccttcatcgctacgccctccccctgcatcagggccgcaatggcggcaagctccaccacgcactgttcatcctgcccggccgccatcaggcgcgccagccgcggcggcagaggaaaagcggtcatccttcttcccacgtccgtcaggctcccgtccgcctccgtagctcccagggcggccagcaggttcacggcccgctgcatcaccagggggtccggcgcatccagccagcggaacccttccggcgcggttatgccccacgcggccagattcagcacggcccccgccagatccacccggaaacattcgggcggatcaaaatccgccttccgcgtctgctccgcctcactccacaaccggaagcagcggcccggagccacgcgcccggcacggcccgcgcgctgggcggcggacgccttggaaatcttcgtcaggtgcagcgtatccatgcccctgtaggggtcccagccggaccggcgcaccagaccggaatcaatcaccgtgcgcaccccctcaatcgtcagggaggtttccgctacattggtggaaacgatgacacggggatttttcccctgctccacggcgcgattctgctgttccggggtcaacgctccgtaaagaggaaaaacgtcccggccgcccatccacggcctgcctgccagcaactccgccgttttccggatttcatacacgcccggcatgaataccagcacgtccccgcagccgtcatccttcaccgcctccttcacggcgtccgccgcctgctcccataccggaggaggggataccctgccgcggccgtcgctgaccagccggggagcccggtaaacggtttctacgggatactgccttccgtgcgcctccagcacccggcaggaggcgcccatgtaatcccgcaggccggatatttccagcgtggcggacatcaccgccacggccatgtccgggcgcgggccttcctgcaagtccaatacgcgccccagggacaaatccccggagaggctccgttcgtgaaactcatcaaacaccacggcgctcaccccttccagggcgggtcgctccgtcagccagcgttccagcatgccgtccgtcacgtacgcaatgcgggtgcggggggaaatgtgccgttcaaagcgcaccacataccccacttccttccccagctccactccgcgcagccgggccacgtggcgcgccagcaggcgcgcggccatccggcggggctgaacgacgacgatcaggccgcgttcccccagcccggcgtcatccatcatggggggaacgccggtagacttgccggagcccgtgggcgctttcagcaggatgcgcggagagggggcttgcagcgcgtccagcaattctccgcggatttcctcaatgggaagggagggggaatccataccgggttacaggggaatccgttcatgcccgggccgttcaaccgatgcaggccagcaggaaccagaagaacggcacggtaaaggaaggactgtcaatcaaatcaaaaatgccgcctatccccggcagcagggagccggaatccttgatggccaggctgcgcttcaccagggagcccgccaggtccccgtaaacggacagcaggaaaatgaaggagacgcagcccgccagcaccagcatctggggcatggacaggacggagaccctgaacatcgggaaaaccagcccgatggccgccgcattcgtcagcacccaggaaccgaggatgccctcccacgtcttcttggggctgatgtggggaatgagcctgcgtgaaaaaatgcggcctcccagcaggaacccgctgacataggcaaaaatgtccgccatcttcgtcaccagaatgacccatagcacgcacatgacgatggacggataaacataccccaccctcatataggccagatgcagggccagaatggcaaaggcgaacagccagccgggataaatgaaggaaagcagcgtggtcccgacggaacggagcgcccggcttcccaccaccggatacttcatttcacggataaaggaaatcacgaccagaaggaccggggcggcaagcgccaccagaaggggaaggggaatcaggaacggggcattctccgtaggggcgatttcccggaacttggtcacgtagcacgcccaggacagcagcacgggatacgccgcgccgaaaagaaagctcaggttcggctgggaggcttttctggaacgcagcagcatgtgcctccattcccaggaggccaggatgcagaagatgcagaccagcccgtaatacccaagttcacggtcccaccacagggcccccgccagcaaacccagcagaaccacggtgctgaatgaacgctgcagcagaacgcccattttgcttccggaaggcttcttgtcctggttcggtgttctcatcatcacgcgaagtgtacagaaaacctccgtgacctcaatcctgaaatgctcccttccccgcggcggccatactggaaacatccgcgccccgtccggccctcccccgccgctgacaaggaaggaatgccttccccgctccgggagaaatgcggcggcggaaaaagaaaaaggctgccgtcaagcgggcggcgctacggcgcacgggaaaaagcctccggaaaccgcgttctccttcctgtacggccccaatatgacaaatgccggacttccgcacagaatttcaaactttatggtgtatttgtccactaatgaatttgcctctttcttcctctctcccgcgccctgcatccgcagaggattgcaaccccgccggatgccgttccttccggacggacgggggttcttccgccctctggcagtccctttcccccttccggaaacccggcgcgtaaaatagcgtcatgtggacgttttataagatagacaatcacctacaaatcagtaacactcacatcccagcactagcttttttcccctgatggagaaaaccgcacccttttccgttatgaacatgcactcattccgttggattcgacttacagcattctcggccctggccgcagccgccatcacctcctgcgcctccgcggccacggacttcaaccaggtgggcaagcaaatgtccctcctgctccagaatttccacttctcccgcaaggaattcagcgacgaactgtccggaaaattcctggaaacctacctgcgcaaggtagatcccaacaagatatttttcacccagcaggacgtggacgccctcaagaagaaatacggcagggaactggacgactacctgatgtccggccagatgatggacgcggcccaggccatgcacgccctgtaccggcagcgcgccatgcagcgcatcgcctatgcgcgggacctgctgaaaaagggcggctttacctttgacaaggaccggtccattgaacgctcccgccgcaagaccgccgcgtggcccaaggatgaggcggaaatgcagcaggtctggaaagacatggtggaggaacagctcctgtctgaaatcctgcgccgtgaaaccgtggcgcgcctggcgaaggaacagaacaagcccgacccgctggccaatgaaaagcctgcggaggaaaaactgctcatgcgttatgaacgcatccagcgcaacattcaggaaacggacctggaagacgtggcggaaaccctgctcagcgcagtagccatgacctatgacccgcacacggactacatgggcgcccgccaggtggaccgcttcaagatttccatgggcacggagctcaccggcatcggcgccctgctgggcagtgaagacgacggctccaccaaaatcacgggtatcgtcgtgggcggtccggctgacaaatccggagagctcaagctgaacgaccgcatcgtggccattgactccaacaactccggagaaatggtggacatcctgttcctgaagctggacaaggtggtggacatgatccgcggggcggaaaacacccagatgcgcctgaaggtggaaccggcggacgctcccggccaggccaagatcatcacgctgacccgctccaaggtgccgttgaaggacgaactcgccaagggcgaaatcatcgaactcaccggcgcgccggaagggcagaaccgcatcggcgtgctgagccttccctccttctatgcggacatggaaggcggcgaccgccgctgcgccaaggacgtcaaaaaaatcctggaacggatgaacaaggaaaacgtggacggcctggtcattgacctgcgcagcaacggcggcggttccctggaggaagtgcgcctgatgacgggcttctttaccgggaacggccccgtggtgcagatcaaggacacccggggcaacgtggacatcaaatccgcccacaaccgccagaagcttttcaacggccccattgtggtgctcatcaacaagctcagcgcctccgcctctgaaattctggccgcggccctccaggactacggccgcgccgtgatcgtgggggatgactccaccttcgggaagggttccgtgcagcagccggtggacatcggccagtacctgcccttctttgcagccagggaccgtgccggcctgctgaaagtcaccacccagaaattctaccgcgtggcgggcggctccacccagctcaagggcgtggagagcgacattcagcttcccaccgctacggcggcgtttgaactgggggaagacattctggactacgcgatgccctatgaccagatcacgccctgcaccaattacaaaaaggactcctccatcacggccatgctgcccgcattgaaggaagccagcgcgaagcgcgtggaaaaagaccgcgacctccagattgccagggaagacatcgccatgatgaagcagcgcatcaaggacaacaaactctccctgaacaagaagacgcgggaacaggaaaactccacgctggaagagcgccgcaaatccatcaacaaggaacgcaagggccgctttgcggaaatggccaaggaagacgccaccaagtacaagatttaccgcctgacgctggacgacgtcaacgccaaggagcttcccctggcggacccggacaaggacaacgaacagttcatgcacctggcggaagaccccacggcggaactggacgactccccggaatatccctccggccttgacccggaactccgcgaaggcatcaacatcgtccaggacatgttgaagctggaatcctccggaaaataacggtcccttccccattccttcccactcgccccggtttcctccaggaaccggggccctttttttccggggcaaaaggcggccgccgctccttccggaacgtgccggaatgaatccgggacttgccagccggggtgaaataaggcagtatctttgcccgtcagcaatgagcaccatcatgaatacgacatataaaattgccatcggcgcggaccacgccggagtcgacctcaaggaaaccgtagtagaactcctcaaggcatggggccatgaagtgaccgacatgggtaccatgaccaagaattcctgcgattattccgactacgccaatgaagtcgcaagcagcattgctgacggtaccaacgaccgcggcatcctcatctgccggtccggcatcggcatgagcatcgccgccaaccgctgggtgggcgtgcgcgccgccctctgccgcacggcccccgccgcggccctttcccgccagcacaacgattccaacctgctgtgcctggcctccgcctatgtggacaatgaaagcgtggaagacgtgctggacgcatggctgcacgcggactttgaaggcggccgccatgaacgccgcgtcgtcaaatcctccggcagccccctgcaatggacggaccccgaactggccgcgttcatccaggaggaaggccgccgcgaaagcaacaacattgagctgatcgcctctgaaaacttcgcctccccctccgtccgggaagcccagggctccctgctgaccaacaaatacgcggaaggctatcccggcaagcgctggtacggcggctgcgaggtagtggacaaggtggaacagcttgccattgaccgcgtgctgaaaatcttcggcggggaccatgccaacgtgcagccccactccggctcccaggccaacatggccgtttacttctccgtattgaagcccggcgacaccattcttacgatggacctttcccacggcggccacctcacccacggccaccgcgcgaacttctccggcaagctgtacaacgtagttcactacggcgtatcccaggaaacggaagccatcgactatgacgcgctggaaaaactggccctggaagtgaagccgcagatgatcacggccggagccagcgcctattcccgcacgatcgactttgaacgcatgggccagatcgccaaggcctgcggcgcctacctgttcgtggacatggcccatatcgcgggcctggtggccggcggacagcatccgaacccggttccctatgcggacttcgtctcctccaccacgcacaaatccctgcgcggcccgcgcggcggcttcgtgatctgcaaggaggaatacgccaagaagcttgacgccgccgtcttccccggcatgcagggcggccccctcatgcacgtgattgccgctaaggcggcctgcttcggggaagcgctgaaacccgaattcaaggactatgcggcccaggtcgtgaaaaacgccagggccatggcggacaaaatggcggaactcggcttccgcgtcgtctccaacggcacggacaaccacgtattcatggtggacctccgcaacaagggcatcaacggggcggacgcgcaggaagccctggaccgcgtgggcatcaccgtgaacaagaatgccatcccgtttgacacgggttcccccatgaagccctccggcatccgcatcggcacgcccgctgtgaccacccgcggcatgaaggaaaaagacgtggaacaggtagcggaattcatcgcccgcgccctggccctgtacgtaggcgaccaggtctgcccgaacccggacggcttcgcccagctcaaggaggaagtctccgctttcaaccgcaacttccgcctgcctcactaatcaaattgctttttcacgttcaagccgtcccattgccagcaatgggacggcttgcgtttttcacaagaaaagagggaagtgccgggagctgcttcaaggggcacccctttccgcgttcaactccctccggtacactagcgaggatctgccgggatgtttcccccaccccctgccgccgccatataacaggcggctacatcggcaatgccatggccgttggaaagtggcgcgttctgcctggggatgcggtaccggccgcccaccaatcctccgccatacgtactgaccggatcacagcaagtggttatatggtccaagacgccggcagcggccgccaaacggtctgcacccagcgcctgcaaggaattaccggacaatcccgcagcattcaccgcgacgccgccaaccgggagaggtgaccctacattggccgccaccccgaattgggccatgccgccgcccagggaatgcccggtggcctgcaaggacactattcccggcacatgattcaacaaatggcgaatcagtcccgccgccctaacgtagcaaatgtcacaggaatacaactggaaaatatccgtcaatacgttgggaaccaagacaccccaatgtcccgtatccgtcccccggaaggcaacataaatgttattgcccgagcacttgatgtaggcattaaacccatggcgcacatggacatgcccactaacgggatcgtacccggttgcaccgccaaaaggagagaaggcatgattcagggaggccaatggaacgcctggcagaagggctgcgtccggatgcggtgccattcccatcagataccctccggctcccggattaaggtaggcgtaccgggaaaaagtgatccaagtgggaatgagggcaggataatgcgtattgtccctgtaatgaaggcggcaacttatcctggccgtcataatgccggccaatatctggaccagagcggaatgccgggtcagaggcaaccccgaaagcctttccatgatataattataatgaggaagcgccgcatggccttcctgaacgagaaaggcatccagcctgcgccttccatcctggcgggaaaaatacctggttgctataaagtcaaacaagtgcctgagatgaagtaatggagtcatggtatttatcgaattgaattttgaatataattcagcacatcacgttcttcatccgtcagcgtgccgcccagttgctcttttctggacaaaatctcccgggagaacaggagggcgtcctggtatagagacgcgatctggttctgttccagttggtccagggcttcaaaccccttcagcttgcccaattgggtttccacccacttcctgatttcccgttcgccgggttcaggcgcagagttcgtaaacttttcccattcctccagccaggtattcgggatttccacttcagacagagcctggagcacttgctgctccagatcatccagcttgccttccagccgttccattttttccaggaactgcttttcatccgattccggaaaatggaaggatgaatcattattgttctcgtcagacatgatgtttcaacatgggttgcggtttgccgccgcatccggaaaggacgcgtccagcggcaaacgctgcacgaataccctggcctcccgcgtccggaaagaaaacaggggctttcccaatacggggaaccatcattcacaacagccatgcgcgcctttcagcggcatggaaaaacccggcatgaacaaatgccgtttataccgccaccgtgcggccgcagcttccggctacttcccttcccctcccaaacggctctccatggacagcagggtgcacttggcggcaagccatgcgtcccggcccttgagaaccatcattttatctcccacgctggaagcataggccttttccgcatcccgaaagagctgctccagatacttgaccagttccttctggacggcgatggcttctttcagagatccggcgttgtttcggcggaattccagcaagttcaaattggcccgcgtcacttcctcccagggaaccatgccggacttgtactgttcctgcgccagttcagccatgctggataaaagccgttccctttccttgagaagggatttcaaggtttcttccgccggggaaacggccgaaaagcaggcgagacagagtatgatcagggtagttttcattactccccttttatcccctcccttcattctgtcaagatggaaaggaacgtatcgctttgaaacaaagaagctctcgaagatgaaaaacagcgcggcacggacaaacatagccacctccggaaagaatccccagccgggaattctttccttttatcccgcctttccccttcttccggggccgctcatacgccgccggccttccggaccggggcggaccattccttgccgcttacatccgtcagcactacggaaagcggaccttccggaaccgcagaaagcgcggcgggaagtgttacgccggccctggcccccagcggaacgaccagcccgaaggcgcccggcttgacctttgccagataagcgttctccatagcggaggggggaagcgcggaaagctggtccgcctccattttccacagggtgttgccctggccgtccgtcagcctgatgcggacgaggaaggagccgtaggtatccacgccttccgtgcggaatacgttgaagcgcaattcctgtccggacagggaggccccgctgacttccagcaggggcttcacggatttgttatggagcggtccccatacgccgccatgaaagaactggttggttcccagcgtgaccagcatcatgaacacggctccccagatggaaacgcgggccatgcggccgtatcccagcggcagcggaccggaccccacccaggcaaacagggaggaacggcgcgcgcagcacggaagtttggaaagcctgccgtccagcgaacaggaaccgcccccggtcaggaacaggagcagtccggcgcacatgcccagaatgcctatctgccattcgtccaggcaggtggttcccagccagccggaacccagcagaatgcccagcgccaggcagaaaacgcccacgctcgccaggcgcgtcagcagccccagcatgagcatcagccccaccaggaattcaatgatggtaaacgccaccatgaaccaccagagttcggacgggtgcgtcaccagatattcaatgaccggcttgattcccagcgcattgggaaggaagtggttgaatttgacgccgatgtatcccggatcatccggaatcagcttgttttccagcaccaggcggcgccagaacgcggagaagtacgtccagcctactaccagacgcagagggagggccattacggcagcccagcggtaggcttcgggctgcatggcggaatcatgggaatgttcttctttcatctggtcaaattcttcagtattccgccatcctatttccgtcggaaaaaaatcaaaggataaaatgcccggtccgtgacagcggacgcgtcaaagatttaccgggaggccatgccgtcccacaccgggaagtaataatgcagggagggcgcgggttcattcagcaggcggtagtgccaccattccggagaatagttggcgaacccctgcttttcaaaagcctttttcagaatcatccggttccggtgctgggccggggtcaccagcgcggtgtccgtagcggagctggggtccagcaggtcatgatggccgcccatgtccacgggctttccggttttggcatacagcagggagacgtccacagccacgccgcgtgaatgttccgagaagtcgcgcacgtagtggtccccgaacaccttggccttgtcaatgttcgggtaataccgggctttcatcttctggtctccggcgtccgcgccccatttgcaaatgtccagcacggcggtgtgggggcggtaggcgtcatagatttccagcaggtagccctgcctgtacaggtcttccgagacttttttcagggcgtgcgccgtctgggtgcgcaggatggcgcgcctgccgtggtagccgtccagcggacgccccacgaaattgtcatacccggcatatttcaggttggtcttcaccagcggagccacctggtccacgtacacaaagcccggctgcatcacgggctggaggggctggttgaaagagggcttgaattccccgctgcctgagcaggaagccagtaaaatgaaaatgccgcatgccgcggccacgcaggtcttcatgaccacggagcgtagcacggcatgcggcgcaaatccggtcaggattccgtcatttccaggaatcccttgatcttgctgatgcgcgtgggatggcgcagcttgcggagggccttggcctcaatctggcggatgcgttcccgcgtgacgctgaactggcgtcccacttcctccagggtgcgggggctgccgtcccggaggccgaagcgctgttcaataacctcgcgctcgcggtccgtaagggtgtccagcacatccttgattttctctttcaggaaggagaaggaggcttcctccatgggattttccgccgccttgtcttcaatgaagtcaccaaaggaggtgtcgtcggaatcccctacgggggcttgcagggaaatgggctgctgggccattttcagcacggaacgcacgcgttccacgggcaggtggatttcctccgcgatttcctccggcgtaggttcgcggccgtattcctgcaccagctgtttctgaacgcgcatcagcttgttgatggtttcaatcatgtgcacgggaatgcggatggtgcgggcctggtccgcaatggagcgggtgatggcctggcggatccaccaggtggcatacgtggagaatttgtagccgcggcggtattcgaacttttccaccgccttcatcaggcccatgttgccctcctgaatgaggtccaggaaggaaaggccgcggttggtgtacttcttggcaatggaaatgaccaggcgcaggttggcttccaccatttcgtccttggcccggcgggcttcgcggagccacttgcggagctcctgataggcttcccccatttcatccgcagtcatccacatgcgcagttccagttccgcaaggtgttccttgagctccttgttggacgggtcctgggctaccttcttctgcatgcggagcacgcggtcgcgggcctcgtcaatcatggagcagaaatcctcaatcaccttgtgcttgaagtacaggcggccgaagagcttcaccagaacgccggtgatcttgtcgaactccgcctggcgggccttcacggacttggcggcctccttgctgcggtacagcttgcggaaggcgctggaagcgtcctgatgggtctgctggatttgggcgcagagctgggccagccccttcatgtagcgttcgcgggagtcgatcttcttgtcaaggatgacgcggtcaaagcgttcctcgttgtccagcaggcggtaggccacgtccagataggcgttcgcaatgaagccgaagcggtgcacgcaacgctggacgttctgttccgcatcctcaatcctcttggagatggccacttcctcttcacgggtgagcagggaaacctggcccatctgcttcaggtacatgcggacggggtcgtccagaatgtccatcttggcttcaagcttttcctcctcgtcttcttcctccgtgttgatgcgggtgcggtccgtgtagctgtccacatcggacgcgtcaatgatgtcaaacgccatgctgcgcaggcggtccatgatggcctcgtagtcctgctggtcaacgatgtcgttgggaagggagtcattgatgtcgtcaaaagtcaggtagccctgctccttggcgagcttgatcagttcacggattttttcctggatttccggggcgtcaatcggattcgtgaccttgcggctggcggccctcttgcgttcctcttccaggatttcgctcaacttcttgggagcttccgccttagcggcaggcttggaggccttcttttcggcgggtttcttttccgccggcttggcaggagccttcttggcggcgggagcggcggctttcttggccggtgcggccgcgggcgcctttgccggagcctttttggcgggtactgcggccttcccggcggcaggggccggagacgcctttttcaccggggctttcttttccgctgcgggcttggcggcagcgggctttttagccgccggagcggcggccttggcgggggcttttttggcaggggctgccttggaagtggttttggaagtttttgcggcaggcttggacgctactttttccttggattcagaagcttttttgctggcggaagtcttcttgggagaagaggaggatgggtcaccggatttggacatatcttgaaaagaagagggcacaattcaccattatatcaatacccggaggtatcgaggcactacattgtacccagcaaacgcttcaagtcaacactaagtttggataattccagccttctggcggcgtccgtggaggggtccgccaattccgccatcagggacgcgatatgcctttccagcgcagccttcgcaatgccggagcaggcttcctggacgctccggtccacatcggggatgggcaccgggtccaggttcagcaggttcagggcatcccgttccggctgtggcagggacgccagaaaagcctgaatggccgcgggactgtccggagaaggaagccgtgccaggatttttttcaggattccccccccttgcagcatccgcatcggctccagcaattcttcaatacggtccacgatgagcccctgggcacgggcgttctggagggacaactcgcaaagcacggccacggcacggtccatcttcacggggggctgcgtctgaggaacttccgcagccgccgcacgatccgcggactgtgcctgttcccttcccttgcggcgtccggccgtcctgacggcgctccgcaggtcattcacggtcgtgcgcatcctggtggcgacgtccgccgttgccaggtcgcgggccacggggtcgctcatgcaggccagcagggccgtcatctcacgggcaaaggcggcgctggcggcggcgtcagtcagcaggccgcgttccttggcgcgttcaatgcggacctcaaagaaaggacgggcctgctccaccatctctgaaaacgcttccttcccttccctcttcatgaaggagtccggatcgtccccctccggaagattcaccaggtaaacatccttgccgaatggggccagctcccggaaggcgcggtccgccgccgccatgcccgccttgtccgcgtcaaaacatacgacaatgcgggaggcatagcgtgaaagcgttctggcgtgctccggcgtgaacgccgttcccaggggagccacggcaaaggaaatgccggcctcatggcaggcgatgacgtcaagctgcccttcgcacagcagggccttgccgctcttccccatgggaccgcgcgccctgtccagggcaaacaccacatcccctttcttgaaaatggacgtttccggggagttgacgtacttgcccacgttttcctggggccgcagaattcgtccggagaacgccacgcattccccgtacacattgttaatggggaacatcagcctgtcccggaaccgggcgtacaggtccccgcgctctccgcggttggcaaggccggaatctatcaaaacctggtccggaagcccctccttacgcgcccaggccaggaactcccgtgaagaatcaggagcccagcccacctgccagcgcttcgccatgtccgccccgtatccgcgggaattcaggtaggccctggcctccgccgccttcggggagcggagcaggagcctgtgaaaaaactcggccgccttcttatgggccaccagcagggccgtgcgcgccttgcgccgcttttcctccgcggcgtcatacacttcctccaccagggtaatgccggctttttccgccagccgccgcacggtatccgcaaagcccaggttttccatcttcatcacgaaggtgatggcggatcccccttccccgcagccgaagcatttgaagttctgccgggtctggtccacgatgaaggaaggcgtcttctcattatggaacgggcagcacgccttccaccgggacccggcccttttcagggaaagataggaacccaccacatctacaatgtcagtggcttccagaacgcgccggatgctgtcttcatcaatccttcccataaggcgcggccagtctatcacagccccgccgggtgcacaagaagacagaatcaggacgccattcacaggaaaacagggggaggaaacaaccgggcgcgcactggaaaaacagaggagctcccgtgttccctcaggaaaaccgggtgaaacggcgcggcggcatccggcctccccgtccgcacggaacgcatttccccattgagcgcgggctcggaacgtgttagcctgtctgcatgaagcacattcaccttctgttgctggctctgctggccctgttcgccggctccccgttccgggcggccgcggaggaatccttccgcgaccgggtagtggtcattccggtgggggaggactccctgaccagcaagcagagcttcggcttcatgaaccgcatcctgaagcgggcgcaggaggaacaggcgcgcgccgtggtgtttgacctgaacacgcccggcggcctggcctgggaaaccagcgagatgatgatgaaaagcatccagccgctgaccatccccacttacgcctacgtgaatcccaaggccatgtccgccggggcgctcatctccgcggcgtgcgacaagatttacatggcgcccgtctcctccatcggggcggcgggcatcatcacctcctccggggaggagatggaccccgtcatgcgcaagaaggcggaaagcgccttctgggccttcacccgctccgtggtaacggaaaagggctaccgcccggaagtagtgaaggccatgatgatcccctccgaccaggagcagcaattcggccccgtcaagctggaaaaaggcgcactcctgaccctgacgggcaaggaggccgccacgcggctggaagacggcaggcccctgctggcccagggaacggccacctccgtcacggacctgctggctcaggagaaggtggacgcccccacggtcacggcggaacccaccgcctttgaacgcatcggcctctggattgcgtgggcctcccccatactgatcctgctgggaatcggcggcatctacatggaattcaagacgcctgggttcggcatcggcggcatcgtggccattgccgcgtttgccctgttcttcttcggcaacaacatcgccgggaacctggccggttatgaaacggcggctctgctcattctgggcgtggtcctgctgtgcgtggaattcttcgtcatcccgggcaccttcattgcggccattgcgggcggcatctgcatcttcctggccctgttcggcggcatgatcagctcctgggaatgggaccacatcatccgggacggacagtgggacgacgtcaacacgctggcgatggtcctgggcatccccctcctgaaactggccctgggcctgaccgggggcgccatcctgatcgccgtgctgatgaagtacctgccggactccgtcctgatgcgccgcgtcacgaacgccacggtcagcggcggccccgccggggaagccgtcaacattgcgcgcgtgcaggtaggcgaccgggggaacgccgtcacggaactgaagcccaacggcaaggccatgatccatggcgaaatatgcgaggttttctctcgacaaggcatactgattaagggtacccctgtgcgcgtagtggacatccgtccgttcgacctcgtcgtcgtcaaggacgaatccccctccggggactgacgccatcacgcttttcactcactgccatgcctctcaccgttggactcatttccctgggctgccccaaaaacctgatcgactctgaaatcatgatcggccacatgcagaaggccggcatgaccatgactccggaacctgagctggcggacgtgatggtggtcaacacctgcgctttcattgaccaggccaagcaggaagccatcgacgccattctggacgtcgtgcgcgccagggaaagcggagcctatccggaaaaccagaagctcatcgtggcaggctgcctgtcccagcgctttcagaaggaactgcccgccctgctgccggaggtggacgccttcatcggcccggaccagatcaccaggctcccggaaatcatcacggaggtgatggaccggaccgtgcaggaccggaacttcatccaaggcaagtgcaagtatgttccggactgggacacgccgcgctaccgccttactcccccgcatacggcctacatcaagatagcggaaggctgcaaccacggctgcgcctactgcatcatcccgatgatccggggacgccaccgcagccgctcccagcaggacgtggtgcgtgaagcggaagccctcatccggtccggagtgaaggaaatctgcctgattgcccaggatatcacctattacggcatggacaaatggacggatgcgcgcccgaaccgccgcagcgcggtggactcctcccgcggggaatccctggcctccctgatccgcgccctgaacgccattgaaggggaattctggatcaggcttctttacacccaccccgcccactggggcgatgaactgaccgccgccatcgcggaaagccccaaggtggcccgctacgtggacatccccctccagcacatttccgacaacatgctcagcgccatgcagcgcgtgacggacggggactacatccgcaacctcctgcgggacatccggaaggccgttccgggaatcgccatccgcaccaccttcatcaccggattcccgggagagacggaagacgaccatcaggaactgatggagttcattgaggagttccgctttgaacgggccggcatcttcaccttctcacgggaggaaggcacgaaggcctacaagatgccgaaccaggtgcaccaccgcaccaaggcgcgccgctacaatgaagccaccatgctcctgacccgccttgcctcggaaacggggcaggaacagatcggcaggaaaatccgcgtgctggtggacgctcccggcgttgccagaacggaatgggacgccccggacattgacggcaccgtttccgtccccttgacgctgcccgtcggcgaattcgccaccgtcaccgtaacggatgccgtggcgtatgaactgacggcggaataagattccgcgggcggctggatgggagcatcagggacaagagcgacaggcacggcgcaagccgggatatatctgatcccttatcactcatctccggcatctgagccaaaggcgcttattgtttcacgcttgattccgggagaggcgcgctggccggaggggcttcctgcggtgcggctcccgaaggtgacggagaagcggaatccggaacggggaccagggaagtatccatccgggacaaatccagttcgcgggaagccgcagcggcttccggactgacggcgcccatgttcgcgggcaacggaagcagggctccgtccggaccgaccatgtcgggagcggtgacgggataaaagcccatcatttcctgcggattgacgatttccgacaggctcacgtaaccctggctgccgtcctcaaactcaaccttggcgaacaaatcaccgcaaaccagcaccttcccggttttcacgccgcccctgacggttccgctcgtggaaaaattattctccggattctgctcgaacaccatcattttttccttcttgaacgtaacggattcccccggcttgtaaaatgcctggtccgccttgttcttggccgccattttcttggaggtgatgcctacgggatccagcgctgaactctggcggtcccaggcattcaaatgcttgttcggaccgcaggaagccagcagcaccagcagagcggaagggagaagtgccaatttcatttgccgggcatcttaactgccacagattgcggatggaagcagaatttgcgcctgttgatgcaggatgccgtttcaacaagaaaaatcccggctttcccgccaataagcgttccttcgtgctggacagtcaagaaaacttccgtacaggcttgcggcatatcaacctcacttccaaatgatcaagggatttttctcggcgcttttcctgattgtttcgtcatgctgcatgatgaaggcaaaagaaacccagggcagcactctgatgcgtcccctgatgactcggacggcgccccctcccttgtcctgccgcgggtccggcgcctgcttcgattacttctccgcgccgctctgcaaatacaaaatccgcagggcggaagaaatcatgcccgactcctgccgggccccttcacttcatggaaggaagacggaaaaaagcggagaccgggactttccatcaacaaacagggaaccccggccatcatgctgttccccgcggcggaacctattccatccctgaaacacgctcccggcaggcagccggggccgggaaaagtaagcggttccccaggcggggaaaaacaggccgtccttacggattcccttccccgctctcttcccggggaaacctcaaatcatggcgcaaaggcaacgtattaggcttgccgcattcctcccggcaatgctattctgccacctgcggttcccacgtttggcacagttccatccgggggaaccgttcaagcatttgttctgttatggatgagaagagattagccggcgtagttctgccattgttctccctgcgccgcaacaacgaccacggcatcggggatctgacggctctgcgccagtggattgactgggcggcggatgcccatgtgggatttctccaattgctgcccgtcaacgccctgggtcgggacgaaaacccttccccctattccgccatcagctccgtggctctggagcccctgtacctttccctggaaccatggaccattcccggcctggaagaacgcgtattcaatgaaaccggggacacgctgccgtgggaacagccctccggcccgaacctggtggactaccccaaggtcaggttctggaaaatgtggattctgcggggcgcatggaacaacttcaaaaccaagccggaatatgagggcatcatgcccaagttcagggaatgggtgaaggagcagggaagctggctggaagactttgtctgcttccaggttctctgcgacctgttcggcacggaaatctggtggcactggccggaacaggacccggcccgggccaaaaccatcgccgccgattacgaggaagaaaaggactttgcccgctggctccagtggctctgtgaaaagcaatgggaattcatccggatttatgcggacgaacgcaacgtgaaactgatgggggacatccccatcggcgtttccctgtgcagtgcggacgtcttttttgaacgctacctgtttgatacggactggtgcggaggcgctcctgcggaaggcaactacgcggaagaccccttcacgggcaaatgggggcaaaactggggcattcccctgtacaaatgggaagtcatggcccaggacaacttcgcctggtggcggcgccgggtaaaatactgcaccaagattttcagcatgtacaggattgaccatatcctgggcttttaccgcatttactccttcccgtggaagcctacggaaaacgaggtcttcctgccgctcacgctggagcaggcggcccagagaacgggcggcaggctgcccggcttcaagccccgcggggatgacaacgccgtggaccgcaacctgaacctgacggacggagacctgtaccttcgcctcctgatctctgccgcccccggcgtcagcgtggtgggggaagacctgggctgcgtgccggaatacgtgcgcccgaacatgcgccaattggacattcccggcttcaagattccccattgggaaatcaaaccggacggcaacatcatccccggaaaggaatatcacgaatgctccttcgcggcattcggaacgcatgattttgaaaccatcatgcagacctggaacgacagctacgccaaaatcgagcgtgcccgcaagctgggtctgtgggagggagtctctcccaaaacgccgtccaatccggaacaggaaaacatcgtgcgccaggcggaggacggagcgcgcctgctgaaatggtttgcggacttcgccgggatgcagccggacacttggctctcctactggaacctggaaatcaagacggccatgtacaatgccctgttccgttccaactcccgttacgcggccattctctggcctgccctctttgacgtcaacaagcgcctgaacatccccggcaccacgggaggcaccaactggagggaacgcatgccctttaaagccgtggaagcccataacatgccccagaccgcgtggctgcgcaccgtcatcagcggttccgaccgcacgccgctgcagggagaagacgccatcagggcgctcaagtcagccagaaggcgcatcttcccgaaggtcaccgtcaacaacgaacgcttcctgaaacggatgctgatgtggcccaacgggaaatccctgtaagttccggccagtttccggagcgccgcaagcccctgccccgcttcatggcctttccttcaactgttctttccattgcatccgtccttgcctcctgccggaaaagcaaccatactccccgcatgacctggagctggaacaagctgtcccccgccaaatgggaagacgcgtggagtgaacgcattgccggaaatcccaatgcctccatcaccattatcaagggaggcaaaaccatcaggattaccgtttactgtgaccgggaagaagacgccctgaccctgaagcagtattttggcggcaccgtccgggaaatcaagacacgtgactgggtggcggcccagaaccgggaggaacgcgccccgctcaggataaggaattccctggtcataacggaacagagctccgcagaaaagcttgccgccctgcaacaacaattccccggacgccggatcctgagcgttccggcggaaatggccttcggcaccggagaccatgccaccacgtccacctgcctgcgcttcattgccgactttgcccaatcacgcaaagggacagcctggaccatgacggacatcggctgcggaaccgccgtactggcgattgcggcgctgaagctgggggcgaaacacgccacggccttcgactttgaccccatggccattgaagtggcccggcataacatggaacgcaacgccgtcacgacagaacagctggatttatttgtaggggacgtctttgaatggacgcccgcagcccggcagaagggggatctggtcgtcgccaacctgttttccaccatccttcaaaaagccttcccgcacatcatcgccgccatgaagaaggatgccgtgctggtcatttccgggattctggcctcccaatgggaagaaacgaaatccgcggccgaacgcaacggactttcctttgaccgggtcatcaaacgcggcaaatgggtcacagccaagggcagcatggtgaagtaagcattccttcacggggcatgggataacacttgccccggcatgccaatcaacatccaactgggaaccagggcctctcggccctggtgttctttgtcacggataccctcccgttatccagcgcgtactctttgaacaaggttttttcagggcaggaaagccctgttcccggcaggaaataccttcacaagccagcggaatgctccttccgccctgcacaagcatcaatgcgccccgcgggtttcatactttgcctcactctccggaaagcctcacccttccgcgttttcacgggcggtgaacagcttttccacatacttggccagcatgtccacttccagattcaccggctggccggaaacggcgcgctgcaggttcgtgcgtccgaaggtatggggcgtgatccagaattcaagcagggagccgttcaaattcgcaatcgtcagggaaatgccgtcaatggtgatggagcccttgtcaatgcagtagcgggccagctcatccggaatgcgcacttccaggcggtggtcctgccccacgggctccagggccgtaatcgttccggtattgtccacatgccccatcacgaagtggccgccgaagcggtccatggcggacatggcgcgttccaggttcaccagcccccccggctggaggtttcccaggctggtgacgcggagggtctgggaaagcaggtcaaaggagacgcgctcaccgtccagggcgtccaccgtcaggcagcagccgttgacggcgacggaatcccccagggaaagttcatgaccgaatggaataatcagcgtcagtctggctccgccgttgatgggcgtaaacccttccacggttcctgttgtttcaacgagtccggtaaacataagagtaagctccggttccggcccttaatggccgaagcaggtgaagaagatgaacacgatggcggtgggaaaagccgcccaggcaaacagccacaggggattgatgcccttgaagtacttgcccagaatggcctgcccagccgggttgggggcgttggcgattaccgtcaggccgccgcccgtcacggcgccggccaccacggagtatttgacggcttccggcaggttgggaaccgtggacgccaggaaggtgacggcggcattgtcgttgaacgccgtcagcagcgtggccccgatcatggcgtagtcccccagccgcatcagcaccggttccagccaccaggcctggacgccgcccagaatgaccaggcccgccaggaagaagcccaccatcatgggaacgcgcagggacatctggttctggtactgcggggtagccaccgtaaagccaatgaagaagaggaagctgccgatgaacatgaccggctcatgggcgaagagaaccgtccaggtcagaaagcagacgtgcgccagcgtcacccacgccggtatcttgtcattgcggtcttcccaggactggggaacggcgtcgtcaaactcgttgaactcgcgttgctgggtagccaggcgggcgaattccttgcggaagaggaaaaagtaggccaggttggagatgatgatggctgaaacggccttccagccgaagtgctggatcatgtgcgcaagaccccagtcccacttttccgccaccatcaccacgggcggggcggcaaagtgcgtcagggtgccgccgatggagatgttcacgaagagcagccccagcgttgcatacatcagggtcttcttcggcttgaggtcgtaaaacttcttgctcaggatcagggcgccgatcgtcatggcggcaggttccgtaatcagggagccgagcaggggcgcgagggtcatcacagaaatccaccaggccccgggcgaggattttccaagcttggcgccgcagttgactacggattccgccagcttgaagatggggcgggaagaagcgatgatcatgatgatcatcacgaacatgggctccgtgaaagagcagtcgtaattcaaataggccgagaagtcctcaaaggaataatacttccagcacacgaacatgaaggggatgatccagatgccgaacacggcttccacttcccccagaaaatggaaaatggcggaggcgaaggaaaccggaagccgttcttccggatgcatcacgcggaaattggtttccttgagcttttccttgtagcgcagggccagcttgtgggaatagcgttcaaaccgcccggccaggaacgtatggataatagcccccaggaacacgagcgtcacggccaggttgaacccgccggactgcttgttgcgctccgtgagcacctgggacaggctggcatccggcggcgcgggcttgtactggttcaggggaatgggaaaatggctgtactgtgattccccccccacttccgtagcaggataggcaggttccgccgcgcgagccgaagcttcaccggcaggagcccccaggaaaaaggcggcggcagccacggtagtgagcagacccgcacggcgcgccagaactttgaagaaatgacaaatacagctcatgtctgcggacagactaaacacctcccctttcttccgcgagcggaaaatgagtctgtatgctttttaacgggaacgcgttcaggcgggaaaaacccgcacggacctgaaaaggagcgcgcacggcagggaaaaggctgtcatgcctgcctgagtttaaggttgaacaggaaacttaaaaatagtagttgcaggtatgcgctccgccccaggcctcctttccattttcttgattgcagccggtgtcgcgtgcgcggagcttccgcccgacctgccgcccgccactccccttcccctcgcgcccggaccggtcatcggcggcaccatcaagggggaccctgccgccggcgttgtccccgtcagggaactgattgaagccaaccgcaggaatgaaaacattcccatggcggaacccattcccggagaaacggtttcctccatccctcaggcggagcccatcccgaatgcggagcctattcccggggaaacgaacctgcatgccccggtgcagcccgcaggcccggtcccggtcattcctcccacggccttttcccccgttccggttccccagcatgaaacccgcgttgccatcctgggctatcatgatttcagccgtacccttcccgccacggaaatgcgcatgaatacggacgtgttccgcgcccagatgcaggccctgaaggccagcggcgtgcccgtcatttccatgaaggaattcctggaatggaaagtgggaagcaggcagcttcccgccaaatgcgtgatgatcaccattgacgacggctggaagagcgtttacacggacgcctaccccatcctgaaggaaacgggattcccgttcaccgttttcccctataccaaattcatcacgggccgcggctccgccatgagccatgaccagattcaggaaatgctggataacggcgccacgctgggcagccactccgtcagccacctgtaccccagatcatggcgcgccgcccagcggaagggaacccaggcggttctggacctggcaacggcggaaataagcaattcccggaaaatccttcaggaaaaattccccggttcctccgtggaagcctactgctacccgggcggattcgtcctgccggacatgatcaccaaggcggaggaagccggattccaggcggccttcacggtgattcccaagaaagtgaccaaggacacggaccgctggcgggttcaccgctacatggtctttggcaaggatcccaagacattcaccagagccctgaatttcaacgtgcccacggctccggaaacgccgtcggccactcccggcaacaatagcagcagcgggaacagcctgaattcctatccggccccggcccagcctgtctacccggcggccaataccgtggtgaaaaaccagaacccggacatctccatttccctggcccgtgaaccagccttcgatcccaaacaggtggaaatgcgcgtttccggcttcggcctggtgaatgcccagtatgaccccaaggaaaaaatcctgaaatggacgccttcccgccccctgcgcctcagccccgtaaccgtccaggtgcgctggaaaaaccttgccgccaacctgtggcagacagccacctggcaattcggcatcgcggagcaggaaatgcacttcattccccagaatgtagtcaaataattccggctgctgtcgcagccatcgtccctccggagcgcgggtaaacgggcaaccggaaacttcatacccgtgttttccgtcataaactccttcctgggaacaaggggctccggccccttgtaaaaactccgaacggaaaaagagatggcactctccctccgcaatgtggcggaaaaagctcctaaaaacccgcaagtctcaaaaccactgagaaaccagggtcctttccagcaaattgaatggagcgctgcaagctcttgcggcagctgagagcatatgcggccagaagccgcatcttttgcaaaacgtgagaaaatggagaaaatcattaacaccctctccgttctcctacggaaaagttttatgccggaaaatccgccgccctctcttcccggacatagagtcctccggacagaaaaatatatccccggttcatatttttcctgccgttgcagacggcatgggattccaaatgcattcctcctcccattcctcctctcccacatggatgctcaatgttagaatagcctaacattcataagttgaggagacttccgcatcaacacggaaagctcccccggaatgccaaaaaaactgacatttggcttgcccgcatggtgtgaagtggcataatcattcggcaccattatcaggttcagccaggcacggacatccacatgaagacgagcactaaaactttcgccattgcagatacagccgctaacgcagactatctcaccaatacttccgaaccgctcggagaaacgatgaccctgaacgtgggcccctcccaccccgccacccacggcgtgctgcggctggtgctggaactcgatggtgaagagatcattagctgcgatccggtggtgggccacctgcaccgcggcatggaaaagatcggggagaccatccagtacaaccagttcgtcccctacaccgaccgcttcgactacctggcccctctttccaacaacatcgcctatgcctgcgcggtggaaaaactgctgggctgggagctgccgccccgcgggcaggccctgcgcgtgctggccctggagctttcccgtttttcctcccatatcctgggcgtcggcgtgtacggcatggacgtaggcgccatgaccgtgttcctgtactgttatgaggaacgcgaaaaaatccataacttttacgaacagctcaccggagcgcgcttcacctcctcctacacccgcatcggcggacagacgcgcgacgtccccaatgaaatgctgaaggaagtgctcgtcttctgtgacgaagcgggcaagaccctggatgaaacggaagccctgctgctcaagaacaaaatcttcatcgaccgccttcagggcgtgggcgtcatcagccgtgaaaaggcgctctcctgggccattaccggagccaacctgcgcgccagcggcgtcaagcgcgacctgcgcaaaaccaacccctacctgggttatgagaattacgagttcgacgttcccgtgggtgaacacggcgactgctacgaccgctttaccgtacgcattgaggaaatgcgccagtccctgcgcatcatccgccaggtcattgaaaccatgccggacggccccatcaacatggtggacaccaagggcacgctgcctgaaaagaaaaaggtcatgacggacatggaatccctgatccgccagttcatggccaccaccatgggcgtgaacgcccccgccgggcaggtttactttgccgcggaaaacccgaaaggcgagctgggcttcttcctggactccaaggggggcggacttcccaaccgcctgcgcatgcgctccccctccttctgcaacctttccatcctgccggaactgctgaaaggccacctggtttccgacgttccggccattctcggctccttcgacttcgtgatgggcgaatgcgaccgctaaacacacgcttcccttttcctttccaactcaaacaccaaatttcctccccatgtccgattacgctgaaaacgccatcgacgcgactatcgcccaccagcccagcccgggcgaacggttctacccggcctttgaagtaacgccggagcttgacgccgccgccagcgaatacgtcacgcattatccggaaggcaagcagaaatccgccgtgcttcccatcctgcatgaaatccagaaaaaattcggcttcatcagcgcagacgccatcacctgggtgggtgaaaaactgaacatctccgccgcccacgtgctgggcgtggtcaccttctatcccggcctgcgccagatgtgccccggcaagacccacatccgcgtgtgccgcaccctctcctgcgccatggcgggagcggacagcctctttgacgccatctgcgcgcgcctgggcattgacaagagcggcattgaccatcaccaccccatcggcgtcagcccggacggcctgtggagcgtggagggagtggaatgcctggccaactgcggattcggccccaacatgatggtcaacgacctcctgtatgaaaaagtcactccggaactgctggaggaagtgatcgccaagcaccagaacgcctaaccctttccaccccgcaccagattttcgccatgagcatcacctatcttcccggtaaagaaccccaccccagggaaacgcgccgcatcctgaaaaacgtcaaccgcgaaggatggaacacttccattgactgctatctggccgacggcggctatgaggaactgaaaaaggcgctcggcatggagccgaaggccgtcattgacgaggtgaaaaaatccggactgcgcggccgcggcggcgcgggtttccccaccggcgtgaagtggaccttcattccgccgaacaacacgaagcccgtttatctggtctgcaactgcgacgaatccgaacccggcaccttcaaggaccgctacatcgtccaccaggacccccaccagctcattgaagggatggtcatctccagctacgcggtaggcgcgcacctggcttacatctacatgcgggaggaattccccattgccgcggaagtcatgctcaaggcccttcaggaagcgcgcgaacgcggcttcctgggcagcaacatccagggttccggctacgatctggaaatccacgtgcaccgcggcgcgggcgcctacatctgcggtgaggaaacggccctgctcaactccctggaaggccagcgcccctacccgcgcatcaagccccccttcttcccggccgccatcggcctgtacggctgccccaccatcgtgaacaacgtggagtccctctgccaggtgaagcacgtcatcgccatgggcggagaagcctacagccaggaaggtgcccggcgctcccccggtacccgcatcatcggcgtttccggcgacgtgaaacgcccggggttctatgaaatcgtttccggctccatgaccttcggggaactgctgtatgacgtctgcggaggcccgcgggacggccgcgagttcaaggccgtcattcccggcggctcctcctccaaggtcatgcgcacggatgtggaatacaaggtgcagaacccggacggcaccatgggcaaaatctccttcttcgacattccgctggacctggacagcatctcccagcacggctccatgtccggctccggcgcggtcatcgtcatggacgactcccgctccatgccctgggccatgaacaacatcaaccgcttttacgcgcatgaatcctgcggccagtgcaccccctgccgggaaggctgcccgtggatgatgaagctcagcacccgcattctggaaggcaaggccgctccgtcagacgtggacctgctgattgaagtggccaaccagattgaagggaaaacggtctgcgccttcggtgaagccgcctcatggcccacccaggccatggtctccaagttcaaggaggaattcgtggccctgacggaccccttcaacgcctgcctgccccataccagggaaggccgggaacaaacccgtttcctcacccgctaacagcagaacgcaacaccacttttcaataccatttccctcccatccgtcatcatgagtgaagaagcttccaaactccccaaagacattgccgccgcggaaggcaaggtgaacgtccagatcaacggaacgtggcaccggttcccgcgcggcacgcggattgcagacgcctgccgttccgtaggcgttcccatcccgtgcttctgctaccaccccaagctggccgtcgtcggctcctgccgcatgtgcatggtggaacaggggatgccgccccggctggctccgggccagactccctcctatgatgaaaacggctaccagcgcatccagtggatgccgcgccccatcatctcctgcgcgaacacggtggcggaaaacatgggcatccgtacggacagccccctcgccagcgaggcgcgccgcggcgtgatggaattcctgcttaccagccacccgctggactgtcccatctgcgaccaggccggggaatgcaagctccaggaatactccaacgactacggccaggtggaaggccgctatgaggaaaagaagaccaagaagggcaagaacctgagcatcggcccgcgcgtgaacctggaccaggagcgctgcgtgctctgcggccgctgcgtgcgcttcatgcgcgacatcatgcatgacgaagttctcacgatggcccagcgcggcaccttcaacgccatcacggtctatccgggccgtgagctggacagcaactactccctgaacaccgtggacctctgcccggtaggcgctcttacctccaaggacttccgcttcaaaatgcgcgtctggttcctgaaggaaaccaagaccattgacgtggactgcggcacgggcaccaacatcatcctctggacgcgtgaagacaaggtgtaccgcatcaccccgcgcccgaacgacgccgtgaactcctgctggatgccggactcccaccgcctgaattacaaatacatcaacgcggaaacgcgcattccccagcccgtcatacgcacagacgcggcagcgccccaccgcccgtccacctgggaacccgccctggcctccgtcacggaagccgtcaagcgcgtcgccccgcaccagctcgccatcatcgcctccgggcgcatgaccaacgaagaactttacatggtccgccacttggccgcgcaaatcggcacggacatggtggacatcgtcccccgcatgggagaaagcgacggcatgctgatcgccgcggaccgcaatccgaacacgaacggggccaagctggtgctgggcattgaacccggctccaggctggccgccatccgcgacggcgtgcgcaacggctccatcaagggcatcctcacgctgggggaagacctcaccgctccggaagccggcttcacggcggaagacctgaaaaagctggactacctgttcatgaccgcccacagcgtgaatgaaacggcgcgccatgcggacctggttctgccgggcgtcacgtatgctgaaaaattcggaaccatgatcaacgtcacgggccgcatccagcgcctgaaccgcgccatccagcccgtgggctacgcccgggatgactggcagattctccgggacatcacccttctgctgggcggcaaccccgcgctgaaagacttcaactccgccctggacgtcctcaccgtcatgagcacggaatacggcgcccttaacggcgtcacctggggctccatcggagacgggggccagcccattctggaaaccggcgtcaccattcccgtggtggaacatgaaaaaagccagggccgctaatcacacttcacacgcacacaacctgttaatccgccatgattgattcgattctaaccttttgcgacgaagtgctcagcaaccctgtgtggttctacgtcatcaccctgctgatcaaaatcgtcatctgcttcgccatcaccatcctgttcattccggtctgcgtgtacattgaacgccgggtggccgcctggattcaggaccgcgtggggcccaaccgcgccggcatcccgctgagcatcttccgccgcttcggggcgaagtcagacctgccgttcaaaaagacgctggactacttcggccttccccacgacggcaaaatcgccaacctgtgccgcttcttccgcctggaccgcgacattccgatcttcggcctcgtgcagcccatggtggacggcggcaagctgttcctcaagcaggacttcacgcctcccttcgtgcgccgcgtgtacttctggatcgcccccatcctggtgctggcccccccgctgatgacggcggccgtggtcccctttgccggagaccttcacacctcctacggcaacgtaaacatggcggtggccaacctcagcgtaggccccctgtggatgttcgccatctcctccctctccgtatacggcctggtgctggccggatggtcctccaactccaaattccccttcctgggcggcgtgcgctcctccgcccagatgatctcctacgaaatcagcatgggcctgtccatcatccccgtgctgatgatttacagcacgctggacctctccaacatcgtggaataccaggccgccaacggatggctgctgcttcccgtgtggggcgagggcctgagctggcagcgctggatcctgctggttcccatcgccatcagcttcatcatcttcctgacctccatcttcgcggaagccaaccgcacgccctttgacatgtccgaatgtgaaacggacctcgtgggcggctaccacacggaatactcctccatgaaattcgcgcaattcttcatgggtgaatacgccgccatggtggtaggctcctccctggtcatcacgctgttcctgggcggctggtccatcggcttcggcctggacgggtggctcaacgaacacgtagccaactgggtggcggtcatctgccagctcatcgcgtacgtgctcaagctcctcttcttcgtcttcttcttcgtctgggtgcgctggacgctcccccgcttccgttacgaccaggtgatgaagctcggctggatggtcttctttgaactggccgtcatcaacatcttcatcacggccgccatcctgtacttcgtcaagtaatcaaccttcttcatcccgacaacatcactattatggccttcaaaacgatcaagcgcccgaagatttccctcggagagcggttctacttgcaatccatccttggcggtctctggatcaccatcaagcacctcgttctggctctgctgggcaaatcccgcaacaagaaggaactggccggctccggcataggcgtcacgatgcagtacccggaattccgctgggacaagcacctgccggaatactaccgcggggctcccgtcctggtgaagggggaagacggccgcgaacgctgcgtctcctgccagctctgcgaattcatctgccctgcccgcgccatcaccatcacccccggcgccgtcaaggaaggcccctggggcaaggtggaaaaagcgcccagggaattccagatcgacatgctccgctgcatctactgcggcatgtgcgaggaagcctgcccggaacaggccatcttcatgagccaggactacctgttcacccccacggacaaggcccaggccatccacaacaaggccaagctctacgaaatgggcggcacccgcaagggactggtcaacaagtggaaccaatacaaataaatcaccccgaaacattcactccaatttccgtacgttatgaacatttttgccagtgacatactcttttacgtcttcggggccctggccgtgatcctgtccctgatggtcgtcttcatgcgcaaccccgtttcctccgccatgatgatggccctctccttcggagccactgccgccattatgatcgggctgggcgcccacttcctgggcattctccagattctggtatacgccggagccatcatggtgctcttcgcgttcatcatcatgctgctgaacgtgaagcgggaaacctcccccttccggcggcccgtctccgtcgccatcggcgtcatcatcgccggcctcttcctcggccagctcatcggcatcatctactccctgcccggcgcgaaggaaacgcaccgctgcccgatggccaccgcggaacaggcgtggaacgatctgaagatcggccaggacagcgccaattccgggaaaacggaaaccaacaacctttccggggaatgcgcgcagaaaccctgcgttgcttccggcggatgcacacgaggatcggactatgccatcaccaagacatctcttgaccaattgctccattccacctgcggcatagcaccgtccatcaccctccctcccctctccccccaatgttccgcacacctctatccggaaggcaccaccatccgcgcggaaatagacaacggggaattcccggataccgccctgctgggccgcaccctgtttgacaaatacaaccggagcctggtcatcgccgggctggccctgctggtggcctccatcggcgtcgtcgtgctgagccgccgcccctccggcaaataacccgaaccccttaccacagccatcatcatgatacctcttacgcattacctgatcctctccggcgtcctgttcgccatcggcctgatgggggtgattgtccggcgtgacatcatcgtcatcttcatgtgcctggaaatgatgctcagcgcggccaacctgtcactggtggcgttttcacgcgcccagggcaccatggggctgcccaattacgacggacaggccctgtccatcttcatcctgaccatcgccgcggcggaagtagccatcgggctggccctcatcgtctccctgtaccgggccaggcgcacggccagcacgcaggacctcaacacgctgaaagactaagagcaacataccacttcaagaacatgtttaatattgatattcaatacacctggctcctgctcttcctgccgctggtcgtagccgccttcaactggttcctgctgacccggcgtccgaacgtcgcggccctcacctccaccttctcctgcctggcgaccttcgttctttccctgggcctgctggaccagaccggctcggactccttctcctggcttccgatctccgacgtcttttccgttgacctgggctttgtgctggaccccctttccacccgcatgatgctggtggtcacgggcatcggcctgctggtccacatcttctccctgagctacatggcggacgacaaggcgaaaacgcgctacttcgcgtgcctgagcctcttcatgttctccatgacgggcatcgtcctggcgaacaacatcgccatgaccttcatcttctgggagctggtaggcctttcctcctacctgctcatcggccactggtacaccagggacgccgccgcaaacgccgccaaaaaagccttcatctgcaaccgcgtgggtgacttcggcttcctgatcggcatcctgaccctctgggcgctgaccaacacgctggacttcagcctgatggaaatgcccgcgggcctcagtgaaaccctgctgaacatcacggtgctgtgcctcttctgcggggcggtgggcaaatccgcccagttcccgctgcacgtgtggctgccggacgccatggaaggccccacccccgtctccgccctgatccatgcggccaccatggtggccgccggggtgtacatgatggtgcgcgtccagtactccatcggcgtggaagccttccccgccctggcctgcaacgtcattgccgtcatcggcgccgtcacggccgtcatcgccgccttcatggccacccagcagaatgacatcaagcgcgtgctggcctactccaccctctcccagctgggctacatggtcatggccctgggcctgctggccggggaagcggccatgttccacctcttcacccatgcctggttcaaggccctgctcttcctgggcgcgggcgccatcatcttcgcctgccaccatgaacaggacatctggaaaatgggcggcatcatgaagcgcatgaagctgacctcccttaccttcatcatcgcgaccatggccctgatcgccattccgttcacgtccggcttcttttccaaggaagccattctggaagccgccctgcacaaaaacccggtcttcttctggatcggcgcgggcgtggccctgctgaccaccttctacatgatgcgcgtgatcttcgtggtcttcttcggcaagagccgcagccacagctcggaacacgccacggaagtgggcggcctcatgctggttcccctgctgattctggccgtgctggccctcatctccggctacggcttcatcgccgacaggctggtgcccttcaacgggttcgtttccgaaagcttccatatcggcatgcccttctacgtctccatgggcgcgctggtgctcggcatcctgctggcggccgtcttctatgcgggctccccggcctccgacaagctctccggcaatgccgtctcccgcgccctcgccaaccgcctctacattgactggttctatgacaaggtgctggtcaggggcatccagggctccctggccgccatcatcgacttcatggaccagttcatcatctccggcctcatcgtgggcggcctggcgcggctgaccgccgccgttgggtccctgctgcgccgcctccagtccggcagcatggccgcctacacggccctcttcggcatcggcctgctcctggtcatctacttcaccgtcttctattcctgctaacctaccaaccaatcacacaccatgcttatctggcttgttctcattcctctgattgccacggccctcatcggtctgtgcaaggcgcccgcacgcccgacagccctgctcagcgccgcgctgacgctggccctcggcatctgggccctggttagctttgacggctgctcctcctgctggtcccgctttgaagggatggacctccagctcaccctggccccggctctggccaaagtgatgctgctgctgaccattctggtgaccttcgccaccgtgctgggaaccaacccgcccaagggaggggaagcctcctggtacaactccgccctgctgatttccgcgggcgccaccggggccttcctgtccgacaacatcatctctttcttcgccttccatgagctggccctcatccccaccttcgtgatgatcggcctgtacggacgcggcgaccgccgcaccacggcctggcgagccacgctttacctggggcttgcctccatggtgctgctggccgccctgctgatgatcggcacgcaggcgggcttcaccttctccggattgaaagacttcatggccggcggacgtgaactcgcccacgcggaactcatcggcgccctgctgatcgccggcttcggcacgctgatttccctcttccccttccactcctgggcagcccccgcgtatgcctccgcccccgctccggtggcgatgatgcatgcgggcgtgctcaagaagttcggcctgtacggcctctttatgttccagccgctgatggaaactggcttcctcccatggacgaacatcctccttgtcctgctcgtatgcaacgtcatctgggtaggctacgtgaccgtcaaccagaagaggctggacctgctcctgggcaactcctccgtgatgcacatgggctacattttcctggccttcgccgccctggtggcctccggttccgcggaagccaacccctgggcgctgaaaggggccgccctgctgatgctggcccacggcctgaccatcgccctgctcttcctgctctgcggacagattgaaaagcagaccggcacgctggaaatcaactccctgggcggcctgagcaccagactgccgcgcatggccttcgtcttcggcctggcgggcatggcttccatcggcctccccggccttgccaacttcccgggggaattcatggtcttcttctccggcttcgccggatttaacgacagcttcggccctgtccagatcgccaccatcctgtgcctctggggcctggtcatcggcgcggtgtacatgctgagggcctaccgcaacatcttccagggggacctctccaaggccgcagcctacgccacggaactgctgccttccgaacgggcggccaactacttcctgacgatcaccctggcggtcttcggcttcttccccacgctggtgctccagttcttctcctgattccccttccgaatacaatccaagtttaacccgatcttcttttacccatgcaagcgtatattccggaattcatcctggccggcctggcgatgcttatgctcctggccgagaccttctgcaaaaagacgcccaaattcgtcttcgggctgattggcgcggcgggtgccctggcgatgctccccttctacatgggggggctctatgacaacgtctacatcatcctggcgcttgtcgccacggcagtcaccctgctgctgtccgtggacttccgggccgtcatcaacctctcttccaatgactccaagtcccaggacggcacgggggaattctacatccttcccctgctggcctgcgtgggcatcacctccctgtgcaaagcctccaacctggtggaactgttcgtctccctggaagtgcttaccctgagctccttcatcatggtgggctacttccgccggaacctgggctccacggaagcgggcatcaagtacctgattctgggcgccgtcagcacgggcttcctcgtcttcggcctggcctggtacttcggcgtcacgggaaccttcatctatgacggagccatcgtcagccacgcgctggcgggccagacggcccccgccatgtacctggccctcgccatgctgctgctcggcacggccttcaaaatcggcgcggttcccatgcaattgtggattccggacgtataccagggcgcacccactccggtgacggctttcctttccgtagcctccaaggtggccggcttcgccctgctcagcatcatcctggcccccttcgccgcattgccccccgttgaattcgtcgtggccctgatggctgcggctacgctgctggtgggcaacctgggcgccattccgcagaccaacctgaagcgcatgatgggttattcctccatcgcgcaggccggcttcatccttcccctcttcatcggcaccgtggacgggcggcttgccccgaacgccccgttctacctggccgtgtacctggtcatgaccttcggcgccttcttcgccctcgccatgatccgcatccagcgcgggagcgaggaaatctccgccttccgcggcctgggcaagactaatccccggctggccctggccatcaccatcatgttcgcctccctggcgggcgtgccgctgacggccggcttcttcgccaaaatgatctccttcgtgcacgtcatcaacacgggcctgtacctgggctggatgctccccgtcatgatcatctgcgcggcctccggcttttattactacttcaaggtcatccgctccatgtactgggacaagcccgcagaagacgcggaccccgtacaggtgcccgtcatttccggagtgatgctggcggccttctccatcttcatcgtgctgggcggcctgatgcccctcttcctgaaccccatccggtagaacgacatttcccgttcatcatcccgaaggccgttcccgcatccgcgcgggacggccttctttattccggaagcgccgcgggcctttgcggcagttaaaggaatcaatcaggtgaattgaacgaaagcaaacaaatggaagaccacatcatgggggcgtccttccggatatgcaattccggttgccgtaaaggcttgcggttctcccccagtttcatgaatttctccggaatgctcatgccgaaaaaatcttgaaaaaagtgcagtttccatgcgagatttcccacggaacaaacgtaattagcccgtactaattatttgcctgcctccatccctccggacggagagcggccaaccatcaatcaatcattcaaaaccatgcgtcttttctccgccacagccgtcgtttgcgccgccctgttctccggaaccactctcctgcatgcccaggaagacccggaactgctggcaaaacgccagtgccgttccgtccatgtcatgcagcagggccacccggcccaggcgagcgccctgtacaatgaagtgaaagccaagacatccgttccgggcacctacttctgcgccatgaattttgacgacggctacatcggctttcaggaacagtccaacggtaaaaaagtcattatcttttccatctgggacccggtggcccatggggacaaccccaacagcgtgccggaagaagagcgcaccaaactggtaaagctgggtgaaaacgcgcgctccggccgcttcggcggcgaaggaacgggcggccagagcttcgtggactatccctggaccgtcgaggaaaacatgcgtttcctcgtctgcgtcaaaaagatggggaaattcaaggaaatcagcggctactacttcaacaacaaggacaagtcctgggacctcatttccaaatggaaaacgcattcctcggaaaaggaactttccttctccgtcggattcgtggaagacttcatgcgcaactttgaatccgccaagaaagcccgcggcgccttcttcggccccagcttcgcgtacaaggacggcaaatggcaccccaacaccagcgtgacgttcaccggcgatcccaccccctccaccaacgtcatggcagacatccagcccaacggttccgttctgctccagacgggcggagaaacaaaaatgacggatttcaaactgttccagaaccgtcccctgccccaggatgccaatcctgtccagcctgatgaagtcgtcaccaggctcgttcaggagaacatcaaataatcatgtcccttaccggctggctaaccatgatcgtttccatcggcggcgtattgaccgccgccgcatgggcgtattacaaggtgctctccactcccaaggagacggaacacctgggcagccccacccctcccatgccggaggacccggaggaataaggctccggcccggcgcatgaacaattcccggtccgcggaaactgcccggatttgtcctgcccatccggggattgccgcagccccccgcggcccctaaggtaaaactgagcgccagcggactttttatcctgaaaaccagtacctcctgccggacgtttttcatttcagctgacgcagggcttgcggcgcttccgcaacgcgtgccagccaaaaacctggaacaggataaatacgccgtccatctgctcaatagccacgcaaacgcacgacgcacgcgccagccatccccagcgcatccacgcatgcagtccgggccgtccgccattcaggcagtatccggttcacggatattccttgaacaattttcccttttaaccgtccgacgggggaaggatgaaacccagccggtcaatgccgtacctggcgcattcctgccacagggatttttccagggcttccgccgtccggcggcgttcctcctccggcatgctttcaaagtactccggccccaggtgttcgctgatggccttgtccgccatgcgcgtcaccaggtccgcccagaaaatgttgtcccggtactcgtccaggcagtcctggaaaaaggcgttttcctcatattcccgggtgaaggcgtaaccgcccaaatcgtccgcgtaggcaatgcggcccttcagtttgggcgtggcggatagttcctccatcagccgggagaccagctttccccacgccaccaggcgtccttccgccccgtcctgctggttggaggcggccaccgtggcggcggtggaaagcatttccgccagatcgcgcgcctcgtcgtcggataatttcaacgtcaccggcatggagtcagatcaatccgagtttcatcctgccttcctcgctgaccatgtcctggttccagggggggtcccacaccatttccacatccgcggcctccacgccttccagcgcttcaatgcggtccttggcctccatcaccagatggggccccatgccgcagccgggcgccgtaagagtcattttgaccgccacgtgatgcaggccgttttccagctcgatgacggtcacgtcgtaaatcaggcccaggttgacgatgtccacggggatttccggatcgtacacgcatttcagcgtatcccatacccgttcttcaagcgtggcgttttcatccagttcagccgcctccggggaggcttccgccgcttccgctcccagggcgtccgcattttccctggagatgcgggccaggccatggtccgtagccacggtataggagccgcccagtatctgggtgatatacacgcgttccccctccggcagcgtgagcacatccccgctggggatctggaccgccgtcacttctcttttgagttctactacctggttcagcataaatccttgcgattaaaggaacatccggctacggacatgcgcgggagggaacaggccccacgaggccggaccgccctgcggcatccagaaccttccgcgcaggagcaacataaggggtatttgcatcaccgtcgaggtcaaaaactgttctgccgtgaccggaaacgcccttcatgacaggaaagcgcatgccgcaatgttttggaaaagccgccggaagcggaaagcttcgttcttgcctagcggcgggaaaaggtgtaaaaggtccgggctgtccaggctgccgtcagtccgggaccggccacacgcgcatcttcaacttaacattccatgttagattacttacgtaaacatacaatcgtcatcatggcagccatggccctggtgtttgtgggcctcatgttcatcggcggggacgtaagcggcggctccctgaccggcatgttcaagcaaaccttcgtttccgtggacggcaagtcttacggagaaaaggattacaacagcatgggcagaaccggcctgtccgtggctttctccttcccttcaaccttcggcccgctgctccaggacaatttcagctcggaagaaagcctgcgggaactctgccacctgctgaaaacgaataatcccaacgccgctttcctggcctaccgcggcatcatccgcagggaggcgagccggctgggcctgacgcccaatactacggagattgacgacgccatctgcaacattcccgaattccaggatgagaagggcgtcttcgacccccggaagtacgacaatttcatttccatgcgcggcaacatgggcaagaagcttcaggaggaactgctgcgcggcctgatggaagacaccatcagcctggtgcgcatcaaggacgtgctgaccggtggcatttccgtggaatccggctttgccgaagccgtggcggagtccaacagccagcagatcacggtcaacaccgccttcctggaaaagagcgccttccgtcccaagacggacccgggagaagaggaaatcaaaaccttctgggacaagcacaaggaaaattacaagaacgaggaagcccgcttcttcaccgtgtacaccttcacccccgcgggcgatgcccaggctcccaagcccggcgatatttccaacgccaccatggaaaccatgaacctggtggaaaatgacatctgggaaccgctgaacgccaccaacggcaggaacatggaccaggccatcagtgaagccctggccaagactcccgacgtctgcaagatggagaagaagtcctacacggccgtgacgcgcaagaatgcgccccaggaaatcaaccagccgatcaaccagtccgcctccgacggacgcagcgccaccctgctggacgtggccttctccctgacgggagcccccgccctgaatgcggatgcggacgccaaggccattgaagaagcgcgcgccaagaccggagccgaacagatcagcaccatgcaggtgctggaaaacggacaggtcgtcctggtccgcctggaaggcgttaccccggtaaaggcgctgccttatgaaaccgcccgcaacagcgcccgcgccgacctgctggaaagcatgaccgtggaatccatgaacaaggccgccgccgaactcaacacggaattgcagaaggctgaaaagcccgtggaacagttcaacgccatcgccgggaaggccggagccaagaccgccgcctacggtcccttcatcaatccgaacgccctcctgagcagcgtcaacctccaaaacgccagaagccaggaagaactccaggcccttctggaccgcgccatgaattcccgcctggctccgcccaaggaactcccggttcctgaagaagtgttccaggcggtttccgtcattaaccccggccggatggcccagcccatcaacacgggggacggcatcctgctgacccagctcgtcaagcgcgaactggaggatacgccggagttccagatcaaggccacccagcagattgccccggccctgaccgcccaggccaaatccatgatcatgctggactggctgaaagcgtgcatcgcccagtacaaggtggagatcgcccccatcctgaaccaggaacgctaacacccttcctttccatggcagccgtcattacccccgtgtcccgccgcacaggggcggaatgccgccaaaataccttcctatgatggcccccgcaccggggccatcatttttattgcccttgttccgccatccctgaccccctcccccttcatcatccatgagcgccctccctgcccagtccaggtacatcatcggaacggaagcctgcgaacgcttcagcttctacggcatgaagtccatcctcatgctgtacatgacgggccacctgctgatgagcgaaaactgggccaccgccaccctccacgtcttcgcgggaatggtttacctgcttcccctggcgggcgcatggctggcggacaaggtctggggccggtacaagaccattctttacatttccctgctttactgcgtagggcacggagtcctggccacggcggacctcttccataccattgaagcgcgccgttacatcctgatgacgggcctgttcatcatcgcgctgggcgcgggaggcatcaagccctgcgtctccgccttcatgggggaccagattccgaacaaatccccgcagttgatgaccaaggccttcaatgccttttactgggctatcaacctgggctccttcttctccttcctggtcattccggccatggaacagcattacgggtacagttgggcgtttgccgttccgggcattttcatgggcatcgccaccttcgtcttctggctgggccgcaagaagtaccacagaacgccgcctgaacgcaacaacggccgcgccggcttctggaaagtgctcttcatcgtcctgttccacggaggttggaagaatgcggagcaacgctgcggagcttccgccgtggaggacgcccggcacatcctgaaaatcctctccatctttgtcttcatcattcccttctggtccatctttgagcagacggcctcctcctgggtggcccagggcagcaggatgattcccctttccatcccgctcccgggcggcggagactggtccatcgggccggcgcaaatccaggcggccaatcccattttcgtgatggtgttcattccactgatcaccgtattcgtctatccgaaggtggtgacgctggcgcggcccctggtgcgccttggaacggggctggccctgagctccgtgacgttcctgattgtcgctttcctgcaatacaggttggagggaggcgcctccatgtccatcgcgtggcaattgatcccctactgcgtgctcaccatttccgagatcctgctcagcaccaccggcctcgaattcgcctacacgcaggctccgctgcatttgaaaagcgtcatcaccagcttctggaacctcaccatctttgcaggcaacatgctggtggccgccatcacctttttcctgtccaacggagaatccgccaacgccatctccacggaccgcttcatcctgtacgccatactcgccgccgtggtggcggtggcctattccttccgggcgcgcaggtacggaaagacggagtagaggaagcatccccgacgcgcgggaatgacgttttttccggctccggagaacagcagacataataatgtcttgaaaaagacagccggaccgtgcgaaattccggcacggcccgcacatcctgtccgcgggcatactttcgggaaagtattggaaatacaaattacagagaagatatgaggcgaacggggatttacccctgttccccgccgcaccggaaaagttgcttctgaaacaatcttatcggcagcgcatttccagtccggcacaagacgatatatctttgcttcatgtttaatacttcatttaagtcggcttcggccttgtaaacaaccggtactttccgtagcggttgtccccttttgtttgctcccggatgatcccttccgggaggaagttccgtattattggaatttcaacgttaatctatctgccacgatgacggcgccgctgtgccgtgccctcatggcatacaacatttactaaattaatgagtaataaaaacaaaacaattcacgaattcgatttcaatttcatctgcgaatatttctcgcgcctggaacggcagggccccggcagcccggaggctaccctcaaggccctcggcttcattgacactctgaccggacagtcccgcatcgccgacctcggctgcggcacgggcggacagaccagaacgcttgccgcacatgttcagggaagcgttacggggcttgacctgttcccggatttcatccgcatcttcaaccgccaggcaacgcagtcaggcttgcaggacagggtagaaggcatcgtcggttccatggacaagctcccttttgcagaagaagaactggacctgatctggtcggaaggggccatttacaacatcggctttgaacgggggctgaacgaatggcgcaagttcctgaaaccgggaggctacctggccgtttccgaaagctcgtggtttaccgcggaacgtccggaagagattcaccgcttctggatggacatgtatccggagatagacaccatacccaataagatggcccagatacagaggaccgggtacgttcctgtcgcttccttcattctgccggaaaactgctggacggagcattattacgccccgcaggttcccgtgcaggaaatgttccttcatcaatatccgggaaatgaagctgccgcggaattagtcgcatccctgcgccatgaagaggaattataccgcaggtacaaggaattctacggctacgtgttttacatcgcaaaaaagacggaacaatgattcatttaaatgcttacggctggaatgagaagttaagccggctcaaacgggaatctacgtacagcgccctgccccatggccgcatcgccatcgtgcacaggacgtgttacgagatcgtggcggagaacggagtgttccagtgcgaattaaggggaaacatgatgtatgaaaaaccagcctttgaactgccctgcacgggcgactgggtgattttccagccttttgatgaaacgaaagggctcatcgtcgatgtgctgccccatgaacggaccctgtaccgcaagaaaagcggaacggtttccgacaggcaggccatcgcctcctacgtggacaaggcattcattgtccagagcctggatgataatttcaatatccgcagagccgagcgtttcatggttcagatattggaagagggaatcaaacccgtactggtgctgaacaaggccgatctagggtttgacaggcagggcattgaagaacggattgaacatctggggcgccggatgcctgtattttttacaagcattcatgaaccccagtcgattctacggctgcgggagtccattccggaaggggaaacagtggtgcttgtcggttcctcaggcgtcgggaaaagttccctggtgaatgcgctgtgcggaaaaccggtcctgtccacttcccatataagctcctccacgggcaaaggacggcacacgtccacccgccgggaaatggtattgatggacggttcgggcgttttaatagacactccgggcgtccgggaattcggcctggcgatcggccagcccggttcccttgcagaagcgctggatatttccgacttcgcggcggcatgccgtttcaaggattgcgggcatatccatgagcccggatgcgccgtcctggaagcagtgaacaccggcctgctggaccgcgaggtttatgaaagctacctgaagctccggcgggaagcggaatacttttccgcttcggaacatgataagcgcaaaaagggaaaatccctttccaagctcgtagaggaagtgaagaagcggaattccaaattctaacctgcgttgaaacggtgcgggcattcctgaaacgggaatgcccgcattcttgttttacccgctataacggcctattccgtattccagttaaaccgtggccgcgctcctattccctgatgtcaatgtccagatgagcgagcagcccttccagcccatgccgggaaaagaccgcctttttcagcttgcacatggcgggattgatcgaaaagttgaaagaggttgaaaaatcagccttttccaaattggttccgacgaaagaggcccgttccaggtcacagcggtcaaaaacggattccgccatgtccgcgtcattaaagtatccctcatacatcttgcagccgcggaaaacggttttccgcaacctggcttctacaaagctggcataatcaagatgagagttttcaaagaccaggccgtccgaaaacctgtcgatgtccgtaaagtctgcgccagtcatcttgcagtcggcaaaggcaacatcccggagggctcccttgaagctggccagcgtgaaattgcacgtcctgaactcgcacttctcaaaatcggtattccggatgaccagctttgaaaaatcacacgcgacgaatacgcaatcatagtattcatcatccagctccatttcatggaaatccactttctcaaaggtctcgttttcagtcatatcatgttgatgggagttgccgctccgtgtttgcttcaatgttccggaatcaccgttttccgggaagcagaacgcaggagaaaactttccttccatacccgccgaattattctactttccttccctgccttttagcatgaaagctggctgtctgcaagccgtcccgcctccgcgcatgaatgcaggtccggctgacgccggcggaaaaaggtaaaaccattccggatgctccctgccggcgccaaaacacgcgttgcccctctccatttgctatctacctgttcccatccgtatagttccaaacgagccaccgctacaccccgaatcctgaatacggcgccctttttcaacatggtttaggcgccttttaaaaaccggatgcctcctcccgccaagccagcctttccggaattttcctccagccgtatatcttcattcaccggctccatgaaccccggtaatcaagatgacacggaaccaaaatatactcgccttctcctcagcccattacgcaggctacgtcatgtgtaccgttcccaatacctatcgggaggagatggaccggcagacgtcccacccctcctgcggcttttacgcagcctcctatgtcctcaattgcttcaatcctgatgccgcatggacgaatatggagcttttaaaattggccgttcaatatcccctcaccaatcgtgcagagggctgtttaagcgaggtaggggaagttttccatccccacgattttgcccgtttcatccatgcgagagccaacggaagctgctccgccgcctgccagttatttcatgaacaaaccatccggaacaccattgatcagggagggtatgccctcgttccttttcaagttatcaatgataagcaaaacgaaaaacacggtttcccccggactggcgtccagtggacggaccttccgcatgcacattggtgcgttattgccggatatgcaacaacggataactccaaactgctcgccaagcactggggagaaaaccggttatttgatatagatgagctcggtaacagcaatcaagggtgttatcccctccagcaaaccaataacatcacagcacagcgcgcctccaaagtgcagttgctgcagaaccaaatcatcaccatcctgcccgcacaagcttcgccacgccgccggagaggctgcgcctgctgacctgcaaggcatcttcatcggtctcccgctctaaaaaagccagcccatggaaacggattttccgtccagtgaagcagggaggcacgcaggcccggatagagagaccgtttcatgaggaaggagccctgggaaacggtcccggtttaaaaaaatgccacggagcctgccttcgtgaacagcgttctggattccagacaggttgccgaagtccatttccggaaacctccctcccttttttaaggatgtgaatgaagctcaggagatacggcagtcgttgagcagctcgtccatgtagaaggtcatttccgccagggcctcacggtattccgtctgggggaggagccacaggatttcacgggcggcctcgtttttctccagagccacctggatcgacttgtccagggcctccgcaaaaacggggttgtcctgaaaggcggagtaatccaccacttcacggttttcaatggcgtccctgagcgtggcttccacgttcctgtccccgcattccagcaggttgaagatggggagggtcagcttgcccttggtggcgtccgtgtggagcgttttgccggcatcgtcttcatcgcccaccatgtccaggcagtcgtcgtagatctggtaggccacccccagcaggtctcccagctggtaaagggattcctccacttccggggccactccggagatccacgccgcgccgcccgtagcggcggagaacagggaggcggtttttttccggatgatttcaaagtattcctcgcgggtcatgctcaggtcatacaggcggctggactgggccacttccccctggcatacgtcccggacggtgttcgccagcctgcggcagaattccgtgctgccgaattccgtgcccagcaccatggcatgggaaaaaagaacgtcccccaggagcacggccaggctgttgccccacagggcgttcgcagtagcttcatcacggcgcttgtcggcctcgtcaatcacgtcatcatgcacgagggaggccagatgcaccatttccagcagggctcccagccggatgtgggcttccttgatgccgcccgtggcgccggctaccagcagaaccagggccggccggagcattttccccttggactggcacactgtttccatgtagtcggtgacttccgggtcaaaacaggatgcctgggcttccacaaactcagaaacttgcttcaattccggcttgaccagttgaagatagtgcttctgggatcgtaatttcgaaaagaacgggatggacatgatatggacgagggccggcgctggtcagcgccgcaggaattgtggcatatttgaagttctctagcaatgtatttcacaggccatctttgcatggccgggcggcaatgagccaaacccgcgctgccggacgccgggaaccctgcggagataaggctcactttgaccttgagccgggatgttttccttctacactggcctatcatgagagccttggtctatgattgcagcgcgggcatcagcggagacatgaacctggccgccctgattgatttgggcgtggacagggaaagcctggaacgggagctgtccaaattgcacgtgcacggggaatggaaactggaatgccgccgtgcgcagcagtccggcatccagggaacgcggattgacgtactgacggtggaagaaggccattccggccacggccatgcacaccatcaccggaccatggcggatatccgcaggcttattggggcaagcggcctttcagacgccgtgaagcggacggccctttccattttctccctgctggcggaggcggaggcccaggtgcacggcaccacgccggaggaagtccatttccatgaagtgggagcggtggactccatcattgacatcacgggggccgccatctgcctggagctgctccgggcggacgccgtcttcaccggaccggtggaactgggctcaggcaccgtgacctgccagcacggaacgatgcccgttccggccccggctacggccctgctggcgagccgcttccagtccaccctgaacggaaccacccatgaggccaccactcccaccggagcagcttatattgccgccctggcgcggcccgtcccggccccgctggcgggccgcatcaccggaaccggctacggcatcggccaccgccaggggctccccctgcctaatatcctccgggtgatgctggtggaaacggaggaacaggagagttccccggaattgctgacggagctgtgcgccaatatagacgacatgacgccggaacagaccgcctacctggcggaaaagctgatggaggccggcgcgctggacgcctggcaggagtccatctgcatgaagaaggggcgcctggcggtcaaggtctgcgccctgtgcctgccggaacaggcggaccgcgtgagggaagcgtttttcctgcacagcagcacgccggggatacgccagcatgatacgtgccgccacatcctgcgccgggagagcgcctccgtatgcactccccacggaacggtgcatgtaaaaacctctttcatgaacggacgcccccatcaccggaaggcggaatttgaagattgcagaaccctggcggaaaacaccggactgccgctggaacagtgccagttgatggggcttttccccaccccctcccatgactcctcctccacagactccgtttgaacggctgcgcgccgtcctgctccccagggagcgcatcgccatcgccctgtccggcgggctggacagcagcgtgctgctggctgccgccgccaaggttctggggccggaacactgcctggccctgaccgcgcaaacgccctatgtaatggaggaggaattgcgggacagcgcggagctgtgccgccgcctgggcatccgccaggagacactggcgttccccatcctgccttcccttgcggataatccgccactgcgctgctacctgtgcaagcatgccctgttttccgccctggctgccagagccgcggaagcgggcttccccctgctggcggacggctccaacacggatgacctgggcgactaccgccccgggcgcaaagccttgcaggaactcggcattctgagcccctttctggaagccgccatggacaaggcggacatccgcagcgtggcccgcggacttggcctgccggagtccgtcagcggcaagccggcctatgcctgcctgctgacccggctggagcacaaccgccccgtgacggaatccctgctgcggcgcgtggatgcggcggaggccttcctgcgctccctggggctgaaaggctgccgcgtccgggttcacggggacgacctggcccgcattgaactgccggaggaggaacgcggactgttccggagcggggagcttgccgctcccgtagcgcaccgcctgcgggagctgggcttccgctacatcaccctggacttggaagggtattccagaggcagcatgaacgaaccatcatgaatgacattaccgccatcctgcatcagcttgaggaaggccgcctttccacggaggaagcggcggaaaaaatccgggccgccactgcgcccgcgtcttcccatacggatattgattacggccgcctggagcgcaccggatgcccggaagtgatttacggcgcaggaaaaaccccggaccagattgaagagatagcccgcggcctgcttgccgccggacagaacgtgctggccacgcgcctgaacgtggaggcgctggactacctgaaccgcgcctttccggaggcggacatgcgcccggaagcgcgcctcatgcgcatcatggcgaaccccgttccgcagacggagggcttcgtcggcatcgtcagcgcgggcacctcggaccagtccgtagcggaggaagccgccctgacggcggaattcctgggcagccgggtgctccggtaccgggattgcggcgtggcgggcctgcaccgcctggtttcccatctggattccatccgccgggccaccgtgctggtggctgtggcaggcatggaaggagcgcttcccagcgtgctggccgggctggtaaaagcccccgtgatcgccgtacccaccagcgtgggctacggagccaatttccgcggagtaaccacgctgctcgccatgatgaactcctgcgccaacggcgtctccgtcgtcaatatagacaacggcttcggggccggattcaacgcccatctggtcaacagcctggcgtcccggccccgctgaatgccgcccttccatgacggaaccgccggcatccgccatggacagattcaccgaatgggcgttaaatgtcccggaagcattcctcaccatcccatcatgaccagatttccctttttccatgccctttcctgctccctgctggccctggcctcccaggcgctggggtggcagccctccggagaatccgtccccgccgccccgcaggaattccgcgcggcgtggatttccaccgtccataacattgactggccctcccgttccggcctttccggcgctgcccagcgtgcggagctgctgacgatcctgaatacctgcgctcagttgaagctgaatgccgtctttctccaggtgcgcccgaacgcggacgccctgtaccagtcctccctggagccatggagccagtggctctccgggcccggcgtcaatccggggtatgaccccctggccttcgccattcaggaggcccaccgccgcggcattgaactgcacgcctggttcaaccccttccgggcaaaggcgaacgtaaagcacgccgtgggccgcaaccatatttccctcacccgtccggacctgatgaagcgcaacggctccgttctgctgatgaatcccagcgcctccgcctcccgtgaccacgcgatgagggttatcctggacgtcgtgcgccgctacgatattgacggcgtgcacctggacgactatttctacccctaccccacgcccggccgcacctggtcccccgccagcttcagcgacggaaagtcgccctcccagcgccgggcctgcattgacgacttcgtgcatgacatgtacaagtccgtcaaatcctccaaaccctgggtgcgcgtgggcatcagcccgttcggcatctggcgtccgggcgttcccggcggcatcgaagcgggagtggacgcttacgagcacctggcctgcgacgcccgcaagtggctttcccgcggatgggtggattacctggccccgcagctttactggcgctgcagcccggccaagcagagctttccggtcctgatgcagtggtgggccgcccagaacaccagccgcccggtgtggccgggcatcgccacggcgcgcatcatgagcagcgaggatccggggcgccccgcctctgaaatcgcggcgcaggtcaattattcccgttccctggccagaaccgcccccgggcagtgtttctggagcgtcaaatccatcatgaggaatgccggaggcatccagaaatacctgaacaggctgtatccctccatggccgtccctcccgccatgccctggtgcggaaccggaacgccgggcctgccgcagaatttttacgtggcggacaacggttccaccgtaaccctttcctggcagccgtccggcaatccctcccggaaatgggccgtccaggcgcgctacggcagccagtgggccacgcgcatccttctgccgggcagccagacccgcgtgacgctgcccaaatccttccttggggatgccgggtccgtcgccgtcaggggcgtcagcgcctacggagcccagggccccgccgcggcggccagaaggtaggaagctttttccggcagcctccggcgggaaaggaaaaaaatgcccgatgttctaagttttttgaacaactccaaatccatccatgtccaaacttccatgaattcccgtggcgcggacatgaacagaaggcgtttcatcgccctttcctcattggcggcgctgggaacaatcagccaggcccgggcaacagggccgtctatacaaccacagcacaagatgactaaaaagcaagatccctccacggtcggctatgccgacggcaagtacgtgttaccgccccttccgtacgcctacgacgcgcttgaacccatgctggatgaaaaaaccgtgcgcatccaccacgacaagcaccatgcggcctatgtcgccggcgccaacgccgcggctgaaaagctccgtgaaatcgcggacggcaagctggacgcctccgccaccaccaactgggtgcgcaacctgtccttcaatgtttccggccacgtcctccacaccatttactggaccaacatgacgcccgatcccaagaaggaaccgcagggccccctggtggacgccatcaaggaaaaattcggttccctggaagccatgatgaaggaattcaaggctgcctcccagggcgtggaaggttccggctggggcattctgggagtggaccccatgagcaagacgctggtgatctgcggcgcggaaaagcaccagaacctggaaattcccggtctcgtccccatcctcgtctgcgacgtatgggaacacgcctattacctgaagcaccagaacctccgggcggattatattgaagatttctgccgcctcatcaactgggacgacgtggaacgccgctaccaggaagccatggcgtcctgaccggttccggcagacattgatttttctttttcttcaacggcacgggccttctgcggtccgtgccgttttttggcgtacttccacccggctcttgcatccggcggagcaatagggcatactgccgtggactaattatctatcaccacgcgcatgaaaaaagttttcgtttcaggctgctatgacatcgtccacgccggtcacatccagttttttgaagaagcccgggccctgggcgactatctgatcgtctcctttgcctcggaacccgtgctgtggcaccacaagcagcgcaaaccgtccatcccggacgaacacaagaaagtgctgctggaaagtctgcgcatggtggacaaggtcattctgggcaccggcatgaagaagggcctggactttgaagaggaatttcttcaggaaaggcccgatgtcctggccgtgacggaggacgacctttacagcggcatcaagaaggagctgtgctcccgtgtgggcgcgagttatgtggtgcttcccaagacgcctcccaaattcgcccccgtttccaccaccatgctggtgaaccggatcaaggccccgtccaccgtgccgctccgcgtggactttgccggaggatggctggacgttccccgctacgccagaaaaggctcctatgtggtcaactgcgccatcacccccatggtgtccctctgcgaatggccgtatgaaaagcggtccgggctgggcggcagcggcgcgtgggccatgctggaaggacgcgacccggtcgcttccgaactcgctctgggcgtcggctggcaggaccccgccgtcattgcggaaacggggctgtgcgtctggcgttccggcagttcccccgtgctggacgtcaagggcacgggcgacttcctggaaggaagaatggccattctgtacacgggggaggaacacgacactcccagaatggcggacgaacagcgcgattacgtgcgcatctcccaatcctccctcattgcccgcaccggagtgctggaacgcaacatcaataccctggccgcaggcgtggccctgtactacagcgttcagctcgacgaaggaatgcagcccctgccggacatcccgaacgcccttgccaaaaaatacctgggcgggggctacggagggtacgccctgtatctcttcccctgccgggacgaccgcgaccaggccgtcaaggacaatccggccatgaagcgcgtggaaccgtactgccgccaactgttcaagtaagcccttctctttcatgtccctgatgcggaatagcctggtagcctccggcgccatctttgcctgccgcctgacaggcatggccagggaaatcgtgtacacttccctgttcggcgctacgggagtgctggatgccttttatacggccttccgaatccccaacctgttgagggacctgtttgcggaaggggctctctcccagtcctacaccagcgtagcctccaaaacacgggaggcggaaggcgacgcggccgcctgggagctgaccaacaaggtagccacccagctttccacgctgatggtcgccatcgtgacgctgggaattctttttgccggccccgtcatggaggccctgtacagcggggaccattccctgacggaccagttgttcgccacggacctgagccgcatcatgtggcctttcatcggcttcgcctccctgtccgccctcgtcatgggggccctgaacatggtggggatcttcgggctgcccatgctggcctccgccgccttcaacgtcacctccatcctgttcggcctgctgatcgggtacttcattgaccccactttcggccccagggctttgtacggctttgcctgcggcgtcacgatcggaggggcggcccagattgccgtgcagctccccaagctgcgcaaaaccggcttccggtggaagcccaacttccattgggacgatccccgcgtgcgcaaaatctgggggctgatgctcccctccgtgctggcttccggcgtcacgcagttcaccatcttcatcaatacgggcttcgccctggacctccagaaaggctccgtcaccgccctgaccacggcgttccgcctctggcagcttcccgtgggcctcttcggcgtggctacgggcatggtggtcctccccgcggtttcccgcatgatggtgggagacggcaggaaggaagtagccgtccacattgccaaagggctgcggctggtggcgttttttgcggtgcccgcgttcctgatccttttcatcctgggaacggaattcgtctcctccgtgtaccagtggggccgcttcaaccaggaggcggtgcgctataccggggaggtgctgggcgcctattccctgggcctgctgggctacgccgggaccaaggtggtgcagcccgtcttcctggccctggaaaaacgctgggtccccctgatcgccgccgccgtggcgctggccatcagcatcggcctcaactactacttcgtctacgggctgcataaaaatgcggcgtggctggcgctgaccacctccgtggtcaccaccttcaacttcctcttctacttcctttacctgcgccgccagctgggcggcgtggacggacggacgctgttctccggcctgggccgcattctggcggcgggagtcctgctgggagccgtgtgctgggcgggtaaaacgtggttcctccaggacttcctgaactggtccttcccggccaggctcctgggcatctccctggtctgcggctgcgccgggatcgtttacctggcggcggccttcctgttcaagacgccggaactggacgcggtacgggccaaattcatgaaacgctgacagtgaaatttcccttccgcgaggggaggcgcgcgctccgcaagaaaaagaatggcctccacaagcattctccttgccaggggtgcgctcagtgagtaaagtttttccgcctgtgcggggaatagcctgttttccgccagggcatcaaaattctacgatcgcaccacaacaatggacatgatttcccccagcattgctgcattgaccccttccctgaccctcaaggtgaccaaccgggccaaggctatgaaggccgccggtgaagaagtttacggtttggcaggcggtgagccggaaatggacacccctgacaacatcaagcaggcagccattacggccctgaacaacggagcaaccaagtacactccttccgccgggttgcccgcactccgccaggccattgccgacaagctcaagagggaaaacaacctggaatatgatcccagccagatcaccgtgggcgccggcgccaagcacgcctgcttcaacgccatcatggcgaccgtctccgagggggacgaagtcatcatcccctccccgtactgggtcagctatccggaaatggtccgcatgtgcggcggcattcccgtcattgtggaaaccacgccggaaaacggctggaagctcactgcggaacagtttgaggaagccatgaccccccgcaccaagatggtgatcctcaccacgccgaacaacccgaccggagccgtttattcagaagaagaactgcgcgccctgggagaagtggccctgagcgaagacatcctcatcctggccgatgaaatctacgaacacctcgtgtacggagacaccaggcacgtcagcatcgcctccctcagcccggaactgtacgacctgaccatcaccatcaacggcttctccaagggctacgccatgaccggctggcgcatgggctactccgccgctccggcccccattgccaaggccatccagatgattcaggaccacaccacctccaacgtctgcaccttcgcgcagtacggcggcattgaggccctcacgggggaccagagcttcatcagcgacatgcgcgacgaatacgacatgcgccgccagtacgtcctgtcccgcctcaacgccatcccgaacgtcagcgtcgtggaaccgcagggagccttctacttcttcgtagacaccagcaagctgggcctcacctccctgaacctgtgtgacaagcttctggaacgctacaaggtggcggccgttcccggcatcgccttcggcaatgacaaggccatccgcatcagctactgcaccacgctggacattctgaaggaagcgctggaccgctttgaagaattctgcaaggcgcactaagcgtcgaatactgatttttccaatcttcagggccgcttcattcatgaagcggtccttttttattcctcatgggaagactttccacccatccatcagaaatcaaaacctggagacgcctgccgctctcggcaggcacgtgggaaaagccaccgattttttatggtcaccttgtttcctggaacggattgtcctctccaggatcaatgcacaagccggaaagcctttccgggaggaccggcagaaacaaaacacccggcaagagagaacctgccgggtggagaaagaggatgaattccttcgtgcctaaaagctccgcgtataccccaaattgatcgtccagggacgatcatatttgtctccgtagacatattcgtagtccaggtgcacctgatcgcgggcgctgagctgccatgccgcgccgcagccaaccatgccgcgggttccatccgtattcggacgccactggttgccggcggcctttacttcagcgccattgcttgcctgctgcgtaacaccggttttcacgtaaccctgcaccagctgcctgcctccgttgacgctccatgtgcgtcccgctcgcaggcgtccggcaaattgccagatgtcggctgcgcttcccgccacttccaggccctggttcgtgacgatatgcgtggaaccggaatgaagccatgcgatttgcacggagggttccaggaaccatcctccggagctgctccactgccgcccggcttccatgctcattcccaatccccagttgtcatagctgccccgttccgtgcccccgggctggaccgcggtccatgcggcattgtagctcattcccttgagaaccgcgtccgcaaaccaccccctgctgtgcagccatgaggcgtaaaggcctccgtagccgctgtccgtgctgcccttgcttccccagccgtcatggaagcggcggtcactccggcgatatcctccgaagaggccggcagccagcatgctgtttctcccggatgcaacaatccagtccgcgccgctgtctgccccatactggtattccgtaaagccgcatactccggcgatgcccaggtccgtgtccgtgcgtccggaagccgtgcgcgcccagtagtgccccctgggcgcctctccggcgttcctggcctgttggtcctgctgcctgtaaaagtccgctcccatgcgcagctctcccatgcgtttggagagggtgtcaagctgttcaaaccatcccgtactcatgcagccaagcacattgagcagtacgccgcccaggttgttgtagccctccggcgacaggtcgtatccattgcctgcggcgttgagtttaaggccgtaggagtaaaaacccgcatcaagcgttccggtaaagagcgttgccgcattactgtcttccgccagactgtcccatgtaatcatgtcgtgtatgaaggacggagaggagggaatgccgccttgcaggatgaaatgaaccgtgtgcgtgccggaagcctccccggcgatggcgatgcggtcgcttgttccggcggccaggttgatgttcatggtaaaggcctgcgatccggagagggagccgagcttcaatgtgtcacggccgcttccttcaaaggcgacatgccctccgtcgccctccaggcctcccgaaagctggaagtcctgccctgtgcccgttgtattggccaatagaagcgttccggtgttggcaagcgccgattccacctgcgcgctggtgaagacatacatggcgtccgtgttggagaatgcctggtcacccttgagcaagccttgcagaataaatcctttgctgttggtttgtacggtggcggccgtgtcgaatgttgcaccttccttgacctccaggattccggcgctgaagaggttgtccgctccggcagtgaccaggccggagttgatgagggttccccccgtatggctcgcagcggaggtgatggtgatgccggccgcgtcgctgttcagctgcagcgcgccgccgcctgtaatccgggcgatgagcgtccggtcgctgtccggatcggccggagcgtccagaacccaggttttcccatcatggatgtttaattccttgagtccgtaagtgaggtggatacctgtctggccgctgtgctcattggtgccggctacggcaatatagctgtaggtcgcggtaacggtatcctgataggtaacttcgcgttcctcgccgccggtgatgacctcgcccgtatcagcgtccaccaagtccagaatagttgtattcgcgacgtttccggcttgtaccaccagcagggcgtccgcgttgatggtgccgtccagagccagttcctgaagatcgcggtccaggaagcccggctggggagatatgttgtccagactgtctttcagaccggagacggccagcgtggatgccgacgtgatgtcaagactgccggagacggagagctggtgttccagccgggaagcgtcaccgtccacctggacggtaagcgttcctccggccagatgcagcttgctgatggaaaaattttccgtgacggagagttcggagccgcttccgagccacagggttgcggtgccgagcacggtttgtcctgtggcgtccggacggagccgggtatcggtcagggcgatggttccggcaaatccggtcagcgaatccgggagggtgacggagcctgcggactggatgtccagtgtgccggaacctgtgatgtacgcgcctgtgccggtccgaatctgttccatgtcgttaatcaggatgctgccttcgttgagcgcaattccgttcgtgaacagattggttccggtattcctcaggtcaaggactccctgtccggttttgagcattgcgtcggaagctgtgacgtttccgttcagcaggagcgtgccttcggtgtctaccgtgccgttgagaacgatcgaggcagcattgatctcgctgatggcgcctttgcttcgaagagtggctccggcattaagcgtaaaggaggttcccgtgtccgtcatgctccccgtgcggccgaaaacgaccccgtccctgagttccagcgtacctccgtatacagtggtttttccccggaagttgttgtaacggctggcaaccagatgggcgtccgtaccctgatagcgtgttccgctgaagacgaccgtgccggaggtgtcgtgatcagtcccattgtcatccgtataccggttgatcgcgagcgttattgcgtagtccgttcctgaggtgatcgggtcgtcaaactggatgttccgtccttctccggccgccaactgcaaagagcctaacctttcaacatggatggcgttggctgttcccccgtctacggtaaacgttccgttatcgttgcgcgtgaaggttccccctgtcatattgccgctgaaaagaacgtcgtgggtctgcgccaggaattgctgggtggcgttggtgccgaaattgttgatcaggatggccccccctgccgtgggcgcgtaattgttcgtgaaattcgccccgtcctgaatggtcagctgctgattcttcaggtaaatcgctccgccgctgccggaagacgcctgaatgtaatttccgatgaaggaaacgttggctcccagagtgcaggccccccctgaagacatccagatggcacctccgtcaccggatgatgcggagatgtagttgcccgtaaagcttgcacccgccccaacggtgagggacgcaggccctccatttgcccgcaccgcaaccgccccgccggctccttttccctttccggcggccaagatgtaattcccggtgaagacggctctgtctcccagcgtgacggaggcgtctccgatcgtgatgtaggtgctgatcgctccgccttcactgactgctccgtctgccgaggtggaaatatggttgccgctgaaagtcgcgcggtctcccagggtaatggaggtggcgtttctatcggcgcctatcgctcctccgtagctggacttgccggcctggacatagttgtcggtaaacgtggcgtcatcgcctatttcaatggaggaagaaccgcccttggtaaacattgcgccgcccccgccgcctgctttgtctgacgccaaaacatagttggcatggaaaacggcgccgttgcccagagtgatccgggcatcgttggagaacgccagaactgcgcctcctctaacctctccgcttgcggaagatgcgtaatttccggtgaaaacggcattgtcatccagcgagactaaggcgagactttgaccctgaatggcaatcgcgccgccgcccggagcggtggaatcatcatagattcccgtattgttgcggaacgtgaccgctccggtaagattcagagtggcattgctgccaaatccctccacacgcagaacccggttgcccgcattctcccagatgatggaattcatgtcagcgccatggtctcctttcttcaagaaaaacatgggagttgttcccagcccagccagatccagcgtgcgcgctgccgccgtgttgtcggactgaacgttaatgagaagattcaggcctcctgtcagtgtggagtcgtcgttatgcaggaccaccgtgtcgttggcacgcagcaaaccggacgctctcaattcttccaatgtgccgtacaggttgctgtccggcatggcggactgggtgttgttcaccgtgtagtccgcaccggatgcggccgggaaggtgcagatgaacaggccggcaagcacgtagcggagcaaagaggaaggaagatgcaatctcatggtattgaatggatttggaaacgaattagtctatttggagaaattttcagaagttatacgcttgaaaggctatattaggctatgactggggaatcggctgccgcacgcggcgaggaagtagtcatggaggatgaatattcttcaggaaggggaactgcatgcgcagcaaaacaggataagtttagcaggagataaaatcgtgacgctgaatggttcatggatataaatgtcatgttttccagtagggaatgaatgcaaattagcggatttccaatccggagacagggcccatgcgccaacagcctgaaaggaggctccatccctggaacgggaaataatatcaatgcaactaacctataacattttgacgacaagctttttggttccttgaaaaatcctgatggcaacaggaagaatagaaaaattcccatctgtttctttcccggatgcacgtcttccgtccattcaaattttctgtctatggtccaaataattttgtattaaatgctttttttcaaatttatagcttgtctccggattggaaatccgattttgatacaaataattgattgtgagattcatagaaatcgcttcaacactgaggcagaaagaaacaatgaaaatgaaagcaaaagggaaaaaaggacttacagcgcaaacccggcggccgcgccatagccccaagcgtaaaatcaacgaagaactcatcaaactggttatggagctccgaaaggttcgcaacattggaatccggctgctcaatgtgaacttcttttgaagcagcggaagaaaagtcattccccattcagcctattcagacagaccgttctttgcagaaccggagcttccccggctcaaaaaactgatggattgaaggacaaattatcccgttctaccagaatgcagacaagatacggaaagaagccggacgtgctgaaggaagcgttggaccgcttcgaagaattctgcaaggcgccctaatcgccgactcagctacttctcactttccagggaccgcctcattcatggagcggtcctttttattgaggagtgaaaagacaattccacctctatgaacttcaaacacagtatctaacatattgttggcttcattgacatttgaatgcataaaaggctatcataagtaccgtttccgttaatcctgcatctgcatgaactctccctctttcagcgctctctcttccggcctcctgctgtattccctggctgcactgccccatgcagaagatgttccaactacggacgaccgctccctctacatcgaatcggaaacggaagttgcctcccctcaatgcctcctggacaagggagaccaggatgaggacaaaaaacgcacggaggtgggtatcggggaagtggtcatcttgactttaaacggaaagcgattacggggggtggacctggactctcttgaatggtccctggagccggagaaggcggccgccattgaaaaatcggaccaggaaaaaaatcaggctacactgacaatcaatagcgacctcactcaggacaccacgctgaaggttcgggtcaaaaccagccttgacgacgaattgccggaaagggaccccttcattttcagcattctcgttccttccggcattaaggcggaacattccgggaaacgagtggaaaagcacccccaggacaaggagaaagacagaccgggagcttcctccaagcttgtcatgacctttcatcccctggctgtcagcttcagcaacatttccatcatggaacgggcggaagacccggaaggattcacccccgtgcatatcccgggaaagctgcggataaggcccaacgctctcaacattcaccgtcatgacaacatcggctggagatgggacaaggagcaggagattcgcttaaggcatttgcagaatatgatgcttcccgattccttttcatggacctgcggatggtacgtacgcgccgacggcaaggactgctgcaagattggcaatgacacgtacggccaggatttcagttttgagtacgaagatgaaagggaaaccaataaagactcccccaccaggggcttgaaaaatatcaaggtaagcatcaccaaattcggatgcaccgtcacgcgtagcacagcagacgacgccctgcatgccgactctaccgccaatccataacctcctgtttttagcatcatgaataaatcttatccattccttctgttattcgtctttttctcgctgtcttttccctgtgcagcctctccggagcagggccggctccccctcccctccgctatcaggaatctgaacaaacagaacccggaactcctgcggctcaaaaaactgctggccagcggccagatcattctgttctaccagggggccaacaaaatgcggaaagaagccagacgctaccggaaaaagggcgttacgcctcaggagctgacggacgggctttttctgtgctacctgattgccacggcaccgttcattgacctcaatgattacaacaatgtcgaatgggtttccgaatatactgatgtggatcacaccgtcaaagaattcatgtccaacaccatcccgttcatcgcgctgacggacaaaaacagcaagctcccgaacaaggaagaagccctgcggttttatttaagcgccactgctctggtaattaaacaattccacaggcaggtggattacgcttttgacgctacggagatttgcgcctgcatgctcattgattacgcctccaacatgtccgacgagcaggaaacgaagctgttcaacaagacaagtgcaataagtgcaagaagcaaccatgctctagccgttatcaaaagaagagaacgcggattcattagggaactgatgtcatgctttccgaccaaggcccaggaggtcaaaaaatacctgcatctggccggatacggagacaaggatattccggctctgctggagaggactgtcggtagggcgccggaagccgcctacctgtacaagggcttgcctaaacgaagggattaagatgcctcttgcgcatgatcccgacgactttccgattctcataccgcaaaaaaacttttcgccttgaggaatttctatcggaataccaaaagcatgagccgctgaaataagttattttccattccacaaggagctcctcattcacagagcggtccttttattcttcgggggaaggctcgccgtccccctgtgacacccggcaccagaatcccccgtccagctccggcatcaaaggcttatagccgtgctgccgcaaaaaagaatcatcatcccgtgaactggtgtggatgatgtccggtatgccctgctcaatgtaatcatactgctccctgaccatttcctccgacgggaagttttgaaggaaccagtatcttccgcacggcttccagtcccaggtaatgccgaagcccctgtccagccagcccagatacaggacggaggcttcggaaaaagaggccagccgttcccggacggcgggggaataaaactccctgccattccagacaaagtctcctttccggacggcgcccgtcagcccggcagccactccggcccccgtgaggcaggcgattgccagcgttgcggccgccatccgcggcatgcacagggaaaagcgccgttccgcccgggccacaaagaagatagtcacccagatcatcatgggtgaaaggatggaattgtaatagtagttgtacacgctgaacatctccaccttgaagaagatatacagcagggccgtaaagaggagcgccttttgcgtttttaattgacgccagcccgctatcgccagagcccagatgacggccacccacatcagtacgtcggacaggcagcggaccggagccggcctgagcagcctggcccaccatgtggtatcctgggacaccgttccataacgcacggagcacaacaggtactcattcatcgcttctttccaaacaccgttggataccagccaggccgaacaggggacaaccacggccaggaagccggctagcgccacccctaaagccaccgccgcttcttttctccgcccgttccaccacagccacaggcacagaaccccgcctaaagcgcacacgggaaaggctatggagaacttcatcatggaggctgccccggcaaataccccggccgtgccgaacagaaacagcaggctgcgcctgtcccgcatccggaaataccggaccagcccgtaaaccacggccgccatccccggccagcacaattcctccacccctcccccgcgctggaagggaaacgaatcaaacagaaacaggcacaacagcatggaagccagcaggctgccgcgctgtgacagataaaaacgcgccgtcccgcaagccagcagaagcgtcgtaaaaagggttacgcactgaatgaggaatattccggcaaatgaatgcccgtcaatccacgcggcggcataataaatccaaaccagcaggggccccttgctgtccgccatttccacataggggagaagcccgtgaagcagcccccgcccgaacatgaaaaaaatggaagggtccggagatggataaaaggagtacaagggagaggtatccgaacacgctccaatcacgataacggaccagataagaagcgtcagcgggattttccaccccagcatagccatggaatcatttttccctgtcataggttgggtagcaacaagtgggattgtgcggattacaaatccgaacgagataggcaacaatgcgaatgtaagaagaatattcatcatattcaagcatatatgacaatttctaacaaatattgttcttgttaagaatatccggggaaataatgggtagagttggagaaatgcatttgatatgaaaaagtagtattgacttcggatttgtaatccgcaacaggccgtgacacggaaatgtacgccatgcctcgcaaccgggttgccctgtccggaaaggcatgattaaatgaaccttatatgaatacccccgttctcaatgacaacctgcgcgccgccacggaagccctttgcaacctgcttgccaaggaagaccaggttgtggcctccaaggcaaaaatcggcctctttttccagaatccggaggcaaccaagctttttgaagaagtaaacgcctacggagaagaactgcgcaacaagcacctggccggcatgccccccacggaagaggaaatctccaagttcgataccctgcgtgaaaacgtggtcaagaacgatgccgcccgcggcttcctggaagcccgccagaccatcgatgaactcctgaacaccatcaatcattatctgggcatgtccatcgaccttggccgtgcgcccactccggaagaaatcgaggaagcccggcagcgcgccatgagcgcccagacttcctgctcctgtggcggcagctgcgacaaggaaagctgcgattgcgacggcaattgcgaccacgaccacgatcacaaggacgggggctgcggctgcggcaaccactaaaagcgatctttcaacctttcgtcaaacggcttcactcccaggtgaagccgtttttcattgacggcatgcgtcaacgccgcccttccaggacatgtacgtatccagtccggcacaggccctggcctgaaaaccgtcaggggcctcacaagcctttgcggcaaccggaaaaactgagcgccagtgaaccaatatcaaaaattgcggcccatgaccgcatattctctcagatgccgcagaagcctgcggcgttccataaaggctttttcaaaagagggccgcatttgtatgccgcctgcattttccccaccccgctttcttcatcaggacgggcaagacgcttgaacgggagatgggcccatgctagcctcattctaaggaatcatgactttttccaaccgcccagcttccgcttccctgccgtttatcaaaacggatttcccgttgttcctggctccgatggccggagtaacggaccccattttccgcaccatctgcaaggaactgggggttgacgtcatggtgacggagttcgtctctgcggaaggcattctccaagcatgggagagaaaccggaggtacacgaagataaaagacgcgcaccgccccataggcattcagcttttcggcgcggacgggaaccacatgggagaggccgccagaataatcctggaccatgagaaaccggatttcatcgatatcaacttcggctgtccggtccccaaagtggtgggcaaaaatggagggtcctccctgctgaaagaccttcccctgctggcctccgtggccggaggcgtggtgaaagccgtgggcgaccgcatccccgtcacggccaaaatacgcattggctgggatttccagagcctgtgcgccatggacgcgtgccgcctgctggaggatgagggaatttccatgattaccattcacggacgcacccgttcccagcagtattccggcacggccaactgggacatcattgacgaatgcgcacgggccatgtccgtgccggtcatcgggaacggggatatttccaccccgcaggcggtagcgtacgtgaaggaaaacacagccgtcagcggcgtcatgatcggccgggcggccatggagaatccatggattttcggagacgccaaatattatctgctgcacggcgccatgcctccggccagggatccgcaggaaaagacggacctgatcctgcgtcatgcccggatggccctggagtcccgccattacggggacgaactccacaccatgcgccacatgaggtcccgcattctggcttacacgaaggggtttccgggagccaaggaaatgcgctcccgcctggctcgcgtctccagcatggcggagctggaagacctgctttccacccttccccgccggcgctcctgagagcgggaaaaatcccgccctccgggagattccgcaggcccggcaagcggcatgggaggaaggccgtcttccccttccccctccgcacctgaaaaaaaatgcccttttgagggaagctaagttgactttacgcctcgaacctgtcagaaataggggagtatcctgccgtcccgtttcggcagacttccaaccatagactccagagatcgacgtgtactccaacgaatcatatctcatcgaacttcttacgcaggccggctatctgaatgaagagattcttcaatacgcgcgcagtcaaaaatctcccacccaggacctggtcgatttcctgatccaggccaattatcttacagaagacgtcatcgcgcaggtggcggcttccacatccctgctgcccgttgtggacctgggctccatgcacattccccaggaggtgcgcgaactcatcacgccggagctcgccaggcgcttccgggccatccccatttccgacgacggcttttccgtcaacatcgccattgacgacccgctgaatctggaaaccatggacagcctgccccaactgatggggcgcgacgtgattttcagcgtcgccacccacagcgcggtggaaagccgcctgaaagaattttaccgtgacctgaccgttccggcagacgccgccggcctggatggggacgacggagacgcgcccatcatccgcctggtgcagcagatgctgacggacgccttcaagatgcgggcatccgacattcacattgagcccatggaaaaccggctccgcatccgctaccgcgtggacggcaagctggtggaggtggccactcatcccaagaagctgctcagccccatcatcgcgcgcctcaaagtgatgagcaccaccatgagcatcgcggaaaagcgcatgccccaggacggccgaatccagatgaacatcggcggcaagcagattgacctccgtgtgtcttccgtgcccagcaaccatggggaaagcatcgtcatgcgtattctggacaagtcagccctggtgctgggcctcccccagctcgggttcttctcggatgacgaagccgtgttcgaccgcctcatcactcttccggacggcatcatcctggtaacgggccccaccggttccggtaagaccactaccctttacgcgtgcttgaaccacatcaaccgcccggataaaaagatcatcacggtggaagacccagtggaatacgaactttccggcatcaaccaggtgatggtaaaggcggacatcggcatgacctttgccgccgctctgcgcgccatgctccgccaggcccccaacatcatcatgatcggggaaattcgagacatggagacggccagcatcgccatcaacgcctccctgacgggtcacctggtattctccaccctccacaccaatgacgcccccagcgccgtggcccgtctggcggacatcggcatcaaacgcttcctgatcgcctcttccgtccgggccatcatggcccagcgccttgtccgcaagctgtgcgaccgctgcaaggtggacggcgtgctgacggaaaagcaggcgcatacgctgaacattgacatgtcccgtctcactccgggccagatcaaggccccccacggctgcgacttctgccgcggcggcgggttcaagggccggatgggcctgtttgaaattttcgagatcgacgacgaagtgcgacgcatgatcaacgagaacctgacctccccccagctgcgccagcgcgcccgggaactgggcatgagaaccctgagagaggacggcgtgcgcaaggtgctggccggcctcacatctccggaagaagtgctgaacgtcaccatgggagacgccaactgattttcccccgcaattcattctgattattatggacaccaatcttacactggaactttttatcggccggggaatgatcgacaaatccctggcgaaggacatcaaggaggaaatgaccgtctccggcaaggagctgccggaagtgctggcagacttcggcatcatcggcagcaaggacgatatctggcagatgatcgccagcgacctggggacggaattcattacgctggacaacttccagccggacccgaacgtgcagaacatgatgccggccacgctcgtgcgcctgcacggcgccctgcccgtgcggcacggcccggaaggcctgtacgtctgcctggtggaccccctgaatccgcagacggtggaggacctgcgcttcgccctcggccaggacatccacgtcctcatcgctccggattaccagatttccgaacgcatcaacgaactgtacggaggggaatccgccgccatgacggacctgatgcaggagctcaacaacatgcaggtcaacaatgaaacggaagattccgccgccgcgcccgtcatccgctttgtggacctggtcatcacgcaggccattaaggaaaaagcatccgacattcactttgaaccctttgaaaaggaattcaaaatccgctaccgcgtggacggctccctttatgaaatgcagccgccgcccgttcacctgtccgtcccggttatttcccgcgtcaaggtcatggcgaacatgaacatcgcggaacgccgcgttccgcaggacggccgaatcgtcaagcagatagggaaccgggcggtggacatgcgtgtttcctccctgcccacccagtacggtgaatccgtggtgctccgcgtgctggaccgctcttccgtcaacctgaacctggacaacctgggactccccccgcatattcatgaatatattctggatacggtccacaaacccaacggcattttcatcgtcaccggtcccaccggcgccggcaagaccaccacgctgtatgccgccctgcgggaaatcaataccattgattccaaggtgttgacggcggaggaccccgtggaatacgacatcgacggcattatccagatcccgatcaatgaagccattggcctggatttcccgatggtgctccgcgccttcctgcgacaggacccggaccgcattctggtaggggaaatgcgagacatggcgaccgcccagatcgccatccaggcatccctgacgggccacctggtgctctccaccctgcacacgaacgactccgccggcgccattacgcgactggtggacatgggctgcgaacctttcctggtggcagcctccctggaaggggtgctggcccagcgcctggtgcgcaccatctgcccggactgccgcacgccgtatgaaccctcctccaccatcctctcccagcttggcgtgtctccctatgaactgggagacaagcatttcttcacgggccgcggttgcgacaaatgctccaactccggctacaagggccgcaaggggatctacgagcttctggatatcaacgataccctgcgggacatgattacggaccgcgccccttccgtggtgctgaagcagaaggccattgaaatgggcatgtccaccctgcgtgaagacggcctgagaaacatttacgacggcaataccaccattgaagaagtgctgaagtatacttaatggacagccggataccgcacccaccatttcaaccaccaagcagaaaacacttaaaacaccacatatatgcctaaatatcaatatacagcacttgaccataaaggcgaccagaaaacgggtaccctggaggccaattccgaagcggaggccatggaatccatccgggcgcatggcctgtaccccacccagatcgtagaagcgggaaaaggcaagattcagcaaacgcccgccgccaagaagaaggccaagggaggcaagaagcaaaaaggcaggctgggcggcagaatcaaggccaaggccctgatgattttcacccgccagctcgccaccctgattgacgcagggcttcccctgctccagagcttgaacgtgctggccaagcaggaagcgaaccccaacctgcgcgtgaccattgaagccctgggcgattccgtgcagggcggttccaccttctccgaagccctggcccagcatcccaaaatctttgaccgcctgttcgtgaacatggtgaaggccggtgaactcggcggtgtgctggaagtcgtgctgaaccgcctggcggaataccaggaaaaggcgcagaaactgaagagcaaggtgatctccgccatggtgtacccctccatcgtgctgttcattgcggtgggcatcgtgatcttcctgatgctggtcatcgttcccaaattcaaggcgatgttcgcggaacagaaccaggagcttcccgccatttccgaattcgtgttcggcatcagtgactggttcatggccgcgcccttattcgtgcccaacgccgtcattctggccgccgtcgtcgccatcctgtacgctatcttcacggccatgagcaagacgcccaacggccgccgcaagattgactccgccctgctgaccatgccggtcatcggcaacgtgcagagcaagagcgccatcgcccgcttcgcccgtaccttcggcacgctggtgacctccggcgttcccatcctccaggcgcttaccatcaccaaggataccgccggcaacatgatcgtgggagacgccatcggcctcatccatgactccgtgaaggaaggtgaatccgtggtaacgcccatgtcttcctccaagctcttcccgcccatggtgatctccatggtggacgtgggtgaagaaaccggccagcttccggacatgctcctcaagatcgcggacgtgtacgatgatgaagtggacaatgccgtgggggccatgacctccatgctggaacccatcatgatcgtattcctggccgtggtcgtgggcggcatcgtgttcgccatgttcctgcccctactgcaggtcattgaaaaaatgggttaacctccctacgcagaaccagatgaagattcgctccgcatacagccgcctccgggcggcaaagggcttcaccctcatggaaatcctggtggtgatggtcatcatcgtggtgctggccacgctgaccatctccatctacacctggcttgaaaccagaaagaacgagcaggccacggaatccatcgtccgcaagattgaaatggggctggaaagctaccacagcgaccatgaccgctacccctacggtacggaagcccccttcaacaatcacggcgtggccgtggcaaatggtgaggaatacagctccaacgtcgtttacatggccctgttcggggaccacaagaatgaaggcgtgcccggcagggataccaccatttacaatgacgaactgaaccccgccacccagcccaagagcaacccgaccgtccgggaagttcacgtgaaaagcaaggatggaaggccggtcaccctctacattctggcggacccgtggggctccccctaccgctaccgcctgggcagcgagcaggccatccccaccaaatccgccaatgccaagaacctgaaaatgggcaacggcctgaatccggattatgatttctggtccttcggcaaggacggggacagcgatctcaaagacccgcatgcccctgaaaacgaggacgacatcggcaacctgccgaagttctgatccttcctttttctccgcgaacggcccttttttccggcagccttcctccctctccggcggaggaaggccgctctgcgtacagggcactatttgctggcatccggacaggttctggcgtatgatccgggcattgccatgaaacgcatttccctgattgttccctgcctgaatgaagaacaggccattccggcgttcaagcaagaagtagaccgggttttcaaggaacacctggcggcctatgccctggaactcatcttcgtggatgacggttccacggaccataccttggaaatggtcaagaaactggcagagcattccccggaggtgaaattcatctccttttcccgcaacttcgggaaggaagccgccatctatgcggggctggaagccgctacgggagattacgcggccgtcatggacgtggaccttcaggatcctccctccctgcttccggagatggtgaaagccatcgaggaggaaggatacgactgcgcaggcacgcgccgcgtcaccaggcagggggaaccgctgctgcggtcctttttcgcgcgcgccttttacaagacgattcaccggatatcggacacgcacatcgtggacggcgcccgggattacaagctgatgacgcgccccgtgctggaagccctgctttccctgaaggaatacaaccgcttttccaaggggctgtacgaatgggtgggcttccgcaccaaatggtttgaatacgagaacgtggaacgggtagccggagaaaccaagtggtctttcttcaaactgttcctgtattccattgaaggcatcgtggccttttccaccgctcccctggcgctggcttccatcatgggggtgctcctctccttcatttccttcctttccatcattgtcctgacgatccgtgaattgatctggccccattccgcctacggctggacttccatggtgtgcgtcttctgcctgatgggaggcatcgttctgctgtgcctgggcatcctgggccagtacctggccaagacctatacggaagttaaaaagcgccccatttacattgccagggaacgctccatcgatccttccaactagccctccccatggataccgaaccggatttcagcatcgtcacgcccagctataactacgccaggtacgtgcgggagtgcattgaaagcgtcaagaaccaggaaggggccacctttgaacacatcatccaggatgccggctccacggacggaacgctggacatcctgaattcctatccgcacctgaaactccatgtggaaaaggattccggcatgtcggaaggcatcaaccgcggattccgcaaggcacgcggcaagtgggtcatgtggctgaatacggacgaccggctgctgccgggcgctctggctgcggtcaaggcttttgcggattcccggccggatgcggacatcgtgcacggcgcctggaacttcatcggcccggacggagccctccagcggcccatgaaagcccttccctacagcctgaacatgcacatctggtacggaacctacctggcctccaccgcactgttcctgcgccggagcaccacgattgaagaagggtttctgctggacgaacggttccgctacgatatggacggggaatactacgcgcgcctgggccgtgccggaaaaaagtttgtccattacaacaggctgctggcggatttccgctggcacggcgacaacctgagcgcccccaatgtggaacgccgggacatggacgccgaattaaaacgccagaagcagcacagcgaagacgccgccatcaagcgcgtttacggctattccttttccaagcagagctgcaacaacatcttggacggcttcatgcgggaggcctaccgcatgaaaaaggccttcctttacctgaccactccctgggaaaagtaatccgctgctccctctccttccctcctccccggagcctccggcccgtcctcccaatctccggcactcccttcctttccataaaggcgcttcccggtacggcaaaggccgcagccgttttacagccgcggcccgtcacaaaccggatggaaaaaggataaaaccttagttaaggctgtcaaacagctcttcttcccggaagaatctcaccagttccacggcggcggattcccggctgtcggaagcatggcagatgttcatcatgctgtccgttccgtaatcgccgcggatggtgcctttctgcgccttctgggaattggtgggccccagcagttcgcgcacgcgtacaatgacgccgggccccttcagggcgatggcgatgaccggagagctggtcatgaaatcaagcagtttcgggaaaagcggttccccattgacgacaaggtccagaatatgggcgtaatgttcccggagcaccggctcgtcaagctgaatcatctttatgccgcgcaggcgaaacccttcggacaaaaaacgtttcaaaatggtgccggaaaggtttttccgcacgcaatcgggtttcagcaaaatcagcgttgtttcttcttgagtgtttggcataaaattagcgaagtttcaggatgaagtgagggaattacaccctaatccccggcaggtcaaggataattgcgcaactggtcttttccgccgggaaaggaattcgtcacaggcttctcttataggaatcacaccggttccgccatccggcaagccagcgcgcctctccgcgggccggcgggctgttgtccacgcgacgctggagcacccttttggccgcctccgcaaactcaaccgccgcaggctgtccgggagaggccgggcgcatctcctccagcacctgcctgagcccccaaccctgcccccggtattgttccgcggggttggttccctcccccttgaaattcacgtagtcaatcagggcatacatgccgttgggcgccgtcgccacggcattgtagcgggcagccatttccgccggacggcgggactggctcttgatgcgccccagggcagccacggacctggcaataatgaaatccgcctgcatttgcagggccgccgggctggacagccactggcgcatccgttcaggaaggccgccccgtacgtccgccgcttcaaattccgccctggtgcgccacggggccgcgccggaaaaccattccggaacgcgtgctcccctcttacggcaaaactggacaaaggagggaaagctttcctcaaacctttccgtaatcccggcggggaaccagatgaaatgcccaatgcccagggaggggaacgcctccccccggttccaggaaaccagcccctttactgttccggcgcattcattctgccagattttccgcgcgatcttcgccttcacttctcctgcatccggagccgcctgaacccagccgggcgcgcagcacgccagcatcaggataaaacctgccatttttccatgcatggggttactttccttccccggcgcaggcaagtcaagccgcttcaatttctcgtgccaaagacggcgccccatgctacgcttgccgcgcacggcatgattctggcgtttaacaaaccttacgcggtcctttcccaattcacgcaggaggctccccaccaccggacactggccgaattcggctttcctgccggcgtgtatcccgtcggcaggctggacgcggattcggaagggctgctgcttttatccgatgagaaagccctggtggaccgcctcctgaacccctccaaccggcatcccagaacctactggagccaggtggaaggcgttccgtccgccacggacctgcttcctctggaacgcggcggcctctccatccaggggtaccgcacgctgccctgccgggtgcgccccatgcacggagagtcggacgtaccgccccgcaatcctcctgtccgctaccgctcagccattcccacctcatggctggaattgacgctcgtggaaggaaaaaaccgccaggtgcggcgcatgaccgccgccatcgggtttcccacgctccggctcctgcgcgtccggatcgggaggttcaccctgtccggcctggaacccggcgcgtggaaggagctggactcccgtgaacgaagggagctcatgccgtaatataggcttgattagggggaggcgcagcctgtatatgtctttccgcatcaggagatcctacctagacctttttacatgaaagccgaactcgtcgaacaagccgccaaaatcattcccgagccccagatgctgatcaacgtggtttcccgccgcgttgcccagctcaacaatggccgcgctcccttggtccccaccaccccccacatgggcaacgcgaacattgccctgacggagatcgttgaaggcaagctcgtctatcatgcggaatccgacagcctccaggaagacagccagtaaaaagcacgtcccccttattgccgttccggcccggatttccgcacggaacatcccctcttcaaccaagcccccggctcttccagcccggggccttttcatccctcccctccagtcatgagctccgacatctccaccaacaagaaagcccgccgggattacgaaatcctggacacctacgaatgcggcatggaactcaagggaacggaggtcaaatccatccgcgccggcaaggtgaacatcgccgattccttcgccagggtggaaaacggccagatgctcctgtacggctgcgacatccagccgtgggaaactgccggagagttctttcagcaccagtcgcgccgcccgcgccgcctgctgctccataaacgggaaattttcaaactggaacagcagacctcccaaaaaggctgttccctggtcgccctcaagctgtactggaaaaacggcaaggtaaaactggcgctgggccttggcaaaggcaagacccaccgcgaccagcgctatgacctgaaggcccgcgtggaaatgcgggaagcccagcgggaagtggcccgcatcaaccgccgttaatcaacgccgtccgcttcttcctttccggaggccgttcccgtttccctgctctccgctctgtattctgccggagtgagcgggagcgccctatagaaaagccgccgcgggaaagggactataacttccaatccacgggcaactccacctggccgcccttcttgtcgtcataacggatgaaaccgtgctccgccccgtaccagtggacatcccgcgtcaccttcacgtcaaaacagcaatagcgggcaatatccatcagcaggtccgtatttcccgtctgcacgtattccgcccaccacttgagggcctgggtgcccacggccgtttttgaagagccgatggaagcggcggccacggaatccagcttgacgcgcacgccgccgcgctgttcgatgtccttgcacaaatcaaggttgttcgtgatgtcgatcatattccacatcgtatagcgctggagcacgccgtagtcgaaatgctcgtggttgtaccctaccaccaggtcggcctggcgaagctgcaggataaggtcgtccaccatctcctcggaataaatcgtgtatttgccggaagccgtggaataagtcacgcccacggaaacgcgcatgtcggccgtattgtgccagccgcccacctccgctgcggaatgacgggtttccaagtcaaaatacacgatgtctctcatcggaggaaacgtacattatttgccacttttggacaagtcccacttgaatggaaggcgcgtttgtggtgaaaataggctcatgcagccccgtttccacatcgtcatgttccatccggaaattccgcataacacgggggctgcggggcggctggcgctggcaacgggatccaggctccacctgatccggccactggggttcagcctggatgaaaagcacgtgcggcgcacgggactggactactgggccaaagtggacctgcatgtctgggacagcctggaggagttaaaacaggcggcagatccctccgcacggttctggtacctgagcaccaaggcgcgccgctcccactgggaagcggatttccgggagggggattacctggtcttcggcccggaatcccgcggactgccggaaagcatgctgaaggaacacgcggggaccgccctgaccattccgatgcccggagaaggctcccgcagcctgaacctctccaccgccgtggcgattgtcctctatgaaggattgcgccagctcggcatctgacacggagaccggagcaatccttcttgccgccccggtcacgacaggtcacgggcatgaatggacttcccggcaacggcggcggtccaatcggaaatggaaggagctccctagccaggagaagaagcggtctccgcgcccttccgccgccaggggcgcaccagataaaaaagaatcagggaggcgacagcgccgcaggtatcgcagaacatgtctttctgggcgtcccatatatcgccctgggagccgagaaaatcattcgcgtcattgccgcccacaatgaccgcatactgccattcaatgatttcatacgccgcggctacagccatcacgaaaaagaggccgaaaatccccgccagcactttccccgcatattgcttgcgcaccagatactccgctacgggaaacgcataaaaccccaccgtaaaatgggccacccggtcaaacgggttccggtgggctcccaccagctcccggaaccactcgaaaggcacttccgcaaacgtgtaatgcgcccccaccgtatggcaggccagccagaaaaacatcagcgtgtaggaccagttgctgaaacggaatctccggaacccggccgccaggaggacgaccgccagcgccacgggaatcacctccgccacccagacggaacgggaagaaggggaaatgccaaggccaatgaacagcacggcgaataccgccagcaggtagaagggataatttttcatgagggagagaggagaaacagaaaagcgcgggagccgacacaggaaaggcgccggagattacctccggcgccttttccgttaaaaaacttttaccgcatgtcaatggtaggcaccggaatgcggtccttggggcccgtataaagggtcaggggcctgtacagcgtattgtcctccatctgttccagcacctgggccacccagccgcagcagcgggcaatggagaaaatggcggtgaacagcctggtgggaatgccgatgctgtaataaaccgtggcggaataaaaatccacattggcattcagccccttgcgttcccggacaagtttggcgatgcgttccgacatgcggatccacttgggttccccgatccgggaggaaaggcggatggccatgcggcgcagatgcggagcgcggggatccagcacacggtacacgcggtggcccatgcccatgatcttttccttccgcgccagtttgtcctcaatgtaggaatccaccttgtcctccgtacctatttccttgagcatttcaatcacgccttcattggcgccgccgtgaagcggccctttcaacgtgccgatggccgccgtgatagcggaatacatgtctgaaagagtggcgatgcagacgcgcgccgcaaaggtggaggcattcatgccgtggtcggcatgcaggatgtaggccacgtccagaatgtgcgcttcatcccggttcggctcctcccctttcagcagccacaggaaatgttccgcctcattcagatcctcccgcacggggggaaggtccagcccctggcacagacggtaatagtacgccaccatcacgggcaccttggcgatgaggctgaggcctatctctttcaactggccggaatccttcgtccggtcgtcatacatgccgagcatggaaaccgccgtccggagggcggacatgggccgggcggacttggtggccgttttaaagaaatccagaatgggctggggaaggtcgcggtcggaacggaggcgcttcttgatgccctccagttcatcccggttgggcagccgcttgttgagaagcaggtaaatcacttcttcaaaacagcacatctccaccaggtcatcaatatcgtagcccagatacagcagacgcccttcctcaccgcgcacatcactcaaggcagattcattagctatgattccttttaaacctttgggatatgtgtgtcgtgcggaaaaagtgtcattgctcatgttttaaaaaatgctactagtgatgaagattaccgattaaaagtctaacaatcttccagaaagtcaaaccttaattacgccttcacggcccacgcggggcgtttggcgcaggtgatgtggggcgcccttacatacagcggttccgccggaccttccagaagttcctccctgcggcccgcggccagggactgccatgcgactcccagggcctccgcatgcgggtacacgggaacgccccccgtcatttcccgggctgccagggtttccgccgtttccgtggaataaacgggcacgccgttttccaggcattccgccatgcgggcgcgggcctgctctgcgggcagcacttccggagcggccgccagaatgccgttttccagccttccccaggtccagccgccgcgccgggcgtcggacatcacgcaggccttcccgtcgtgaatgcccagtccgttccaggaggaaaacgccgccacgcgggaaccgtgcaccagggaaaggccgtccgccacggcaagagccacgcggattcccccgtaggcgccgggcccggaaccgaccacaatttcctttaaacaccgtccttccagggcatccagcgcctggcgcaccgcctcaaaaatggcggaggaatggttgcgttcagctctccattccacccggcacagcagttcctttccgccccatgccgcggcggaagactgcgcgcaggaagtttccagaaccagcagagcatcttgcatgcgctggattatacaggaagttccggcgcgcataaaacattttttcccccgctttccggaagcagcaaatttggttcgcatttatgcggaagtccccttatgctggccttgcacttcaccaccgcatgcccaaggcacccagacacacaccgccgcgccaggactggcgccggtatgcagaaaccgcccggaagccgcgctccacggcaagccttggcgacatgatgaggcaatgcaaccgtgacgcctgggacaagacctaccgcgcccaggtcacctccgaatgctgggaggacgaatgccaggaattcaccttcatggaccttccgcgcaaaacccggttcgtcaggcacgccgtagccacccttcttctgctcccgctggccctgattacggccatgtccctgtgcgaccagctcgcccacgcttccggcagtctcaacatcctcttctccatcccagtatggtacgccctgatgggggcggccgtctgggtggtgctgggcagcagcaggctgttcacctcatccctgctgtacctgtacgtgctgggccatgaactgactcacgtgctggcggtcttttgcagccgcggctccatccatgccttcaaggcggatctggacgggggatacatccagacggataaaaacaacctcttcatctccctttccccctattttctgcctctttgggccatgttgtgggggctggtctgggggatggcgtacctcttctggcccacggtcacctgccaggcccttctttactccggcctgggcttctggtggtgcttccacctgttctggacggcatggatcatccccaaggaccagccggacctggcggacaacggaaccttcttctccctaatccttgtttactttgccaacctgcttctcttcctggtgctgctgcgcctgttcaacgccgtaagcctgcaccgctttttgacggactgcgtccacaatgcggaaaggctgtgggacgccctcagggacctcctcatgctggcggccggcttgttcctgtgaaaaatattcttttccttaccggcaaggatgaacggcagaaggtgaaaaggaatccaacctttcagcaaaaaggagattccatgcaagccacacacttcattaccctgaccatggccgccgtttccctgatgggctgcaaccccaaggaaaccgtgaatgccctcacctccgatcaaaacgtcacccagcagatggccgtgagattcgcggaaaacatggtaggcctcccgcgggcactcgtcgtctcggatgccagaaaagcggcgccaggcgataaagtcaccgtcaagggagccgtactgggggatgaacccgttttctcaaaaaatattgcctccttcaccatcggggatccggcccagctcctggccaacatgaaggagcgcggagtgtggtccaccggaacggtgccggtggaaatacggaaaaacaacacgatgaccgttcaatttgtggatgaccagggccagcccatcaaacactccgccaaaggtgtgaacgggctgaaggaacgtgacgccgtcatcattaccggaaccattgatcctcattccactcctgaaaatccggtgctgaacatcgaaagcatcgtgattgaatagcaacccttctgtgccaaaccctgattcatgtcaaacggttcgggcgtcttgcgcctgaaccgtttttcgtatcaggatgcgcgcatgggatttgatccagcatctttgggaatgataacactggccgccacttcggcggcagcgggcgcggcctccgcgtccgcccagaaaaaaagtgcagaagccaccaggcaggcggcggatgcaaacgccgccaccctcaggaacgaggcggacctccagaaacagacgggcgtggaaaatgccaaacgcatgcagcaggacgccacacggcaaatgggcgacgcccgcctggacgccgcccagtcctccctgctccgggatggttccgtgccggtcagggaacaggccctggcgacgcgcctgcaaacccggattcaggatgaagcggcgacagccatgaggaatgcccagtccctgtacaaccgggcgaatatggaacagtacatgggccgcgccaatgcaagagcccagaaaaccgccgcggcaggcaccctgctctccggattcgcccagggaggcaacgcccttctcaaatggtgaggcaaccggcgatagctggagaccaatcagcgggaaccggaatctgcctgaggaacctccgcaggcgccggaaggacttccgtcaccacgccgcctatccctattttgatattcacgggaaccggcctgatgcgggaggccccctggtacagggcggccacttctacaaaccggggcgatttcctgaacaggaaggactttcccctgtcttcattataagaatggtcgcaggtagggacaggcttcaatcttgcgcctttcacatcgtgaaacacaaaatcctccgcccgaaacatcttctccgaatacacctcggaatacaccatgaacttccattcctcccccggttcgttcgccggcgcatgacggctgcgccccgtctgcctggtcactttcagcgtcaccgtctccagcttggacatgtcggctacctccacccggttattctccagggctctccgcacggcaatagggtccggcaccggaatggaaacaccgctctccttcaattccaccatcccgaaatccagagactccagcccctggcacaaagggagaaaaagagtgccgctcacctgaatccatcgggctcccggagaaggaacatcctttaaattaaggctcacgtttacccgcctcaagcccttgtcctcaataaccccttcccatagacggacggagcgcaccctcagacgcacgccattggaatcgacagccgtcaattcctgttccggctgttccggagccagcatttcagaaccgggaaacacgcaatacagcacgatgcctgtcttggtgaaattaaaaggctcccccctcaccagtcccatggaagacagcccgatgacggggcccttcaagctggtgccggaataggaagcgctcttgatgggaacatccgccgccatcagcgttcccgcacaccagcaggcgattgtgacaaaccatttcatctgcttattcggactaacagccgggaatggcagcccctcccaggccgatcttcatatctacgggcaccttgcggaacatgcgcttattccaataggaaaccaccacgcgcaaagagcggcagcgggcggaaacacggtaatccttcccccacatgcgcatcttcctgccccggctgttcaaatcgccgcggcctttcaggggaagcccgttttcctccctgacactcatggaattgaaatagaaatcactccttccctccaccttcagattccagcggttaaagtttctttccagcgtaagggccaccttgtccttccgcggcttttcaagaggcaattccaccctggttccttcctccagcagaggcaggactacagcgggcagctccaccaggtcatcagcaaaagcgcacaaaagaaatccccggaggcgcacccactccgcaccgggatcagggcgctggatagcgacggcaaaccagacgggatcaccgtgtcccacgccggacgccttggtcgcatcggcggaaaccctgtaaatcttcaggcttcttcccgttgaatccgtgcagacaagctcctccggggcctcttcataaaaaacggggcccccaagctgatcttcataaacgcatgacatccccagcagcaactggggaataattttggtcacaggatcttccaccagaattctcaggaaggacaaatgcagcgccgcatcccggagcaacggaacattcgttgaagcaacagcgggatggatagctgaacacacgagaaagagacacgcggaaaaacacttcatggaggtagcgacgggggcaatctaacaaacactaacgtctgcgcaaggaaaaaggaacgctttgaaaacaagctggacatagcgaccactcagtattcctgctttcccgccgctctccgtggttttcctttcctccatccactattcataaaaaaacatggtaaaatggaaatctgctccaatcaaaaggaaataaaattactttaaaaaatatcgccaaatccagaattgctatatattcacatcatataagtgctgaaagccctccccatttcaagagagtgtaaatcccggatagagtcaaaccttgtcaagttgacttcgcgcgttccagctctataagccattttatccactctaacctttaagatcttttaatccaacgccatgagaacagagaaatattttatgattgccttcgcctatgcccttatgagcgtcatagacgttcatgcagaaaacaggatgctggaaatcacaccccaaacagaaaacccatcagctgattgtatcattaaaaaattgaataaaaaaaaggataaggcgcgaaaagaaataggcataggagaaattgtaacactgacactaacacgcaaaggaggcaagccattgaataagaatacgaaggttacctggactaagaagggaaaaggagcaacgttaaatggacgcggaaccactgcaaccttgatggctgacttgatcatggaaaataataatgttaccgtcaaagcagaagctgaggattttcctccggcagaaattacttttaacattaaaaaacctactcgtttaacaggaaaaaaaggagaagaatacagcaatcaatcaaatattgggttcggcattactgggtacatcatcattactgtacatccaacgtccgttagcttttccaactgtggcattatagagaaagatgggggtaccgtccttgacccaaaagaacctccgccatttaaacttaacgaccatgatcccggcaataagggagattctcctaatttgcgcaatgaattagatgaccacgtaactttggttatgttatttaacaccattgccaaattaaacggaacgtgcaaatggacatggttatgcaattatgaagcaactcaaattaagaagcgtattgaacaaatccaacagacatttaccgtcacacggacaaatgatcctgaattcccgaaacagaaaaactgttccggaaccgttacaaaattcaaagtccctttttcggtaaaggctatagaacaaatattataaatttttatataaaatgataaatctattaatatcaattggaattttcattttttccatctatcctactatggcaaaaatacaattatttgatgccagcctcgtcaaacctgattctcttgaggttttaaaaaacgctcagacatcagcatcaacattaaaaaaacttcttgataaaggtcaatcagaagaatttttcaaggaagcagccatggagctcgaacgcatcaggaagtctacagcagaaaatgaatttccaagtgaagaaattcgtaacaatatcccttggattttttattttatcgccaatacacctcttcttaccatagattcagccgatcaggcaaggcgcactataaacagccgcgacgcagatctttatcttaaggaggaagccctggaaatgctcgccatttccacttatcgcgacctttttcccgatgataaagcatcaagagaattgatggcatcctacggggctgccattatgcgtgacttcctcaacggcactaaatcaaaatcctactcggacgaaccggtattcgtttctgataaagaagcaaaagccatgctgaagaaaaacattgaaatcatggaaaacgcattttctaaaattgctcaaatccaaaaaaaaggaacaggaccggaaacagaaaaaaagataaatgacgtctccaaagacatgaacaaacggattcatgacaacgaccagcaattcaaggattacaccgttgtaagcaacacgcaaacttcccgaaaccttctgctaaagaacattattgaacgctcggagaagaatttcatgattcttcttactaatttatttcccggcaaaaaaacagagattcgtaaatatatcaagatggcaggatattccgaccaagagattcatcaatttatcgatcgcaccttgaaaaaagattgaaaggccaaattgcttgatagaacacttggcactcgaaactaaaatcaatccggagttagtgtcaaattacttgccttaatcaattcattacaaaagctttcgttttttcggatgggccaccattgagaatggcgggtattctctccgtttttacctgctgttccctgcaacgcacaacgcaacaagccaagcatggtttctcttcttccactcagccatcatgatggagaaattgcgggcatgtcttgtgaaaagtacaaaatgtacccttgaatgtagctcgacccagaagatcagagatgcattaggggaatgcaataaataaaaatccttgcattttcaatactcacgcaaggtattggaaggatttaggtggcgtccccggcaggaatcgaacctgcatctagtctttaggagagacccgttctatccattgaactacggggaccggacattgtccgtgcaggacaataaacgggaaggtttccccgctcaagcaaaaagcagggcaattactccatgaaccttgattttgaagcatttttttcctagaaccgttttcgtgagttttttcccaactgcttgttttctctctgttttctgcgtttccctgaccggatacggccattgtcatgacagcctgccggacgcaaggccggccatacgcgccatgtaccggcccgccccaaccccggatcaaacaggattgggcccggaggaggtaaagtattaccctctccgcctttactgggaatgggaacggtatactccccgggtcctgtctctgcttttgccggaagcggcccggaattatgaaatggccgctgtggattgcccttcctgggagccggaacgcgcagtcgccctcataggaaacgaactccactgggcggtagcggcagaaggcaacaaaacagattattttatcaacagcgctcccctgtggaagagctggtgggcctcccttcttgaaaaatatcttccggattattttccggaagatacattccctgcatggctacacccctctgccgctctgctgaatgcatggaaggatcaaaaaatccgccgtctgcattggcaggagtacagcaggaattacgttcgccgcggcgttgccatcctgccgcatgctctggctcaggaactcaaaaccacctggaagaagtgcctggaaaccgccgtgctggacattcctgcggagatgttcgggtgctgtgaccaaggatattccttttactccgcggctcccggcctgattgccacggaattgcattattaccgcgaccgtttacccctgaaacgccagatgttccacattttccatcttcttgttgacgcggcgagcatggataattttacgcctgagacccagctcatgattcatgagttatgcgccgacacccgcagaattgccggggaaatgaagaaagttcccccgcgcggtttttactggcgagagttggacgcaaaattttattcttcctgtcctgactcggcaaataacttttgggaagggaaaaagccctctttgcgccagggcaagtctgctgaagcattccttcggaaagagtgtatgacgctgcctctttccacaaatccggtctggaaggatctgttccccaatgctccggaacacgccacggcctggatgaaaatttattcggacggccagtgcgggggcacctatatccaccagggatttctccacacagccaccacgtatctgggacggcattcccgctttctgtacgatttcagccggatggaccatccgcccgccatgacgccctatgatttgtggtggaacggggaagaaatgagagtccggcgttcctttttgaaactggaacctgctgcggaacaggaattgaagacttatctccatttgctttcccgcttccggggcggcaagaatcatcagggagccttctctggcatgctgtttagtacggacctgggctgcaaagacctgattctgcaagctctgaaagaagaattcatggaagatgaggattcctgtccccctattcagtcatccgtgctggaccacgtttattcgttctggacttcgggagacgtcaattatcttcaggaaggctccggccaattgaatcagctccggaaaaacagggaggaattggaacggtatatggaaaaacatcctccggaataataaatccgcccttccggaagcggaacggagcgcacaaaagccttgagccggggacggaagagccgtagcgttaaaggtaccgtcaccgcatccccgccatgctcaatttcgtttacgataacaagaccacgctcattttcggaaaaggaacccagcatgaagcgggcgcccttctcaagccgttcggcaaaaaagtcctcctccactacggaggcggcagcatcaggcgttccggcctttacgacgccgtcacggcttccctgaaagccgccggcgtggagtatgaggaattgggcggcgtccagccgaaccccacgcttcccctggtgtatgagggcatccgcctctgccgggaacacggcctgggcctcgtgctggctgtgggaggcggcagcgtgattgattccgccaaggcgattgcgctgggcgttccccatgaaggggacgtatgggacctgtatctttccaaacaacagccgcaggcggacccgctgcccgtcgccaccgtgctgaccattcccgccgcaggcagcgagagcagcccgaacacggtcatcaccaatgaagaaaccaagcggaagctggggtacggttctcccaaattgcgtcccgtgttcagcatcatcaacccggaattgtttttcacgctcccgcaccaccagatggccaacggcgtcagcgacatgatgagccacatttttgagcgctatttcaccagaaccctgcatacggacctttccgacggcctttgcgaaaccaccctgcgcaccatcatgagaaacgcccgcatcctgaacgggaacctgcacgattacgacgcctgggcggagattgcgttttccggcaacctcgcccataacaacctgctgggcgtgggccgtgaacaggactggggctgccacgccatggagcacgaactgagcgccctgtatcacgtggaccacggcgcgggcctggccgtcgtcaccccggcatggatgaagtatgtttctcccaaacaccaaggaatgttcgcgcaattcgccgtgaaggtgatgggcgtggagggttccttccgggaaccggatgccctcatccgggaaggcatttcccgtctggaacatttttaccgggaattggggcttccgacgaccatggaagagttgaacatcaagtccggggattttccactgatggcggaacaggccatcagcgtgcgcggccccatcggggggctggaacaactggacgcccgggacgtccaggccatttaccgcctggcatgcgaaggcccgctgcccgattgacggcatccccgtttcttcctccctcctgcattccgggacgaggggacggcagtggaatataaatatacccaggcagtccctttccctgggaagaagagaagacggcggttgcatatcctccggaggggaacctgaggaagccgccctgaaagctcaaaaaggacgccgcggcagacgatccgcaccggaatacaggccggaacgtaaaagaagtccggtttgctcgttgaaagtcaatccttccaacgcttctggccattgaacggcattaagacaatctcccgcatgttgtaacctacttgtaacttgccaaatattttacatggaagtagtctggttgaatgaacagaatcttttccctgctttttctggcgggaggcttgctggcttccggaatgccgtgcccggcagccgcttccactccaccgcagcgtcaggacggcccgtccgcccatgccgatgacaagggaggacttccggaagattccacttcttcatcccaaaaaggcgccaaggatgcggacaaggcaacttccatctcccagcagaggaagcagtccgtggaggctattgaaaagcttttggaaaagaggttgttcaagaatgcggccgaacaggctttaaaacagcttgacgaatacgacgaccagtacagcggagcggaccttcttctttattaccaggctttgacccgtctcaatgccctggacgattccacgaatctggataccatcctgcaagagcagatgaaacgccacggcggcaatccctatttcctgatggacgctgcccatctgtaccagaacgccagccatacgttcaaactggtggacggcgcctacatccgcagcgccgagccatgggacggggaatattccggggaagcgagggaccgggtggaagccctgcggtgcctttccaaggccatgcaactggcggagaaggaaaagaacatgaagcttctgggacaactgcgcttcatgacggctcaggcgttgctggtgaaaggcagccgctacagttccctttcccccttccaggcttacgccgccctggggaacctcaccagcctgaaggaactgccggggtacgtcgccagggaggaagcccccccgttccggaacgtcgccaccgtgcccgtcacggtcaatgccaaaacggggaagccggaagtcgtcttttaccatgcctcttcctcctgggagacggctaaaaacgacggggaacgcatgcgctggctgctggacgccgccattcaggcgaacccggaactagccaaccaggtcaactatttcaccgcctcctggtgccaccggctgttctcctattccaatacggttccggaccaggagttcgtgtacggccccggcaacgcgggcatggtggcgggcattaacccggaggaattgaaaacgaaccagaccgtcgttaaaaccgaccggacgggcaacggaaaattcctgctcaccacccttcctccggattacgatttcatccggatcgccgctgcggtccgagtaactccggagccggattattacgttaacgccggcaatctggcagccaatgagttcctggcccgcaaccagaggcccgctgccgcagagcttttaggcaaaatccttcagacctggaacgcacaatcctggaatcaagaggacaaggaggatttcctgcacgttgcggacaacctgaagaagcgcattgcctccatcacggaacccaacggaatgtttgatgcggataaaagaacgctgctggcgggggaaccggtgacggtcgccttctcctaccgcaacgccgcccaggccagcgtgacggcccgctccgtggatatgaagcggtggcaggaggaacgcatggacaaggtgcagacctccagcacgctgggcaacgcgtacaggaaaaagtattccagcctggggaccctccttttcaatctgctgcatgagccgtcctacgcccgctatctgggtgaagaaatcaaaggggaaaaggtagctctggctcccggggaacggcacctgaaccgcatcgcccagattcccgtgcccacccgcaagcccggctggtacctgcttaccgtcacgctggataacggctaccggttccaccgcttcctcactctgtcagacatggtattggtgcgccgttccgtgccggaaggcaacctctggttcctggcggatgccggaacgggaatgcccgtggaagggggcagcctgcgcctccttcgctaccaggaggataaaacgctccaaaaacaccaggtgaagggaaccacggacaagaacggagccatgatagaaacaatccctccccgcggttcccgcactccttcttacaacatgttcctgggcatcgcttccaaaggggacagctatgtgctggcgggagtatcggattacggctgggaatccggcaattatctcatggatacggcaaacaaggcctccgacccctattcctgcttcttcctggaaagccagcctgtataccgccccggacagacggcccggttcaagggcgtcctcttccgtccggacatcgcaaatcccggaacgaaggactgcgccggaaaaaagctgacgctgaccattacttccccaaccggggatgagagcgtttttccgccaaaaaccgtcacgacggattccaccggctgttttgaactggaactgctcattcctgcggaagctccgctgggccagtatggagccaagctgaagctgcatgattccgcggacccggatttccggctgtatgcccctctcttccgtatggaagagtacaagaagccggaattctccgtcaggatggacgccccctccagacccatccgcctgggccggcccattcccgtctccattcaggcggactattacgcgggcggtcccgtaagcgaggggaaggccaccattacgatcacccggacactgggagcggatgtctggacgccctactggaaatggagctggctgtacgacaggtctttcagcccgtattacattcccttttctccggatgcacccctgaccgtcctggaaaagacggtgccgctggataaggacggaaaagcatccgtggagctttccacggcgcaggacgcccgggatttcccatcccagaacatcacttaccgcgtctccgccagcgtgacggatgcctccctgcgggaagtttccgcttccgggcaggtcatcgccaccttccgcccgttcaacatcttcaccgccctgaaccgcggctacgcccccaccggaacgccggtgcaggcctccatcaccgcggccacggcggacggcgccaagattgctcacgccaagggaacctccgttttgcagcatatccgcgcggacggcagccgggaggctctggaaacctggaatatcaccaccggaaaggaaggggaagccaccctgtccttccagaccagggaatccggcctgtatgccctttcctctaccctggaggacgaacacggcaacagggtggaagagtctttccagttcctttcctacggcaagggcaaacagaatccttttaaaatcaatcccctttccatcactccggacaagaaggaatacgcaccgggagatacggccaaactgctcctcgcctctgattatccggacgcccgcgtctggaccttcctgcgcaattcctggaaagacgagtcccgcagcctggtccctctggaccggcaaaccgccctggtggaatgccccctgacccgggaagacatgcccaacatgggcgtgaacgccttcaccgtcagaaacggggaacttcacacggcttccgccgaactgctgattccgccagccagccagattctggctccttccgtaacaccgggcaaatcccaataccagcccggtgaagaagggagagtaacggttcaggtcaaagggccggacggcaaacccgtcaggaacggcatcgttaccctggccgtctatgacaaggctctggaatatatcgcacgccccaatattacggacatcgccaagaccgtctgggggagcctgaacgaaaccggctttctcagcctgaaaaaaatgacggccgccggaacgcagcaggaccgcggcccggaccagccctacttccaatccctgctctacagtgactacggctatctgttgcggagggaaaaaggagccgtcaacggctttgctaccgcaggagtcagatccggtaattatgctatcagcggaaaagccgcaagccgcgtattggctgaaggagcggcagtccccgccgccgcaccggttccggtcatgcagcagatggctgcggatgaagaaagcgcagaaagtgattcctttgcagccggacagggagacgcagacgtgcaggagaacagttccccgcacattcaactgcgcaccaattttgcggactgcatcaagtggtgcggcacgctcaggacggatgaggaagggaacgttaccgttcctgtggagatgccggacaacctgaccacctggaaagccgacgcctgggccatcacccccggattgcaggtagggcaggcttccgcggaattcctgaccacgaaggacttcatggtcagcatgcaggccccgcgcttctttgtggaaaaagacgtagtgatgctcagcgccctggtccgcaaccggacggacaaggccgtccgcgcccgcgtttccatttccctgaaagacggttgcctggaacttctcccggctgacgctccggccgtaaaggggctcgccgcagatacggacaattccgccgtgcgggaagtggacgttcccgcccaggggcaggcagtcgtcaactggtggaccgccgccatcagggagggaaccgccgccgtcgccatggaggcggcgtccggctccaccggagacgccatgcagatgaacttccccgtgctggtgcacggcatgaagcagctccatgcggggagcgccgtagtgcttcccggagaacaggagcagaaactctccatttccctgccgcagcagcggcgcagggaggaaagcgagctggtcgtcaaggtttcccccagcatcgccctcagcatggtggaagccctgccctacctggcggaatacccctatggctgcgtggaacagacgctcaaccgcttcctgcccgctctcgtcgtgacggacgcgctcaagcagctcggcctgaatcccggcgcggcgctggaaagccaccgcaatctgaatccccaggccatcaagaacaaggccttccatgacagcgtcatgaagaagctggaacgcaaccccgtttatgatgaagccgcgctgaagaagatggccgccaagggaatctcctccctccgggagaagcagctctccaacggttcctggggatggttcggaggagccagcgagggagaccccgtcatgacggcccatgtggcccacggcttgaagattgcttcaaacacggtcaatgtcccggatgggatgctttccggagccgtccgctggctgaaaaactatcaggaaagccaagccgctcttcttgagaaaggagacgaataccggaaactggaaaaactgccggacgggccgaagaagaaggaagccatccgcaagctgggggattaccgcctgacggcctccgccacggacacccttgtttattccgttctggcggaatgcggcgtcaaaaacctgcccatggaacgctacctgttccgcgacaggctggaacttcccgtcatcagccaggttcaactggcggaaatcctgctggacgcccaccgcatggacgacttcaagaaggtaatgcccatcatttcccagttcctccagcaggacgactccctgcaaaccgcatggctgcgccttcccaatgaaggctactggtggcggtggtacggcagcggcgtagccacgcaggccgcctacctgaaactgatggccaagagcgaccccggcaatcccgtcacggcgcgcctggccaaatggctgctcaacaaccgcgccaacggttcctactgggactccaccaaggatacggcggattgtctggaagccctgtccgcctaccttctccagaccagggaaggcatggaggacatggaagcggaaatcctttacgacggcgttccggtcaaaacaatcgccagtacgaaggagaccctgttcacctttgacaacgccttccgcatgagcgggaaagacctggcggacggcagccacgtcatcaccatccgcaggaagaagggcagcggaaacatttatgccaattccaccctcagctacttctccctggaagaccccattcccgccgcggggaatgccgtcaccgtggaacgctcctactaccgcatccggaaggaaacggtgaaggacgactccgtgaaggacacccagacggatgccggagagctcgtctcccagggcaaggacgtgacccgccgcacgctgttgaaagacggagacgtcattgccagcggcgacatcattgaagtggtgatgaccgtgaaaacgaagaacgacgtggaatacctcatgctcctggaccccaagcccgcgggatgcgaatcacaggaaaccaccagcggctacgcctggatggggaccgtatccggctacaaggaaataggagatgaagaaatacgcgtcttcctttcctccctgcccatgggacaataccagatcagccaccgcctgcgcgcggaacgtccgggacgcttcagcgccctgccggccgtcattgaggccatgtacgcgccggaactccgcggcaacagcaaggaacacaaaatcggcatctccatgcctgccgaataggagcccggccacccgcagggaccccgataaaaacgcctgcatcagcgcccccgtaaaggaacaggacttcagccagggtcttcttattcctgttccgcctcaaatcctgccgcatggagttgaggcggaaagcgggcaataccgccactcccgccccataggagccgatgcagttttggacgaacggcaggtcaatcattttcccgttaaaatcaaatgaagacggaaaccggacctgcccggcgtcagggggaaaaaaccggagagccataccttcccaattccccggatgagcatgcccctctccccgcctgaccgttctctccggggctgcggttccgcgctaaaaactcttgcaatccgtcagcggaagcggagaatgcgtagcccgctgcgcagcgggccgtaccatggaatccggaaccctgaagggacatatcgcgatgggagcggcggccgttatctggggcctcatgtctccggtcagcaaactggtcatgcagccgggggaagtcaactccgcttccctggctaccttccgcctgctgggagcggccatcctgttctggctggcctccgccttcgtgcccggggaaaccattgcacggaaggaccggctgaccctgttttacgcctccctgttcggcatcattttcaaccagatggccttcacggtgggcgtgggattcacctctccggcggatgcggccatcatcaccaccattacgccggtactgaccatgattctggcggccttcgtcctccgggaaatgatcacggggaaaaaaatcatcggagtctgcgccagcgccatcggagccattctgctggtttccggcagcggagggcgtgcggcggccctgccgggagacaacaacctgctgggggacatcctttgcctggcctcccagtgcagcgtagccgtttacttcgtcttctttaaaaacctgatcggcagatactcgcccgtcaccctgatgaaatggatgttcacctacgccgctctcgcctgcctgcccttcaccttccgggacgtggtttccatccgttattccgcacttcccctgcagacgtggctgggcattgcctacgtggtggcattcgctacctttgtaagctacatctgcctgtccttcgcacagcagcggctgaaacccaccgcggtcagcatgtacaactactgccagccggtgattgcctcttccgtagcggtgctgtggggcatggaccacttcggctggatgaaaaccctttccgtcctgctggtcttcacgggcgtgcttctggtcaccagaaccggaaaaaagaccgccgttcaggaaccgtaaataatcgggaacttcagaaaacggccttctacagccacgcaggaatgaacacacttgtttagggaggcggggcattcccgaaaaacccacttggtgaactcccttctgggaagaaggtcctcccggtccctacggacgccgggcggaacacagcaagagaaaattcccctccacgaagaggcggaaaagctcccgtccaaaaaccggaagccttccttcccaggcaaaaatccgcggatacaaaaaaaggcagccctccctcaaagctaaaacgccactaaagcccctgacactccgtgatctcccatccccctcccggcagccctgaaaaaatagatgggaaaatacgccccggcaaggtataatacgcccgtagtctccgccttttcccctttccggggagtcctgcttccctgccatgaaccgactctttctatcctgggacaaaccggcctgccgggctgtagcggagcggctgctttccctgggaaacgacttccaccggaatctggtgctggtccccacacgggaatccggcaggcaattgagggaataccttgcctccatttccagcgcacaggccatcttcgccccccaggttattccggcggaccagttcccccggctggaggaaaaggaggaaacggcttccgtcctggaagagctggccggctggctccaggcgctgggaacctctccccaccgtctttatccgcgcctgttcccccggcacatgccggaggatttttccagcatgctggaaatggcgggcagcctgcaaagccttaaacacgccatggcgaaccagggcatttcctgcggcatggcccaggattcctgcgcgggccgtgacgaacgctggacggacatggacaggttgtcggagtactgcacgcaacagttgaaaggctggcagcttgcggacagaaccgccatggaggcggaagcaccgccgcatctgctccattccctgcgggaaacaggagggcacgtcatcctggcctgcgtagcggacgttccgcgccccctgcgccaggccctccagcatgcggaacgcagcggcgtgcccgtccagatatggatacacgcgccggaagaggaagccggttcctttgactcctggggatgcccccttccggaagtctggtcccagtgccccatccatatcagcgacgcccagatcaggatcacggccaaccctgcccggctggccggggaaacgtgccgcatgatcgcccgcacagcggagggagcaacgccggacgtcgccctgggcgtttgtgatccggacatgaacgtagccctggatgccgccctgcgggaatacggctggggcctccacaatccggaagggaaaccctttgccggaaccggcgtcatggacctgctccgccacctgcggcaggcgctggaagaaaagggcgcggcccggcccgtcttctgcctggcgcgttcctccctgctctgcgcctccctgggaataggaaaccagcagtactgctgcgccgcgctggataaaatccagcagaagttccttccggaatcggaagattacctgctttccaggctgaaggaattttatccggccgccctcccttccatccaggccattctggcctggcggaaccggatggcggaacccggcacgctgggggaaaggctgatggaatggttcccagctctggcgaacgcctacggtccggaaacggaagccatggaaatgctccattcctgcctttccggcctcatacgccttcagcaacgctccaccgccttctccagaccggagacggccctccagctcctgatgaaatgccttcagccgctgcgcgtcaaaaacagaaggaaggcccacgcggtactggattccctgggctggatggaagtccacttccgcccggagaaacatcttattctgacgggattgaacgaggggaccgtaccggaaggcggcgtttccgaccagttcatgccggaggaactgagggaagccctgggcatcgattccttcaaccggaaaaaagcccgggacagcttcctgctgaccgccctgctccattcacgggaacgggagggcagcctcaccatcattctctcccggaccagcagcaaaaacgatccgctgacgccttcctccctgctcatgcgctgcccggacgcggaactgccgcaccgcgtggaacagcttttccgggaaatcagcgatccgcccgcacccctcccctaccagcgcggaagctggtaccttcagcccgcagaaggctggaaggccgccacggacatcggcgcgatggcgcccggctacaaaaacccgtggaaggaaaaagggctggccttctccccttccgtcctcaaaaggttcctggcgtgccccatgcgcttctggatgcgggaggccctgcacatgaatgaggaggagttcctgccggacaaggaggacatggccgtcaacgaactgggcaccatgttgcacgatgttctggaatgcttctgccgggaacacgccgtcctgaaagacggcatggaagcagccgcccttcaggacgccatcacggaaatactggaacaaaccttccggaaacaatacggccccacgcccctcatgcccctgctgctgcaaaaacgctccatggagcagaggctttccgtttacgccgtccagcatttgcaggaccttcaggaaggctggtcctgcatcgcctttgaacaccaggtggaagactggtccctgggcggcttccccatgaaattccgcattgaccgcatcgaccgccacgcggacgggcgcatacgggtcattgactacaaaacgggagcagccgcatcctgtgaaagaaagcatctggaaacgatcgggcgcccggacgccctgtccctgctttccccggccctgcggccctacaccaaacgccagaaaaacggaaggctggcgcacgcgcgctggaaagacctgcaactgcccgtttacgtgctgtgggccgcggaagcctatggcggccacccttcggcggcgtattacgcccttcccgccaatccgctggacatcggcatctccgcctgggacacgcttcacgaccccatgcccggctatgaggaatgcgcgctggacagcgcgcgcgcctggacggtggagctgatgaagctccttcatgagggccgcgggctcatcaccgcggaggaactgggctggaaccctccctcctacgacgtgttcaaggacctgatggcctcccggcgtgaaagcctgcaggacctgctgggcctcaacctcaccccccacctgcctttctgagatgttctccctgaccaacatgctgatctccgcatccgccggaacgggaaaaacctaccagctttccctgcgcttcctggggctgctggctctgaaccacggcagccaccccgaacggctcatcgccatcaccttcacccggaaggcggcaggggaattcaaggaccgcatcctgacggacctggctgcgggggctacggacgaggagggggcgcaacgcctgaaagaacagctctggacggtcatcaagggaacgccgggggaacccggcatctggcccggagcaacggaggcatggaaggcggaaaacctgcaccgggagcgtttccggcatctgctgcacatcctggtgcagaacctggcgcgcctcaacctctgcaccattgacagcctttttgcccagattgcctccaccagcacctttgagctgggcgtcagcggcttcagcatgattgacaccacggcggagaagctggcgcgccgcgaagccctgctttccctgtaccgggaatgctccgtgaacagggagcggaggcggaattttgaagacgccttcctctccggagcggactccgatgcggaagccgcggatgcggaggattccatgatgcggcgtctcaacacctaccacgaacttttcctggacgaaccggacgccggaacatggggaaaccccgtcgcgctgggcttcacgccggaagaactggccccccccgttcccctggaacaatttgacgccgtcctgcatgccgtggctttccaggcacagcaggcgcccgcgccggaagggaaaaacggctccaaaagcaaagaactgttcctgcgcttcctgaacggtttctcccaatacgccaggctgggccgcgtgcgcttccgcacggacggaggttcttcctggaacatcaccgtggaagaggcgcgggaaaaattcaaggacttctggtcccctccgctggaagaactcatccagagctggctgcgcatggaggtcctgcaggcgctgcgccgcacccgcgccacgcacggactgatgctcctttttgaaggcaaatactcctccctggtccgcaacaagggaaggttcctgtttcacgacgtcacgcgcatgctgggcgggggagccgttacgccggagctcaagagggacctgcaataccgcatgtactgccgctatgaccactggatgctggatgaattccaggacacgtcccagtcccagtggcgcgtcatcaagccttttctggacgacctgacggaatccaaggccgggagcgaaggcagcatcttcgtggtgggggacatcaagcagagcgtgtaccagtggcgcggcggggatccggagcttttccgctccgtttccacccagcttcaactggaagaacgcggcatgtccacctcctaccgttccgtccagcccgtgctggacctggtgaacgacatctgcgactacgcccggacggcgccggactgcgaacccgccgccctggaacaatggggggaatatccggagcaccggtgcgccccccatctggaaggccggtccggcgtctcccaaatctggcagactcccaaggcggaagcctccaccgccaacgacctggtgtgccaggcggcagccgacatcctggaacgtaccggagccctgcgccgcggcctggaaaccgccattctggtcagcacgaaaaaccaggcgctagccatcaagacctggctgacggaccacggcgttcccgcggaggtatgcgacgacgttccggtgggcgtggattcccccctgggaaaaaacctgctgtacttcttccgctggctgctcatgccgggagacccctttgccgcaggcctgctcatccattcccccctccggcccctcgtcactccggaacggcctgaaggcatggactggaaggcctggcgcctcctgctggaacgggacggctacgccgccgtcatggaggaactggagcggaggctggcccggacgggaacggaactgaccgaattccaccgggaccgcctggccgtctggaagaatgaggcggaacaggtggacgagaagggcgtttccctggatgaatggatcaggcacatggaagacgtgacccgccgggaggatcctgccgggggcatcgtccggattatgaccatccacaaatccaagggactgggattcgacatcgtcatcctgccccagatcggcagggacgccccctttgcggacggaaggcacctgacccactttgtcaaaaagaaccgggagggcagcatagaaggaatcgtgctggtcccttccaggcacgtttacacgaacgttccgcagctccaggagctttaccgggaatggcgcgcccagcagcagtttgacggcttctgcaaactgtacgtggcgctcacccgcgccaagcgggccacgtacgtcattctcccctaccgggaagaaaaaggtgaaatgaccgcggattccatgtggaaggtcgtccgttccgcagcccggtcctgtgaaaaaggaacggaagacacgcttccggaatccggggcggaatgcctgtattcctgcggccatggcgggtggtacggagaattcacggaatctgtacgggaacgggcggaggaagacacgccggaatggcccctccaacgaccgatggtcagggagcggctttccccctccggcctgccggcggcagaagacgcggcccacgaaggaagatatgccgacgatgcggaatccgccgcattcggttcagccgttcacgccgtctttgaacggattacccgctgggatgaatcggacaagccggaatgggctcttcatcccgccacggaggcggaacgcacggtggccgcctgcatggagattccctctatccgcgaactcttcacccctcccggaacggcacgcatcatgaaggaacagcgcattgaagccattgacgggaacagttggatctccggcgtgattgacagactgctccttcatgacggaagcgcctgcatcgtggacttcaagacggaccatgcggactctccggagcaattgcggaaacgccactccaaccagttgaacgcctacgcccgcatcgtgtccagaatcactggaataccgccggaacgcatcgcgtgcatcattgtttccacccatttaaaggaaaccatccgcatttaaaggaatttttttcctgaaggaccggcagttgtctttccccgcattttccttgccgttcctccctgcgttcctgtgttaacgacggataatgcccctatggaaaaaaccgttgccgcggctggaaaacatgccgccccgaaggcgcggaaagggaaaggccgttaaataaaaaagccgtcccgcgcggacgcggaacagctttgaataaaaacggttggaaccttcctggtcaggcgcggcggcggcgcaggcacagagcggccaggcccagcaggctcaaagtagccgtagcaggttccggaacctgggtcagggaaaggtaattgagggccgtacggccaaaattgctggaaccgtccccctgaatcgtgagagtaagcgtcccgtcttcccccaccacgatgtgctccaccgtggaataaaggcccttgttggcggaaggattggagccgtctgcggcattccccggagccagaacgccggaactgtcgcccgtcgtcgtggaaagctcgttccaatcaccgctggcgtttgtgccaaagtttgtccaggtcgcgttggaagcgtcggcgcctccgatcgtccacgtctgtccggcaaagacgtccttacccgtgaaaccgccgaaaagggacaaggtatattccccggcggcaagaccgctgaaagtcacggtaaaagaaccggaaccggtcgccgtctgcgttaaaaggccgtcccggaagctgtctcccagggagaaaggcatgctgccgccaaaagcgttcttccacccgttttcttcgccgggcgtcttggtcgtggtatggccgtcatcccccacagggtatccggccgtgctccatcccaaagtgacgtcgcccggcatcgtgcccagggctgcggaggaatggtcgtaattcatattgagggctccgtctgtcgcggcgtcatcgcgcccgaagtcaatttgcacagtcgccgcctgcactgccagcagggaacttgaaatcagagccagagaaaacaaggacttcttcatggtgacacaaagtaaaccggatcaataatccgatgattgcataaattctttaattaatattaaatctattcatattaaatacattatatatatttatatcttgatatgaatccctcaatacatggaaaacaaaaaagatatattatttaatttttagtgttttccattgacatcggattattgatccgcaagagcattcctgttccaccggcattcgagtaaagaaaagatggccggagggcggtttataaaaacagccggacttttaccgcgccgccgtttccaccggaatacgaccgcgccgggaaaacagctattcgccaaaaaagacggtcaatgttcaggcacagccacccggatgctttctattcccagataacgggcaatggaacggttgataaattcatccgggtctccgctgctcatgcgccacatcacggaaacatagggagccagaggcacgggctcataaggagggaccgcaatgtttctctcccccttttccagttcatggcggatgaacattttccgttcctcgcactggcggtggatgcgcgggaaggcatccagatacccggagcatacccacagggccagcccggccgccgcaagcagcacgcaggaaggaatccaacgcctctgcgcggcgtccatccataccccgtacagtcccaggatgcccgtcatcatcagcaccgtagcggaaaacatggcatgccaagcgggaatcacgcgcacaaaaaagctgattgccatggcatgggccaccagaatgaacagaagggaaacgcacatgcggcggagagaagcccccttccaagtcttccaacctcttctccacgtcagcagggtcagggccacggcgacggctgccagcaggattttaggaagcggcatgaactcgtaaaaagcattcatcagttccggaatggcgctgaaacgctccgcccaggagtaaaggacggcggcgccacccgccgtctccgaatgaagacgcacgccgtttcccggagccagcagaaggcaggcgccacccagggcatgaaaaccccagccgacgaagaaccagcggggaagagccaggctcttccagcgcgcatacagccagtacaggaacagcatgcccagggaagcgggtatctggttctcgttggtcatcccggcggcaaaagccgccacgcctatccagagccaggaaaagggcctgtccttaatccgggaggtcccggcccataagccgcggtacaggcacaggaagcccagccagacggcggctgaccacgcatagtttgtccctccggacagccagaacatcgtgatgcccggcctggatgaagacgtgagcacaagaagggcgcccgcggaaaacagcagaacatcccgccagtgcccggaattcaccctccttccccgcgccaggtaaaacatcatcagggccagggaaagaatcacgaagggattgacggccaggaaaagccacttccccgccgtggccgtaaagacagccaggaattcccccaggcggggattccagttcatgtacgaccaccagcaccgttccagcacgggctggaaggcaagacggtggccagccccgaatacggaatgcatgaagctgtccccggtgaagggggtccaccaggtgagcagcatggcatacacgagaagcgccagcaccaccgcccggaacaggaaacgcgccgccagtgactgcttcatggaatcaagccgtatcaagggtcgccgcccgcgtttaatccgtcacggccttgaataccggggtgggcagcttgtccggcttcttgccaaagaaatcccccacgtccttgaatgtcacgaacaggaagaagcccatcagcaggaagacgaagccgaactgcacgaattccagcactttcacgttcagggggcggcggaaaaccagctcaatggtgttcatcaccacgtggccgccgtccaccacaggaagaggcaggatgttcaggatagccaggttcacgttcagcaccacggagaaccacagggccagcttccagccttcctccagggagaacatcttgtaaaactggttggcaattcccacggggccggagaggtgctccacgcccacgctgctgccgggggccaccaccttcgccagggtatctcccatccatttcaaactctgcttgatctgcgcccacggagtaggatgcacggttacgtcacggcccacggagctgaggtcccaggttacgcccagaatgggctgggcgcccttgagcagggagccgttcgcgccgttgtgccagttctccggcagcctgccctggatgttcacctgcctcgcggcgccatccttgcccgtcacgtccagcagaagcggttcattcttcttcaacagcccatccagcgccgcagggctccagatgcgttccccgttggcagccgtcaccacgtcgcccggcttcaatccggcttggtcggcaggagaattgggaagcacttccccgatgacgcagggcatcgcctgcatcagccctacctggcgcatgccggagcgctgccaccaggacgtttccggaatccggaacccgcaggaaatttccatctctccttcatgcccaggcctctgcaccgtaaaaactacctggtcatgctcacccagcataatcagttcccggacgccttccatattgcccgcccacttgtccaccgggcggccgtccaccttcacaatcctgtcgccgggcagaatgccggactgggccgcagggctgtccggagcaacaaagccgaccgtagtcacccccatctccacatcaggcttgcccaccatccagacggccacggcaaaaaacacggccagcaggaaagaggcgatggggccggcggcggccacgatgatcttgtccaagggggtaacgggcttcaaatccttgggaagctccgcgctcccttcaatggcctccatcggagccatttgcggcagggaaacgaagccgccggccggaatccagcccaacccccattgcacgccgttgatggtctttttccagatggggcgtccaaaccagatttggaacctgtccacgtacaggccgcgccagcgggcggcgaaaaagtgacccagttcatgaatgaaaatcatgaagttaaacaacatcaccacaccgaagataatggcaatggtggtaagaacggaaagaatgctatccatggtagtgctttgtgggtcaggctatcatgacgcatcccggcggacaagcttcaaggatgtcctaatgacagagggaacatttaaattctggacatgcggcagaaaacaccataacaacgaaagatgattgtctccaagtttctcatgacgggcattccggcagccgcattgatagcctgtacgccctttcttcacgccgcgcctcaggaagaagcggacatcccctccatgacccggacctggacgaacaaggaaacgggcgccaccttccaggccaggctggccggcttgaacagcgtcaacgcgatcatgcagaacgtcttcacgaaaaagaaaatcccctttcccctcaaaaaactttccagggaggacctggactggattgacttccacaaggagctggtcggcaagacggatgcggagctggctaaaatggtcatcccgaaaggagtcctgggcaaacagctgaaagggctgacctaccgggaaaaggacggcaagttcgtcaaaatggacggcaaatggaacgccaggtattttatcctgtattattccgcgagctggtgcggcccgtgcagggcctcccttccgcgcaacctggaggtgtaccgggataaaatcgctccccgcaaggatctggaagtagtcctgtgcagcatggaccatgcgctggaaggcgcccagaaatgggccgtttccaataagatgccgtggccggtcttcctgttcggctacctggacaacctttccaaggaaagccctctgatccgcaagaattatcccggtcccatcccctccctggtgctggtggacgccaacgggaacaaaatcgcttccggcagcatggatggactggtgcggaaggtggaggagctggccagcgcggaaaaggaaaaggaggcaacggccgaatccgaataaacgaatcctcccctggcgggatttcacgttttttttccgcacccggacatgaagacgcaaaacagccccggaaggctaacctccggggctgtttgttaatgtttactgaacagatggactctgctgcgtcttaggcgcggagagcggcaccatccttggcttcaatggctttcttcgcttgggcgaagatggcgtcaaaagccttttcgtcggagacggccaggtcggcaagaaccttgcggtccagatcgacgttggcggctttcaggccttccataaagcgggaataggtcagaccgcggtcgcggacggcagcggaaatacgggcgatccagagacggcggaattgtcccttgcgtctcttgcggtcgcggtattcatactgccaagccttgtaaacagcatccttggcgtagcggaagagtttgctgcggaaaccgcggaaacccttggcacgcaagagaatgcgcttacggcgcttgcgagaggccggtccattagtggcacgtggcatagcttatttctatttctatcttgaacagactgttcttcctcacctccctgcagtctcgcctgttcttatcttctcattggaagaaggctgcatgaaggccccccgttcagcggggggaaagctcggcgttggtcgagcgtttccgcggtttaggcgaaaggcaggttctgcttgactgcccagacttgcgtttcgtccaccagagccaccttgccaagctgacgcttgcgcttgctggatttcttctggaggatgtggcgcttaccctgtttacggcgcagtaccttgcccgtgccggtaaccttgaaacgcttggcgacagccttgcgagttttattgataccacctttgcgggtcatggtggaaggagtataggcgccaatccgctcttggcaagtggaaaatgaccccgaaacatttttccggttaaaatggcacgcttccccacctgcccggtccccctcccggaccagtgcggcacgctcaaattccggaggaaaggcggccttcctttttctctccctccttcgggacatccgctcttttggcgcaggagatggaataaagcagcaggacggggaacagcaattccagaggcagcatatagcggacttcatacgtagtcgccgccgcgccaatggccagaaccactccgtaaaatggcacaaaagggatcagatacgcctttttcttcatcattccgtaaacgaggaagctgagcacgcagccgtaaaacagggaaagctgcggcatgtccctgacgttgcccgcaggcaggttccaaaccatctggctgttcagaagaagaatcttccccgccagcaggggattgtccgcagaaacggagaaaaacagattcctgacaagttcccctttgccggacaaggtccacgcaaacccatacttcattcccgtctcccaggactcaaacaggcccgtgtggagatacttctgcccgtacccggctgacactgcgggatgcagggaatcttcataaaggcggtactgcctcatgatgacgcccctaggcatgatttcccgttcaatcagctccatgtctccgtcactcaccttcccgccctctgcaacaatatcacagaccacatgagccatcttggcatacttggtgccggacgcgccgctttccgcatccatcagaaagggaagaacgagaaaagcgaacagccagcagcaaattccccctatcacgggaatccccaggcggcggaattccgcacggtgatggaacatatggacggacagggccgcgacagtaagaaaaaacggaacggctccgtcatagcgcaggcacccggttccggccagcccaagaccgatcagccacagggcggaggtgcgtttttccaataaccaggagcacaatcccaccgtaagcgccatcaggaaaatggaatagggaacgtccttgatcaccgtcgtcaccatctcaaactggaacaggcacagcaagacggctcccagcacgatcagcgcccgcatccgttcgcgcgccgcccaggaaacgatcatgaagcaaacggacaacagcagccccagttgaaccagaacgatggcctgaaatcccggccagacgcttaaaatacccttgcacagcagggtgtgggccagcgtatgcatcaaattatactgtccgctgacgatctggggatactggcgatattggaaatcaaaggaacaccgtgaacccgcatgccaccaccacgccagcacgacgatggaaataacggccatgacgccccatttcccccaggggctccactccgtttcatggcgcgcgccataccataccacgccattcaacgcttgtacggacaggcataaagccgttaaaaaaattccatactggacaatagaggacgcggcgccctcccaggttccgaaacacaggccatccgcacggaacacgagacccagggggaaaagaatgacactgcaaattacgcaggcagccaccaccttcttccacggcagcatgcagtcatccgcacgccagcgccataaaacaagcagagaagctagaatcacgaagaaaaagaatacgccaaacatcattccgtcacagtcaatgaacccagtgccgctccggcgcctggacggataaactaacggattgctaatccgttacggattagcacggaatggactccatgccacagggagcgccgcaagccttgcggcatccggacatcaacaggaacggcagaaaacttttttccctgaaagtcagggaatcgtagcgagacacctgcttttcaacggctgcaaaggcttgcgccgctccaaaggccggtcatgcaattccggaaggtttcaccacaagggaacgtttctcaataaggacatggctattcagcataagtcccttgttataaaaaacaggccttgaccccggattagcaattcgttttttgaaatgcggcaacctcccatgccttctccgtaaaagggttccccgtttttggcagcgattgccgcggaacatttctcccgggaaaaacgattgaaattcaatcatcggcacgacgatcccgggaaaaaggcgtcattgcctccgtcccggtctggaacatccgggctttcccgttccggaggggaaaagaggcatcctttaaggaatgccctgctcttttttaccgccttcgcgcatttgcctgatttcatcccggatcagggcggcgcgttcaaattccagatgggaggccgcctccttcatttccgcctccagcctggcaatgcgctcttccagcccgtacccggcctcgtcctctgccacgcggaaggactcttcatcctcttccgcatacagtttcaactgcccctgttcggaccggctcaccgtctggggaacaatgccgtgctccagattgtacttctcctgaatgctccggcggtaatccgtcagctcaatcagccgcttgatggaatccgtcattacatccgcaaacaggacgcactccccgttcaaatggcgcgcggcgcggcccgccgtctgcaccagggacgtttcattgcgcaggaaaccttccttgtccgcatccagaatgcacaccagggagacttccggcaaatccagcccttccctgagcaggttgatgcccaccagaacgtctatcctccgggcacgcagggcgcgcagaatctccacgcgctcaatcgcgtccacatccgcatgaatgtaggagaccttcagccccacccccttcaggtactccgtcaggtcttccgccgtcttcttggtcagcgtcgtgaccagcacgcgttcattcttggcaacgcgctcgttgcacagggcgatcgtctcgtcaatctgccctttcaggggacggatggtgatcttcggctccagcaggccggtgggacggataatctgctccacaatcaggggtgtggaacgcttcgtgggatcaaacttctccaccggttccgtggacgggctgggagtgacgcggatatccttgggggaagtgaacagaatccccttgaagccttccggagccttttccccggacctggcggcgcggcgcacgggaatataagtcttgttgtccgcacggcagttcaccagctcaaacggccccggcgtagcggaggcgtacacgatctggttctgcctctccatgaactcatggaatttcagcggcctgttgtccagcgcgctgggcaggcggaagccgtgctccaccagaatattcttgcggctgcggtccccctcgtacatgccgcccagctggggcacggccacatggctttcatcaatcagggtcagggaatccttggggaagaaatccagcagcgtggagggggaactgcccggcaggcggccggaaagatggcgggaataattctcaatccccttgcagaagcccagttcttcaatcagctccagatcgtaatccgtacgcagtttcaggcgctgcgcttccaaaagacgcccatgcttctcaaaccatcccacgcggtcctccagctccgcccggatggccttaagcgccgcggcccgtttttccggagcggccacgtactgcttggccgggaaaaaggtgtaactccccagccgttcccgcacgcggccggaggtggaatcaatcagggaaacccgttccacctcgtctccgaaaaactccacgcggatcgcctccccttccgaataggcgggaaacacctccaccacctccccgcgcacgcggaacgtgccgcgggtaaaatcaaaatcctgccgctcaaacaggcgttccaccagctgccggaggaacacgtcccggtccatgatgtctccctcacgaatgcgcagggtcaggttacggtaatcttccggggtggacaggccgtaaatgcaggagacggacgccaccacaatcacgtcccggcgcgtcatcagggaattcatggcgttcaggctcaggcggtccagctcgtcattgatggcggaatccttctcgatataagtgtcggaactggcgatgtacgcctccggctggtaatagtcgaaataggaaacgtagtaatccaccgcgttattcgggaaaaagcttttcagctccgagtgaagctgcgcggcgagcgtcttgttgtgggaaatcaccagcgtgggcctgttcatccgggcgatcagattcgccatcgtgaacgtcttgccgctcccggtcacccccagcaggccctggtgcttgttgcccgcttccagagacttgagcagcttgccgatggcctgctcctggtccccggagggcttgaaggaggaatttaattcaaaagacgacatacgcgaggaagccagtataatccccccgccccgccgggctaggacaatgtttgacaattcccccctgctgacccagtatatgcggcatgtacattcccacgcaggaagaacggtatgcaaaaaaagggttcgtctccctcatcctgtgcgtcgtggtcccctcctgcctgtacgtctcccttctatccaagcaactgatgatggtgcgcgggcatgaatgggaagccatcatgaaaatcttcctggcgttcacctatccgctggcggcgctctttgccatgtcgggcattccgttcttctggtggtccgtgggcatctccctggcggtccacgcgggaattgtcatctggctgaagacggctccccgcctgtcgcccaaaaaggccatctgcatcgccctgtgcgtgggaatgctggatttcctgtttgtgaaaatattcccctttccggcgcaaatcatgggctgaactgccctgcggaacgcccggaatgttccgtcctccggttcaggactgttttttagccagggcaataatctgccttttgatctcgcgcgccgcttttttggaatccgcctggtaggcctcatacgtaaagcactgcgccccggagccgtcgctggcagtcagcaccagcttgggataaaacttgcccttttccagggcctccttcacgggagcggccaccgtggacttgcctcccttcaccgggagataaaccagcacgcaccgttttcccacggcttcaagaaacccctccgtcacgccggcggccagcgggcaggtcgtggccgtgttcgtataaagataggccacgggcttcttttgttctttcgctgttttcagagcctcttccatccggtccgtggtgaaagtgcttttgggcagcctgacatccgcccgtgaatggggggacgcggccagaagacagacactcaacagggtaattaacattttcatacgccgctaccatacgggcagccctggggcatgtcaaagacaaagctcccccgtttaatcttgaacgccagggcgcggtatggcagagtgcgttcacgcattcgtcgcgcctgtggcgaaattggtagacgcgccagacttaggatctggtgccgaaaggcgtacaggttcgagtcctgccaggcgcaccatttatgcccctccttaagtaaataacttgaaggggggtttttgtttatgatgaaaaattggaccctttcaagccgctttcgcccctatttgacaaagtatttccgccatgccaactacatcatgcacgggtatttggccgccatgtaaaacaacaatccagtgccttattcatcattatctacgcttgtcaccatcaggtaaggcgattgaatgaattactcagcagtaatgacaagaagtacccgactgacggctcccaacagaaaagccggcggccgcccttcgcactcgcctgccctgtccgtacatttggaagtcaattcgtgcccccggcaaagagaatattctaaaatcctgcttaaaaattaatttaaaatccttattatcaacacaaaaaaacaatcatgcataccatacccaagagaaaatagaacccgttaatatcggaaatttcataccacacccccaacaatacggtcacaactgtctcccggccgctatcagggcccggctccatttattcccagaaggcggagagtaaaaaccaaaccgctgattaccaattataaaggcttgttaacatttgacgccaatccggcagtattgtcctccgtcggcctgagatcgtgcgtttcggtcatctacacatcgacagacatgcacgctcaagcatgcgcccatgttcatcacgccaattgcggaaccctcacaccaactgatatttatcaagctatccagtctctttacccggataatccagactattcacccgatccccgtaaaatctatgtagtctatgcccacctcggcagcaacaatctatatgaagtggaaatcaaaaaattgccggaatgcgatattctcataaacaacatcatagaaatagaagaattgcctgtagataacttcggaatagataataatggctacataggttgagcttaatgacgtacccgcatgcccacgctcatttccttttccctggcaaacaagcagccctgagtttttcattcccttttccggaagtttacctgaactttttcaggaagggggcgatgaacgccgtgcccagccccaccagggcaatgagggagaaggaccaccggagggaggaagcatgggcaatgtggccgatgaccggaggccccagcaggaagcccagaaagccgatggtggagacggaggccagggctacgcttggtatcatttttttggattttccggccatgctgtagcaaaggggaacgatggaggaggtaccgaagcccaccagcaggaagcccagcgtggcggaccacagcatggggaacaggacggagaccagcagcccggaggcaatgagaatgccgctggcgcgcagcacgcgcacggggccgaagcgcatcaccatgcggtccgccgtaaagcgtcccagggccatggtgctcatgaacgccacgtagcccatctgcaccagtccgggaccgggctgcaccacgctttcaaagtacacgccgctccagtcaaacatggttccctcgctcaccatgcttccgaaggcgatcagtccgatcaccaagacataggcatctatgctccggaacatgcctccgccctgggtggaggagcggcgtgcatcccgcggcaggagggagggggaaaagacggccagaatgaccatgcacatcaggaaaatggcgatgaagtgcatttccgtggataccttccagtccaccatcaacgcccccagcagggcgccgaagaatcccgccaggctccacaagccatgaaaccgggccatgatgctgcactggtacagccgctccactcccacgccctgcgtgttgacggagatattcgtcaaattagcggccaccccgaagaaaaacagtccagccgccagttcccagaaggaggacgccatgcccagatacacaagcacggcgggataaaagatggaagccgctatcagtatcctccggctgccgcaacggcccaccagatagccggacagcgccatggcggacatttgccccaccggaacggcaaagagcacggagccaaggtcggcgtcattcagtcccagcgcattcttgatgtccggaatgcggcacgcccaactggcgaataccaggccctggagaaaatagaaggtgctgaccgacaggcggtagacgccctgcgtcgttttgggaagaggcagattcatgctggatttcctggtcacgcagacgctatccccattccctttccctggcaagagaaatcatctttcatacaataagaatttatccgcaaaagagacatagaggcaaggaataagccttaaggggatttttccccgccataggatttcccagggttgtcccctttcttctccatgaaaaacgccgcgttcccgacggagcacggcgtttgatgaaatggaataaggaagggtcagcggggatcgtggtgccagttcagggcccccttgcccagcgcgtacaggtaggccaccagcagaatgccgatgaagatgcacatggccgtgaaggattccggattcatcatcacatagtcccggaagttgacggcccagggatagaggaataccacttccaggtcaaagatgacgaagagcatggccaccatgtagaatttcacggagaacatgggagcgccttcccccatgggaatcatcccgcattcgtagggaatgtccgcaggcttgcgcacggaggagcgcttgcccatcaagatactgagcaacaagataatgccggccagccccagggctgccaccacttgcacaagcactgaaaagaattcctgattcatgacgtctggcacggatgtaccatatacgccccggaaaagcaaaactaaaaagggcggcggctttcatgctgacgggggcgcccgtttcctcccggaaccggaaccgttatgatggaccgcgttccccatgtccctgcattccttcctccagtcacggttccgccgcacattttccttagaaaagcgggcggcgcaacggttccactctccggaaccgataccgcaccgcagccactggagcatcgtcaaatggatgctcacgcgccgtccgcgcccctatccgtccgtggcggaaaacgcccgtattccctcctttcatgttcccgtggaacgggggcaatgggaggccgtcatggtcaatcatgccaccatcctgattcggctgcacggcctgaacgtgctgacggaccccgtctggtctggccgcgtgagccccgtggcatggatgggccccaaacggaagcggcccgcgggtatcgcatgggaggatctgccgcaggtggacgccgtactggtttcacacgaccattacgaccattttgacgcgcccaccctgaaaaggctggaggaacgcttccaccccatctttcttgttcctctggggctgcgccgcctgcttctgcgccattgcggcgcacaggcgcagatccgcgagctggactggtggcagtccgccgccctgccgtccggggatggggaaaccaccgtcacttttacccccgcacggcattacagcggccgcagtccattccacggagacgccaaccggtccctgtggggaggctttttcctgcgcgcggcggacggcccgggaatttattttgccggagatacggcccggacacgctttttcgcggaaatacgggaccgcctcggctctccggacctggcccttctttccatcgggtcctatcttccggcagaactcatggcaggcgtccatctgtcgccgcgcgacgcagtccgggcctttaaaacgctgcgcgccaggcagggcatggccttccacttcggcacctggcaactggcggacgacggctaccaggaaacgctggacgatttccgggaagcccttcgccgggaaggcgtggaggaagcattcttcattgccgcggacaacggctttacgctcccatcaaatggagaacccagtccccagccgcttccatcagaaccagatatcccgccagaatcccaagaaggggatcctccagcttgaacagcagaaagccagttcccggcaaaacgccgcccacgcaggcgaacacggccatcaccggcatggaacataagcctgccagccacgccaggatgccccatgcccttgttttaccagtttccctgctcccggcaatatggaccggacggctcagcagtccccggccccaccctgcggagcatggacctccagcaactttccgagcacctgcatgactccgttttcctgattggacggggcctcaaacgcggccatggcacggatttccggcacggcgttcgccacggcatagctgaaccgggcctgccgcatcatttccgcatcattcatctggtccccaaagaccatcgtttcctccggagaaatgcccagtttccgctgaatcagctccagggcggcgcccttatcggcccccttccggctgatgtccatccatttttctccggagacggccacctggaagccatgctccaaatccttcaggcggggataactgttttccttcgctcccttgaagtcatatacggctattttcaacagcttgtccccctgcacgtccagcaggtcatccacctccttgcagcgggtgtaataccggcgggcctcccggacgaattccggctgtttatcttcaatatatgcggagtccaggcccgcaaggacaatgcacgtcccttcaatgcgcctgatcatggcaatcagcccggccaccgtttcacggtccatgtccagcaccagccattctctggaaccagacgccacataggcgccgttttcggcaatgaacagcatccggtccgccacgggggcaaaggtccggcgcagtccgtcatactggcgcccgctggccgccgcaaagcggatgccccggtgttcaagttttttaaagagggagaaaaacacggggtccagttctcccttcccattgagcagcgttccatccatatcggacgcaataagtttgacggagtccataacgttgcctgaatcatcatgcgccgtttcttccaaggcaagagcggcttcagacagcacgggccaggcggcggaagagacgtttcagcacgcagtaacggaaataccgccttttttccggctgtttttacggaaaactggtgctccctgcattttttaacttcaatggcaacaacagcaaatgaaagaaattttaagacagacgtcacaaccgcaacgcctaacgcatcataccggattgtgaatccggacataattcaaataattggaattaaatgaaccacatcataagacccatgtccaatatgacgtccggggcatgacaccatattttccgccaccctcgcaaatgactttatccacgggcctcttttccatatcaggcgggaaaaaatctccctccggattcacaatccgccgtttaaatttccatataattcgctccgggcattccttgcgcgtaccattttttcattgcccgaagttacggattcctgcatcatggctttttgcagttcccctgcttatgatacacacgaccttaagaaagaaaaccctctggtttcttggagctttgagcgtttttgcggctcttgtcgcaggctccaccattttctggttcctcaggaatgacccttcccccgcggaatggaaattcaaccctatctggacaaaagcggaaagggagcaaattcttaccgcagcggatttcacggcgcaccgcagcccggagcgtttcattttccgcgggctttcccccaattcccgccatattgactggcacatgttttccgaggtttccatgcgccagtacatgcaggacgaaatcagggaaaggctccagatgatccggaatacggcggagagcgcggacggccgctgcagcacctcgtcccacgaaaccctgctgcacctggctgcagggctcggagaggtgcaattgctgggccgccttctgcagcgcaacgcggacccgaacctccagatcatcctgccgcaccaggcccttccctccatcccggggtccgaacagggggatacacccctgacttatgcctgccagcccggaatggacgataccaggcccctgccggtgcacaacaggctttcctgccttaacctgctgatccagaacggcgcggatgtggataaaccgggcccgatgggctggcctcccctcgtcatgacctgcgtagccggcatcggaggtgcgccctatgaggaaacggctctgtttcttctgaaatgcggggcggatatttccctccagccggaattgaggggtaaaaaaaccagtctgctgacctgggccgccgctgccggataccctcttctggtccgcaagctttgcgaagccgggtatgatcccaatttccgcggagagatgacccccccccttctttccctgaacctgaacactccgaaaaccgcgctgcaaatcgcgcataccctgctggagtacggggcggacgtcaacgcggccatgcccatgaacacggctccgccggattccgggggagacacggccctgctgaacctgtgccgccaattggctttcattgatatatcccatctcccccaaatcagggaactggtcaatcttttcatcagcgagggggcggacgtcaaccatcaaaacgcagccggggaaacggccctcatgctgtgctgccgtgacatgctgctgggggacgattcccttgaccgcctgaaactgggcattgcacgcctgctgctggaccaccaggcagacccttccctgcgtgacaagtacgggcgcacggtccttcagcagataggcaaccggtcaaacgaccatctgcacatggtcctgaagaacctgccggagttaaacgcttcaccgcttccgaaaaagagaggccgctgagttcctgccgcccccctgcggcaggacgccttttatttcacccgggcgttcaccgtatccagcaggacgccggcatccggtttggaaccggtgctgatgaaatggatgtaactggctccgttgggagactgattggccattttcagcgttccggccttcttcccgtccagggagaccacagcctgcggcccctgccacagaatggaaatttcatgccacgcgccgggcgcaaaaggaacttttttcatgcccagcagcagatggggcgcgggcttcagcttgatggggaaggtgaacagggcgtaatccttcgtggtggtatcacaggcattgaacaggcggtccgtcagggaaacctgaaggccggaatcgtccgcctggtccccgtccgccacgcggaagcggaacttgaccagccccgtggtcccgttcgggaagttccaggtggcgcccccgttctggtaatccaccccggctttttcattaaccagttccgtatcgtccaggcgcttgatttgcagcactttttttccacccccggaggggtcgggcaccagttcagcggagggtttgcggttatagctgcaatggccttttttctggggaatataggtatggatggtccactggccgtccaggtccctgcccgtctgcgtggcgcgcgtcttggcagccacccagcggcggtccacgatgaccaggcggcggtggtttttgtgctgccccagggaaaccaggatgcggttcttgtcaagctgcaccatttcactctggtgcttgccgcggtcctccggaccgtccagggtggcatagccggaatggttgcggtgttcgtccagaatgatttcccggaatccgtaccaggtcttgccctcgtcattggaaagggcaatgtggtgggaatcacggttggtgaacacgtcctcccacgtgccgttgcctgccgtagcgttttcaggcagggccatcgtgttcgtccacagggagacgatggttccgtcatccaggcggcccagcgtattcatggtcagggttccgaagaaacgggacggctccggcttgctccatgtttcaccgaaatccttggagaaagcctgccacgcctggtcctgggaggtgcgagccagcgcccacaaggtgccgtccttcatttccagcaccgtggcttccacggcattgttgaaccacctgacgccctggtggggcggcctggcttcatgcttgggagaggtaacgccatttttggacacgcgccaggtcaggcctccgtcgtcggaaatatggaacttggtgccgccgcccatgttatggaacggcacgatcaccctcctgcccttgttgacaaaggtgggcgtgcgcatgatgccgcccagttttttcagatttttctgcttctccggatttttccagtcctcctccagcttgccgtcgttcgtgaccgcaaaccacttgccgtccaggcctcccttggagaggaagatgaaccctccgatgggctgcacgcggatgaattccctggtcacggggttgcgcgcaatcgccggggattccttgggaatgcctccgtagttgggcgggtagccgctcggagccgccttcatttcccaggtctttccgttgtccttgctgaccaggtaatccggttccttgcgggtgccggagtaatggcggatttcacgggagttcacgcggatgaggccgcgtccggcatcggacggcggcgtagcgacaatttcaggctccggagcgggagcggcgttctgctgggcataacagcagcagacggaaccggcaaacaacgcaaacaacaggcttttcataaatcaaatactaaaggcggtacattttcctcaaacaggacttccccttcaagcacaattcccttcttccgcaaaaagaccaccgtcaggaatgcttgcccgcggatttcccgccgcggtatttcgcatccagctttttcagaagtacggccagttccttctccagcacctcgtaccccttggcgttgggatgcactacatccttcatcaattcattgcgcggagaaacgccgtccgcggaaaggagagccttccccggatcggcaaaaaagacgttttttccattctgcagctttgcgagcagcttgttcgtctgcttcaccggctccgccaggtttttctccttcctgggcagaatacccagcagcaggatttttgaagaggggcatttctgatgcaccaggcggacaaatgccttgatattgtccgcacaggcctgcggagcatccttccggtggcccagattgttggttcccagcagaataatgatgacccgcggggagatgccggccagctccccgttctgcacgcggtaataggcattgtccacgtaatcaaagccaaagcccatgttggtcaccgcatggggaccgaacaatttctcccaggaggcctcccctctcttgttgctgtccccggaaggctcgcccccccagtagtgggtaatgctgtcccctatcatcacatattccggcttcacggcccggttccgcttcttgacggcttcatgccgcgcattccagtcatacggatcccgctggtggggttccggcttcagggtggcgggcagcgcggccgcaggagcggaaaatgcggggagcgccaggcaggcggcgcccagcagcgcagtgaacgtatacagcagggaattcatgacggaaaaacggaattgaaaagcagtttaaagaaatacttccgcacatcaagaccacatgctgaagcggcctttcccggaagaaaaagaccactgccccgacagccggccatgccgcgccggaacatcaggacgcgcatcctcccattcctgtcttaccgaactacggaacctcccttgtatctgccgtctattttctccagaagcgaactcaattccttccccagcacgtcatatcccgcagcactgggatgcaagccatccaccagcaggccgctctttggcgacacgccatcttctgccagaaacgccgtgcccggattggcaaaaaacaccctctttccatcagcaagaacggatatcattttattggtttccacaatcaggggcgccaccgccttttcctttctgggcagaatgcccaggagcaggattttagaggccgggcacttccggcccaccaggctcacaaaagccttgaggttgtccgcgcatgcccggggagtatccttcctgccgccaagattattggttcccaaaagcacgatgatcacgcgcggagagattccgtccagttccccaagctgcacacggtagtaggcattgtccacgtaatctgagccaaaccccatattggtcaccgtatgaggggagaaaagatttttccatgcctcctttcccgtccccagggccctgttgtctccggaaggctcccctccccagcggtgggtaatgctgtcgccaaagacggcatattccggattcacgctccggttcctctccatcacggccttatgacggccattccagtcataaacggcgcgctcgttcacctgaggctttagcgtagacggcagctcattggcgcacgcgccggagaaaaaggccgcgcaagaaactcccgccagcaacaaacagaggaatgaatgggatttcatcaaaatgatagttaaaatattgttggcggcaatttggagagtaaagaaaaaactatcccccataaccgtaaatttccctcattttttattccggaacagccagatgcctgaaacagaccagcgtaaccgctcccgttccccctcctggaagaattggccttgttgaccgataacattcccggtataatcaggtggtgcggagtttcgccgcttccgggctttcagcgggcgcggagcgtctttctccggtcttcttcactacatcctatttatgatcagcatagtaaaagacttgaaggagtcccccgcccttccgcaggaatggcagggattcaagccgggagcatggacggagtccattgacgtacgggatttcatccagaacaactacacgccctattccggcaatgaagagtttctttccggcccctcccaacgcacgctccggctctgggagaaactgaaagtcctgctgaaacgggaaatagacaacggcggcgtgctggatgcggaccaggaagtggtctcctccatcgtctcccacaagcccggctacattgacaaggagctggaagtggtggtgggcctccagacggacgctcccctgaaacgcgccctgatgcccttcggcggcctgcgcatggcccagcaggccctggaatcctacgggttcaagatgtgcgaaaaaacggcggatattttcaacaagatacgcaagacgcataacgagggcgttttcgacgcctacacttccgacatccgcgccgcccgctccgccggcatcatcaccggacttccggacgcctacggccgcggccgcatcatcggggactaccgccgcgtggccctgtacggcacggacaagctgaccgccgaacgccgcagagacctcaaaaaccatgaaaacctccccctcacggacgaagtcatccgcctgcgcgaggaaatgagcgaacaaatccgcgccctggaggaactcgcccggatgggcgcctcctacggctgcgacctcacccgccccgccgggaacgcccgcgaagccgtgcaatggacctacctgggctacctggccgccgtgaaggaacagaacggcgcggccatgtccctgggccgcgtctccaccttctttgacatttactttacccgcgacctggaacagggcctcatcacggaagagggagtgcaggaaatcattgaccagttcgtgatgaagctgcgcatcgtccgcttcatccgcacgccggactacaacaacctgttctccggggaccccacctgggtgacggaatccatcggcggcatgggggaagacgggcgcaccctcgtcacccgcagctccttccgcatgctccagacgctgtataacctgggtccggctccggagccgaacctgacggtgctgtggtccgggaacctgccggaagccttcaagaatttctgcgccaaggtttccattgaaacgtcctccgtccagtacgagaacgacgacctgatgcgcccgcactggggcgacgactacggcatcgcctgctgcgtgtccgccatgcgcatcggcaagcagatgcaattcttcggcgcgcgcgccaacctcgccaagtgcctgctgtacgccctgaacggcggcatggacgaactcaaggggaaacaggtggccccgccctccccgcgctatacggaggaagtgctcaagtacgacgaagtgatggccctgtacgacaagatgcaggactggcttgccaaaacctacgttgacgcgctgaacatcatccactacatgcacgacaagtactgctatgaacgcattgaaatggcgctgcatgatccggaaatcctgcgcaccatggccacgggcatcgccgggctctccgtggccgcggactccctgtccgccatcaaatacgccaccgtgaaggccgtccgcaatgaagagggcctgattgtggatttcaagacggaaggggaattcccgtgctacgggaacaacgacccgcgcgtggacgaaatcgcatgcagcctggtcagcaacttcatggaaaagctgcgcaagctccacacctaccgcaactccgtgcccacccagtccatcctgaccatcacctccaacgtggtgtacggcaagaagacgggcaacacgccggacggccgccgcgccggggaaccgttcgcgcccggcgccaaccccatgcacggaagggacaggaacggagccgtggcctccatgctctccgtagccaaattgtcctatggcgactccctggacggcatctcctacaccttctccatcgtgccgcaggccctggacaaggaggaacgggaacgccgcacgaagctcgtctccctgctggacgcctactttgccgccaccggacaccacatcaacgtgaacgtgctggagcgagaaaccctccttgacgcgatggaccacccggaaaaatacccccagctcaccatccgcgtttccggctatgccgtgaacttcatcaagctgacccgggaacagcagcaggaggtcatcaaccgcaccttccatacccgttaacccagccaggaagcggatgccgcaggctttctcccagaatccggccccggacggtgaaaccgccgtcaccggactggtccattccgtggaatcctgcggcaccgtggacggtcccggcatccgctttatccttttcctgtccgggtgcagcctgcgctgccgctattgccacaatccggacacctcctacgtgcggaggggacgccgcagaagcgcggccgacgtccttgaagaaatagcccgctaccgggatttcctgctggcggcgggcgggggcgtcaccctttccgggggagatccccttttccagccggattttgcgagaaccgtactgaaaggatgcaagaaactggggctgcacacctgcctggacacctccggccatctgggcgcgaacgcggatgaagaactgctggggaatacggacctcgtcctgctggacatcaaggcgtggaacccggaacggtaccgggccctggcaggcggggaattgcgccccaccctggaattcgcggaacgcctggccgccctccgcaaacccgtctggctgcgctacgtcctggttccgggcctcacggacaacatggaagacatcgcagagctttcccgccatgcggcgcgcctgggcaacgtggagcgcgtggacgtgctccccttccaccagatggggcgcttcaagtgggatgaactgaagctggactacaccttgaaggacgttccggaaccttccgcggaactgacggaacaggtccgcggcatcttccgccaggaagaaaatttaaaaagttctgtgcattgaaggcaggaaaaattcttttcaaccatgaggcgtttataaaacatccattcctccttttgccattccacgtaaaatccctaccttatattcagcttttaaagcacgttcacgccatattctgacatccaaagccagaccctcctcccgtgcttgtaacagcaacgcaagaatacattcccgcatacagggaggaattttttctccctgttccaaacgaactatatcggtcacgtcatatccagacaattcagcaagatgggccagcgttaaaccggcatcatttctcaactttttaaaattaatgcctttagacatgacttcctgtttaacacaggagtttcttcatcataagaaaaaggactaagctcttttcttggtagagaaacccgttaaatttcagaggttgttatctccctcagagcatccagtacctcctgcacggcaatatggcggttgcagggaacgtcacggtcgcactccttcaggaagcagggggaacagcactggtggctgtacagggagcggttgaaggggcccatgggccggcaaacgtccgggaggcgggtggaaaacagggtcaccaccggaagaccgcggaaggagcagagggacggaatgtccccatccacagccacggccgccacggcggcatccatcacggggaacaaggcttccggagttcccaccgccagctccacattcaggcgttccgccagagcggacgcgcgttcccggtcttcttccagagcggccagtacggccctccccggcagaagggaaaccagctccgcccattgttcctcactccattcactggcgctgcccaagctggagaacggagccagcaggatgggggcgttttccgccgcagccgcctttttcaccgggaacagggacggattccaggcatccagcccgtgcagcccccccagttgcagataaagctgaacccggtgcatggggggagcggcgcgcagcacgggagccttcacccggaatttgtatttccgtgcgccgggatgcgtgtccagcccggagaacatcatgggcccgtacggttccagcgccttgagcgtttccatgtcctggtccagcatgacgcccaggtccagcggaccgtcattgtaaaattcatccgcggccagcgcctcccggagctgtttcagggaatcgtgcggcagaacatgggtgacttccggcaccgccttccatacccccgcctgcgcggacgggcagatgacgttcacctgcatgtcgcgccggacggctttcagcgcacggaccaggggaacggtcaccagggcttcatccagcgccttgggaacagccaccagaatgcggtacggctgcagttccatgttttccagaaggccgtccgtttttttatcctgcggagcaaagcggtcgatggacttccagcggtggtgcatccagaacacgtccagaacggacttgcggatcaacgtttccaggccccggttcacttcaatggtgtcccccgccagggaaccgtccgagttggaaaaatccaccacgttccccatgtccgctatccagtgtccgggagaatccgtgcgtactgcgatggctaccatatccgctcccgttctcttccgcagcaaagcaggcaacggcgtcgtgccggtcaccttgccgaagaaggggacatacaccccctcccagacgaactggtcgctcagcacacccagggcgccgccctccttgaccatcttcatgggagccttgatgccgccttccttggaaaacatccgcgtgccccgctccgtgcgccgcttgtatacgtattcctccatcagcgggttgtcaaactggcggtacatggacccgtaacgttccacttccgggaagaagacgcgtattcttgccagcgcctcccagttgccggaatgggctatggcgcatacctgcccgcgcctttccaccgcaggagcggcaaattcttcatgccccgcgatggtgacgcattttttcaactgctcatccgtcagggtggccgtcttcgcggagcacaggaaattggctatcgtccttttgaaattttccctgctcaatttttgcagttccctgccgcgcagggccggatccagcacaatgcgcaggtttctttccacaattttccggcgttgcggcagcaagtaccacgccacaccgcccgccacgcgccccaggcggtaaagcgttttcatgcccacgagcttcagcagcccttccatgatcaggaatcctttcattcccagctgatgggcaaatgcagggcgggaaggagaggatgaaggggagctcgtcataagaaaaccggagaacattttatacgaatcccttccggtccacaaaccctttattctcccgcatgcggcttccttcccgcgttccggcggcctgccgtcccgggaagccccgttccacgcctccttcccacggcggaaaagaaccgctgccggaacggaaactgcaccgccctcccgccccgttccggatttcaccatgaactgttactcctccaaatgcagggaaaagcttccggaaggctgcaactgccgcaagctgcagcccggggccatacagggacccggaccgcagcaggtcatggaaaagatgtatcccgtccggacagcggataccgtttacatgacatccgcacgtccgaaggaagggccggaaaaaacagaaactccaccagtacatggcggcccagagccgccatcggaaaaagaagagccttctttctgcaacagttccgtgaaacaataaaaaagcggacattcccaccggaaatgtccgccctgctgcctgccgtttgaaatgtattttttccgcctctctcacttccggcggcgcaccagcagcgccatcagtcccagaacgctcaaggaggcggccgctggttcgggaaccatgttccacgcctccttgatttcttgtcccgtcaatgcggtaccataagccttgaaatccgcgatgctgaaggaatgttcatccgtcgtgcctccgccgacggtcacggttccgttctggccgccgttgagccccgcggacaactggggggtatccacgatattttccccgttcaggaaaatctggaaatccgttttccgggtggtggtatccgtactgagggacatggagaggttgaaccatcctccgtcaatgacgtcctgcccaatggtgaaggtctggcccgcttctcccgttctcctggaagtaaacgtgccgtccccattgtaaacaagctggaggccgcggagagaacccgtctctccaaagctgtaaatagtggcggcagaccccagggaggacaaatccagccacatgcccaccgtctgcgtagaaatgttgcggtccccgcccgtcaccgtcgcccagtccgtgtaggaagccgctgaattgaccgcggaggaaatgctccatccttccagattgatgccgcttcccgtcatgaattgttccgagggagcgccggaagaaaattcccaggcggcggcagttgcggcgcaggcggaaccaatgccggcagccagcatgatggttaagaatgtctttttcattatcttaaacagagttgatcgtcagttggttgaagggaatatccagaaccttcccttccatgcaaaaccaataccggatttgcaatccggtattgattctacagtcgggaaaagctgtccttcgcgaaactccggcatcgtgggtacgaaccttaattgatattacccagctcctttccacagccaggcggtatgcggcaacggttattgaacggaagcttccgctgcgctacagaacgcgtttcaaccacgaaaggcgggaaccttccgctcccaggcgacggagccgcaaaatcaccgggcaccggcaagcgaaatttccccaaaccgtttttctttcaattttgtaggcttgacttcggattgcaaatccgtccatgcgtactatcttctcttccgcaagccgcagaagcagttcgtccggaactgcaattttacttttggtaaagaaatgactttacaattcttaaccaaacggtatattccgtctcccgaaccgaacaccaaaccggagttacacaccatgaaagttctttcttccttagcctctatgaagcgccgccacgcagactgccaaatcgtgaagcgcaagggcacgctgtatgtgatttgcaagagcaatcccaagtttaaagcccgccagggcgccacggcaggtacgcgtctttccaagaagggcgtcaagtaaaccctggcccagcacagatttcaagaagaccgccgcccgccgggtgccggtctttttttgctgacaaagccccttcccgcacatccatgcagcttcccaccgtccaaaccagatttctggacctgcccggctccttttccctgcggaacggcgccgtgctggacaaggtgcgcgtggcctacgagcagtacggcgccctgacgccggagaaggacaacgtaatcctgctgttccacgctctttccggcagccagcacgcctacggttacaatccggaagttccgggcaccgggtccctctggaaaccggaaaaccacgagggctggtggaacagcatcatcggccccggcaagccgctggatacggaccgcttctgcatcatctgcgccaattacctggggggttgctacggcaccaccggaccggccagcccatcccccgcggacggcctgccctacggctcccgtttcccgcatgtggaggcggcggaccaggcgcgcctccaggcccttctgctggacagcctgggaatagaacgcattcatctggcaggaccgtccgtaggcggcctgatcgccctcagcttcgcgtgccagttcccggaacgggtccggagcttcatttccatcggctccggctaccgggcttccattgaacaccgtttgtccctgtttgaacaaatcctggccatcgagcttgatccggatttccgcgggggcgactattaccagggaccggcccccaaaaaggggctggcgttcgcgcgcatcatcggccacaagtcgttcgtataccaggaaggcctggaacagcgcgccagaaaggaagtggggggcaagtccggactgctcacatggatgacgcccacccgcagcacacagagctacatgctgcaccaggggaccaagtttgcggaacgctttgacgcgaacgcctacatccgcattgcggacatgtgggcggagttcgacatccgcgaccacgctccggacggaacgtttaaaaccgctctggaaggcttccgccgcgcaggaattcccgcgctcgtcttttccattgatacggattgctgcttccgcccggcggaacagcaggattttgtggcgcagctggaatccgcgcgcattcccgtggagttccataccatcgtttccaccaaggggcacgattccttcctgctggagccggagctttacgcggaacccatccggcgcattctggcggaagggcacccggaacacactccgtaagcttttccgttcaagccggggaaacctccctccccatccgttctcctgataaccgcatccccgggaacaagggtccccgcccttgtaaagcgattcccacaaacaaggaggcgccacgggtccgggcaagcccggaagacggattgacagcaaagccctccggctttagtctccctgtcaaggcactggacgcttccggcgaatcatgaaaactgcggattccccacggagcatttcatggcagccgcacaggggccggccaccagggaaaggaaggatatgagctactattttatcgtaacggtttctttaagctccgatgcagacacttcatacgattcctacatcagggaagtgaagcccattgttgaaaaacacggcggcgaatacctggtcaggaccaatgaggtcattccgctgagctccgggtggaagccgaaccgcgtgatcgtcatccgttttccctccagggaaagcctggaacgctgcttttcttcggaagaataccggcagatcaagtcactgcgtgaagattccgttgacagccacgccatcatcgtgaaaggaacggatggtgatgaaactcggtgaagggctgcatcagatcaggattgatttcccggcaagcacaggagaacggggataagggggggctttgccgcgcatgccggaatggaccggcacccctgcaaaccggatttccgcgacggcccaactaaaaaaataaccaaattcaggtgaacccgatccagggttccgctgtcacactcctatgactgatactcattacacctccgagacggagaacgtcgggcaattccgctgtgaaaccacctacattccctccaacatcacttttgccacggacctgcccgcctcttttgaaggccgcgcggagtttccctcccccggcgtgatgctcggttccacgctcgcctcctgcatgatgagcctggtttccgtggtcgcggccagaaagggcgtggacctgaaaggcatgcgcgttctggcgcgcgcggtggaatcctccaaggggattgaaaagattgagctgaaggccgtaatgcccctggaaagcagccatcccctccgttccatgctggaaaaaacggccatgagctgcccggtccgccaggcgctgaggccggacatggaaacgcccgttgaatgggaatggaagtaagccgcccatgagagggcggaaatcactcttcacgttatcctataaagaaatcccgcccattcacgaagaaggccgctgcggattattccgcagcggccttctgattaactgacgttttcttcctttagaagttgtagcgatagccgatgcttccgttgatggagctggaaccgctgcggatgtccgcattgccgtccacgaagatgacgccctgggtgcctacggggacgctcagccccacaccggcctggaaggccgtgcttcccaccttggcgccgtacaccggacgcgtgtaggaggggtccgccaggaagcccacattggcctgcccgcggcggtcgcccatgtcctgggagacgttcacccggatttcacccagcgcttcacgcccgaagacgttggagcccatgaggccggagagcctggcgcccacggcgactgcggccgtggtcagttcctggtcctccaccctcagcccggcatttccggcggagccgctttcactgtagccgtccatgcgcgtcgtcacgatggaggcgttgaacaggggctgaagaatcacgctcttgtcttcattgagggcgatgtcgtacgccagctcgtacatggcgccgaagccggcccccgtcgtactgccgtgggcctggtaggagcccgagccgtagtccaccgtgcgcgtgagcctggcatcattccagccgcccgtcagaataagcaggtgggaccatttgcgggactggtaccgggcgaacaggttgacgtagtagctgtccaggtcaccgtccgcggtatcagccgcattcgccgtgaggcttccgtagttggccgtgaaggccgcgccagcggtgaagttgtcgttgatgtccacgtccatgcctaccgttccgccccaggtggtgagctcatagccgctttcatcccccttggtgtccagcttggcataagacccggtgccctgcatccacatgtggaagtacggcatgtcctcatggacgtacgcggggttcacgcccatctgcgccacgcggttgcggatccagcccatctggtcgcgcagggagtcacgctgggcgatgcccaggctggtgaccgtgctacccgcggcggcggccagcttgcgggccgcgccggagtagtcgcccgcgttctgggagagcagaacggaggtgtagaagtcgcgcagggtggtgccttcctccatatggtagcgggagttccacagcaggtccgccccggtggccgcgttccgcgtcagggaggagtcacggaagatgttttccgtgcgcgccgtgccggtgaggatgatggccgtcatgctgtcattcgtggtcagagacaggttttcatacagggagctgaggatcatgtcctggagggtgacgttgtcgcccagggataccagcgcgccgtccgtcgtcttgaacagttccatgttcagcgtttccgtgctccccgtcaccagggtgtccaggttggtcatgaccagcgtcacttctcccgttccgtcgcccagcgtaatgtttccgctggaggtgacgaaggggttccccaggccatccaccgtggtggaggacgtggtgatggtgaccgtgctgttccccgtcacgctcaagccgtccgtgccaagcgtcaactgggtcttgggatcagacgcgctgccgatgttgagcgtgcctccgttcaccgtaatgcccttgtaggcagcctgggcgggattgccgccttccgcagccgcgccggccagggtcagcgcgccgccgtcgctcacgttcaggttgtagccggcattgcccgcacccttgatggtttgcacgctgccatttccggatttgaagttgagcgttccggaagccccgtccagcgtaccggtaaaggtatgggaggcggaggagtccaccgtcatttccgcaccgctcagcttcagggcgcccccgcccgtcaagccggagaccgtgttcacggagccggccgcggtggaaagcgcggaaccttcccggatgtccagcagaacgccgtccagggaggagccgttgcccagcgtcagggaggagtccgttcccgttcctccgagggtcagcgtgccgtcaccggagatggtcacatcagtcacatggctgccggcctgctggccggcgaggaccagctgggcgccgcggcccaggtccagggttcctccacccgtgccggaggccaggttttccaccgtcgtcacgcgggaggcgccgtcattcctgccgcccagcgtgatgtctcccccggcgagctccagcgtagtgaggctgttgcccgtaccgttcaggacaatgttcccttccgtggagctcagcatggagtcatttccggtgaagctgccttccacggtgagggtttccgctcctttcttgataaagtccacatggtccccgctgatggagccgccgtagctgttgcctccggcgtccacgttctggatcaggtccaccacggcatggttggcggcagcgtccgccgccgtattcgtcaccaccagagcgccattgctgccgatcaggttgctgactttcaggccgtctccgttccgggaggcttcaggagcaccgttcaggcttacattgagcgtggttccgttgatgcccacggccttgtagggatccagggcggcgtagtcgctgatgttggggttgtcagagttgggcgtggtgtccacgaggtagacgaggtccgtattgccgctgaccatcagcgttccgtccgcacccaggacttccgtcacggcataaccgagggaggccagaagcggggagaaggctatctgcttgtagttgtccacggtcagggttcccgtcgtcagcaccagccctacgccatcggcggaatcccggttggcggagagcaggtccaggacgccctggttgctgaggttgatggtcgtgttggcggcggagagcgtcaggctgtccgcatcaatgacgccctgcccggttgttccgcccgcggtaaggctgccggaatccagtttcagcgtcaccgtctttcccgtcatgtccaggccgccggagatgccggtgagccgggagtagtcttccatgacgatggagccgaccatggagccggacagaccgcccagattgatggtgttcagggcgccctgcgttccggcggaagcggccacttccacgtttccggtggttttagctcccgcgtttgccaggcttcccttcgtgatcaggatggcgttggccgcattctgggaggccaggtcaagaatcccgttgttgacggtgacccgcccggaccccagggagtcggcccccgcgagggtgacggtgcccgttccggagagcgtagtggaaccggtgaacccggtgttgccggccgccagcgttatattccccgtggtgtcgacgaccagggaaccggctccggagagggccccggcccaggcgcttccgtcacccagccgcgccgtagcgccgcccgcaatggagagggtgcccaggaaggtgttcgctccggtgagctccagcgttccggcgtttacggataccgtgctgccggccgcgccgctgatgacgccgccgtaggagaagtcgcgggcaaaggccagcgtggagttgctctggatgtcaatgctgtcccccagcttggtcacattggcggagttcaccgtgactgtgccgcggtgcaccttgagctgtccgtccaggttgacgccgcccgtgagggtgatgttgcccgcgccctgggtggagaacgccgtgccgctcagatcgccgctgagggtgaagtccttggtggcgaagatctggttgcctgtaaagacgatgtcattggcaaaggcgcccccggccgtgccgttccattccgcacggacgttggagtccgccaggttcacggtgccgtccgttcccatggtcacgttgttcaattggaagtagccggatgtcacggacagggttccctggaatgccgtgctcatgttcaggacgttggctccgtagctggttcccaggcccacggaaatggtgccggtgccggaggcatccaggttcagcgccgtgttgtcattggcgccgctgaccgtcagcacggagccggcggccagctccacggtttttccgttggccagggccttggcggcggtagccgtcacattttcacccaggatcagggagccgtccgtccacgtcatgttgtctgcggtgaacgccgtggcaaaggcgccggacgccagattgaggctcccgccctgaaggttgatcatgcccatgcccggctggacgtcagccgtcgccagcgtgagcgtgccacccgtaatggtgacagccccggaaccgagagagttggccacctgggccaccagctcgccctgctggagggagatggctcccgcccagcccgtgttgtccaggttcagggtaagcttgccttcgccacgcttggtcagcgtgccttgcgcaatttttccggtgccgtctgaggcgaatacatagtcgctgcccgcggcgttgttcaccgtgatggaggccggattcaccgctccggacagggtgacggtgcccgctccggagctgttgaagaccaggttctggccggcggccgtatccgccgagccgtcaatgccccactgggcgcccgtgttcgtgtcgctccaggtcatgcctgccgttccctgccagatccacacgtccccggcggaggtcaccaccagcttgagggtggtgcccgtctggaccagttcgtaaatcagcgtttcgtctccggtatagccggcccagttgaagatggcgctggcggcatcaagtccgctggcagcagaaatcagggtgtattccccggcttccgtaatcccttcaaggccgttcagggtgagggtgaaggtcccggcgccaaaggctccgcccacacccatggaggaactgatgtccatcgtcagggtggagttgttcgccagattcagcgcgccggcggtggtcatgcgggtgttggcggccatcgtgatattccccagcgcggtggctccggtggaagtcagggccagcgttcctccgcggatgtccgtcagcccggtataactgaccgtgccccccagcgtcagcgtttcatcgctgaccttggtcagggacaggactccggtggtgtcataggagatggtggtggctccgtaggcaatgacaacgccctggtccgtgatggtgccgttgtacgtgccggagcttaccgtaagcgtacgcgctccccccacggcccccacctgggagttggccgtgccgtccagggaggcgatttcaatatcccccagcacgcgcatgaaggcgaatccggtggtatccgtgccggacgtgagggtgaccccgccctgcgccatggaggtgcgcatgtcaagccccgtactgtacccgttggaggcgttcatggtgatcatgccggtaaatccggaggcgtcaccgccgatgatgagcttgccgttggagttgtacctgccgtcaccccctccgcggctgtatgtcagggagcctgcgcctgtaagcgttccggtgaagcccatttccttggcccagttgtcccggcccaccagggtggccgccccgttgacggtaacggttcccgtaaagttatgctggtaattggtggcgtttgcctgggaggcgtctacccatttcagggagaccgcgtcagatgcggctgtgcccagaatcaaatcggaaccgatggtgtggtgggcgctgttgcccgcaatgatcagggacgtgccgttctgcagggtgacggaagagccggcgctgccccaattgatggcagtggagccgccccctatctggacgttgccttcctgcacgatcagatggccggagttggcccccgtcaatttcaacaatcccgtaccggttttccggacggacccggctcccgtgatgttattgccgaaggtaaggtcggaaggcgttaccagattgatgaatgagttggtatccgcggcaagggagaacgccgggttggtcacggttcccagattcaccgtgaccgtcgcgccgttggctgctcccagggaggaacccgcgccccaagtgatgcccgtggcaggcaggtccgtatcatacccgaacgccagaacgccctggttcacggctacggtggttcccgtaccgaggatggaagcggagcccagcaccagggttcccgtgccttccttggtaacggcggtattggcaattccgccggttcccgccagttcatagcgggtggtggtgttgcggaccagcatggaaccgggggagacctcggaatcaagctgcaccgcggaggtggcgatcccggcctggtccgcgaaggaaaccgccaagccgtccgcatacgtggcgggcgtgccaccgtccgtccagatgttttccgcgctccagaccccgttttcaccgcccgcccacagcaggagggtttccgccgtgtaaaccaggtcccggccgttgttggaaagggtgatggttcccgccacgccgtccgcaaagacggccttgatggaagagatgttggtcagtccggtggtggagagcacggacatgccgtccgtcaaggcgccaaacccggtaaggtccaggttcaattccccttccgcggaaagggcgaacgtgccattcacgttgattcccgttccggcgcctcccgccagggccagcgtgctggagccgtccacgttcaggttccccgtaaagaaggagttctggaacatggtcacgatgtcgaagccggtaatgaccgtattggagaaggagatggcctggtccgccgtattgccgtaaccgcccagaagcagggaggaggtgccgcctaccgtgccttccgacacattcagcgtgctgcccgtgcggaacacggcttttttaacggtgagggtggcgttcccgttcacggcggaccttgctccgccgccgcccgcataaagggctcccgtataggcgccgccatccagcgtcaggctggaattgcctctgaccgtggaagttccggcagtgccatagccgccgccgtaaatggccccggtaaagacggcgtcactggcggcagtgatgctgacgttggaatcgccgccaatcgtataagttccggaacttcctgaataggaaccgcccacaatgcttttgacgaagtttccggaggctgtccccaggtcaatcgtcacattggtgcttccggtgatggaagagccggaagtggagttggcttcataggcgctgccgccgatgatgaaaccccgggctacggaattgagagagacggtttcatccgtcacgctctgcatgctgtgcactacgacgtacgtgctgccgtcaatgttgttggtggagttgtgggccgccgtaccgccgcctatcaagctgcccttgatgacggcgttgccgtccacagacacgtaaacattccccgtaatgccggcagcctggccgtccttgtagttgccgcccaccacccagttgacggaggtatccccctgaatctgggtatggacgtcgccggtgatgttccacttgccggtgccgctccagttgttggcatagctgccgccgatgatgaggctgtaattgcccccaagtacatccgtccagatgccggtggtaatttccgtagccgtggcattggtcgcagcgttgtaatagccgccggccagtgtcactcccgtcagatcccccgttccggtgacgacgttcacggaaccgaatccctcttgcatggacgcggcgcgaatgttgtacagggccagcgtctgctggtccgccagtgttccggcagcggaggtgggagcgcttcccagcccccacgcggaatcccatgcggtatcatacgcgccggaccccgtaaacgtgatgaccgttttcccgtccacggtgctgatggtgtacagggattcgtcaatgtccgccagcgtgaagccgtcccccaggtcaacgcccagattgtaggaggtgttcaccagcgcttcggaaccgaacaggtcctgaaattcctggaaaccggaaaagtcgatcaggccggaagtcagcgtcacgttctgcagcacgctgccgacattgtccatggaagtataataaaggcggcccccgtccacggttacgttgcccgtaatcgtcccggaaccgttggcgaggatgcccagcgtttcccctaccgtgaaggcgtcctggaaatgcatggttcccgcggaggcggagatggtgccgttccccgtcaggcccgtcacggtcatggtcccggtgcttgcgtccagcctgccgccggcaagcgcggcgctgatggagcccgccttggagagtacggcgccggagttgacggtgtaggtgcctgtaagcgctacgttctcggacagatacacccagcctgactgggctacaaagttgcctgccccggtgatggagttgtcaatgacgtccgccgcttctcccgtggtgccatagtaggtgaggtactggcttccggaagaagtagttacggcggcagtgccgagggagccggaagcgttgatgcccagggaagtggaattgcgcgtgatggcgatcgtcccgccgatctggttttccgtgccggtcagggtgtaataagtgtactcgctatcggtcccgctgatggaaaagccggaggcggccgtaagcacgcccgtgaatttgatgttcttgccgtactgggtagtgaggttcactccggtgccgaacgtggctgccccggagaaggtaaagccgtccccattgatggaagtggcgtcatagttataatatccggaaacggcggggccgtcctgcacggtgagcgttgtgccgtcccccatgaccagcttctgtgaccagttgacattgccggaaaacagggaaagcgttccgctgctgattttaagagtggcatccgcggagacggcaggggtcagagccacggtcttgtcggaattgcccagggtgaacgtgccgccccccgtgtaatcaaccgtcacggtgccgccgaagcttccgccgtaggaggaagaatccccggtgatggtcagcgtggttccctccccggtaatcagggcggcggtgttgttgtgctccagcttgctgatggaggtgttcacgcccgcttgcaggacggaagctccggtcgtatacccgtagccgcccagcttgatggtggcgttctgggccgccagcgcgtggttgaggttcaggatgttgttctgcgtcccccccgtcgtgttggaatagagggaaataatgccgttgaaggtgcccgccccgttcagggtcagggtggagagggccgttcctccgttggcgacgcggtttaccgtcagcacggcttccggggcgtctccattcaaattggtgatggtggccgtgccggctccggcaaaattcaaggtggtggaagccgtgacagtgcccacgtcataggcggaagtgccccccgccgctacgttaacctgcgttccgttaaaagcaacgtccgccgcataagcctgtgatacagttattaaaagaccagagactcctgcaaaagtggcagttccaagtgttactcctgagaaggaagtcatcagggcagccagcagattcaagggaaggtgcaatttcatgtaacgtttgacaattaagggtttataaatcataaaagaacctttcccacaacacggcaaggggaatatgattgtgaatataaataaggaattcgcaatccgctgtcaaaggaaaagagtcagttgcaacggttttctaacagcacagaaatattcccattgacaaaattttccaagctcgctctgaatggattattttggaaatagataattcattgctcgttaaacgttattcaataattgaattttgaataataggtgaatatggagacagcggattgcgaatccgcatttacccttttaatggcaggataaaataaaaagatgccctgcaacaggttatgaaggaatctgcttggggattgaggaagaatgactggatatgcctctggtccattttccaaaatttcccactcccgcagctttgtaaagcgtctgagcaggactccggggaacggctccgcacgaacggaccactgaaccggcatccgtctgaaacgcacgaaaagtgaatgatgatggagccgaacaaattcttacaaggtcttacaagggccgggagaccttgtgcccggcagcgtacccgtcaaggggtgcggcggggtcaatatgccacggcttgaatggaatacggccagcaaggaacggaggtttgattcgtgccactttcagattcactcacgctgcgagcttcaagatccgcttccgttcaaccggatgaacacgttttccggcctccatcaataaatctattaaaaatctcaacataagcaacttacatattcaccctccgggaaccaaggaccattttctccgtctcctgccatgtgggacggatttggaatccgatgtcaatcctactattatgatagggattattttaaggtaaattcccctattaaaataaaacactgaacgacacccctctcccctttcagagccctatgccagatcttttcttttttgctgcggcaaactttttaagaacttaaaaataattacttacagagaaattcatattttccaagcatcaatcataccacccctatttctccgattgatacctgtttcagtctctctttacgactgaagaaaaaatgcggattccaaatccgctactgggttcgtgttgttacaacaaattcactactgattattattatgagaatgaccatacctttgccgctgcgccgcagcctgatggcctccgtgctgattcccgtttccttgtccttttccgcctccgctgcggatttcatggtagacgccgcccagacttccgacccggcccataacatttacaccactctgaatgatctggcctcctccggctccctggctgccggggatacggtggttctgaataatgacgacgcttccttgacgaccagcttgaccgttcccgtcaacttccgttcggatgatccggacatgccgtgcacggtggacttatccggactgcggaacaaccccatgtacaatcttgcagagggcgagtatacgctggatatggactccgtcatctgggccaatggcaacagaagggcgattcaggcgcaaggcggcgatatatccctggaaatcaccggacgtgttcaattcctcaataatagcgttttatccggcaccgacctcaatgctggaggggcgatttatatgagtggagtccattcaataatggccctgagagaccacgcaattttccacggcaatcgtgcctacagctacggcttcaactacgacaccagctacggcggagcgatttatatgagtggaatcaattcaacaataatgacttttggagaccatgcctccttttcagacaattacgcctacggctcctccgatggcgccggcggagcgatttatatgaaaggaaacaacatatccctaaccatcaggaacggagcctcattcaccaataattatgctttcgttaatggcggagctattttcctggatggtaacaataccaacaagttcagccggttcctggccttcaccaatgacgttctcttcagcggcaacatgaccgggggaacgttcactcaacacgatgacggctccttctccgtggaaaacggcattgccaactccattcatgtatccggaaccaaccatcttcaactggcagccgcccaaggaagggaggttcgcttcaatgaccccatcaccagttcagcctacagcaccgtcaccctctccctcaaccaatacacggacgacgaaggcaactcccacgctacggacggctccgtcattttcagcggggaactctaccagggagacgacgcccacctcgtggccagccgctacagcaacttcaagggacaaaccaccctctacggcggcaccctcattctggaacataatgtcgtcttcggcaatgccggcctgcgggacgatacctccatgactctggaacacggcactctggaaatcaccgggggcagcgtcatcaatgccgcctccttctccatcacgaatggggacgccgtcctgcgccccggaaccaccgccttcatcaatgccaaaaacgtggatctttcccgcggcttcgtctttgacatgcagaagcaggcgcaggaagccgcctccccggcaaacgccaccggactttccatctccgccaccggttccttcaccctgggcggctccataggcatcatggacacgggcactaccgcggactacttctatgcagacaattcctgggcgcagcagcgcgccttcattgtcctgacggatgccaaccagacccacacggatgatttctccggagtccattctctggctaccggctccggccgggtggacagcccctatgcctacacgggttcctggagccaccagtgggtagatgtggacggtgacggcttcccggagcaactccaactggtctggactcccgccgaggacgccgccatccgggacatcctgccggaactggcaggtaccctggccatgaattccatgtggtccagcgcctccaatgccaaaaacatgtcccgggccgccctgggcaacctggatgcccagcgcttcatcgccggaccggaaaataattactgggtcaagggcatgggggatttcctcaaccacgcctccgagggagtacgggacggctttgactaccacggcggcggctattccgtgggagcggacaggagaatcacttcccacgccatcctgggcctgggcttcggagacctgtacggcaagatgcgcgggcgcagctttgcgggggacattgaccagcagacgcgcatcggcatgctctacggcggctggcacaaggttctcaacagaaagaatacgttgctggtgacgggaacggcaggctatggctggacggacaacaagatgaattccttccacacgggcggccggtcccacggcaagtggaccaatgaaaccctgtttggaacattcaccggaaagtggagccgccgggtaaacgagaccgttgcgatggaggtcatgctggggctggagtatacggacgtgacgcaggaggcgtttacggaaacgggctgggacgcgaggcgctttgaaaaaggacgcctgaagaacctgagcgtaccggtgggagtgggcttgacgcaccgcagtgagctgaaaggccgggaatggatcaacagcgcgatggtgagctacgtgccggacgtgtaccgcaggaacccaagtgcgcaggcggagcggctgctcaacgggtaccgctgggaagcggaaggaacgtctcctgaccggaacggggtgagggtgaacgtgaacagcgccctgcagttgaacgcgcgctggaggatgtatgcagggtacgagtttgagggaaggagcaaggccacggcgcaccggtttaacgccggcgtcagttatgcctattgacagagcctgattgcaggcgccggaaaaccgtcaaaattactttatctttgacgggcggccagcagcaaagaggctgtgcagttgttctgcacagcctctttttaacgttaagggggaatgttattttatcttccggtccatttccccagaaattccgccgcatccttcccttccgcaatgtgcctgagcagggcgctgccgagaacggcggcatccggacgggcgtcttccggcagggcgtcaagctggtccggcgtctggaggccgaagcccagtgccagaggcacgtcaaatacggaccgggcgcggcgcatggtttccgtgacgctctgcgtcaggtccacctttcctcccgtggtccccagcacggaaaccacgtaaacgaagccggaggtgtggggcttgtattcctgcatgcgttccacggaggtgttgggagccaccagcgtgacgagcgtcaggccgtgggggtcaaaggcatccctgaagatgccggattcttccagcggcatgtccggaacgatgaagccgctgactccggcttccgccgcatccagggcaagccgttccagcccgtactggtaaaaggggttcacataccccatcagcgccagtttggcggaaaagcggcccttgcgggctttcaggccgtccagaatccatttcaggcttacgccgcgggccagggcgtcccgtgaagcctgttcaatgaacgggccgtccgcaacggggtccgagaagggaacgcctatttcaatgatgtccgcccctgctccgtcaatccgctccagatgggtccagaaggattccttgtcaggaaatccggcggtgatgaaggggatgacggcgcgcctgccgagggaatgggcgtgctccacggcttcctgcaacggtgatttctgcatgttgttcatggaaagatgcggcttaaaggttcagatattttttaacgattcccaagtccttgtctccgcggccggagaggttcaccagcacgtcaccccccgcgggcagctcgtccgcatggtccagcacccacgcgacggcatgggaggattccagagcggggataatgccttcctcctgcgtcagggtttggaaggcgttcagcgcggaggcgtcacagatgacgccgtaatgcacccggccgatttccgccaggtgggagtgctccggccccacgccggggtagtccagcccggcggaaatggagtgggacggctgtatctgcccgtcttgatcctgtaaaagcatggtcacgtggccgtgcagcacgccggggctgcccaggttgatgggtgcggagttgtagcatccgggctccccggtgcctccggcctccacgcccaccaggcgaacgccttcatcttccacaaaggggtggagcatgccgatggcgttggagccgccgcccacgcacgccaccaccacgtccggaagccttccggcgcgttccagcatctgggcgcgggcctccgtgccgatgacggactggagctgcctgaccagcgtggggaacggatggggccccgccgccgtgccaaagcagtacagggtgtcctcctgatgggaaatccagtagcgcagggcctcgttaatggcgtccttcagggttcgggaaccgctttcaatcgggaaaaccgtcgcccccagcagtttcatgcgcatcacgttcatggactggcgctccacgtcctccgcgcccatgaagatggtgcagtccatcttgagccgggccgccgccgtagccgtagccacgccgtgctgccccgccccggtttccgcaatgaggtgcgttttccccatcatcctggcaagaagggcctgcccgagggcgttgttgatcttgtgggctccggtgtgtagcaggtcctcccgcttcagccacaggcggaagcccagcttttccgagagatgggggcagaacgtgaggggcgtttcacggcccgcgtagttgaccagcaggtcctggagcgcgtcccggtactcgcgggacggcatgatggtggccatggcttcctccagctccatgagcggggggcgcagcgcttccggtacgaagcggccgccgaagcggccgaaatatccttctttattcatgcgatgtggtaaggggtgtaagagatgagtgatttaagggccgccagcagcttttgcgggcttttctggccgggaatggcttccacgccggagttcaggtcaatgccgttcggggtgcactgttccagcgccttgttcagggaagcggaggaaaggccgcccgccaggaaccagggccggggggatttgagagccgccagggcgttccagtccagggagacgccgtggccgccgccctggctgcccgcatccagcaggaaccaggcgcagctgtccgcccacagttccatttccttctgaagggcgtccagggactcataacggtccggccacagtacacggatcaccttttccggcccgatgcggcgcgcgcagtccagggactgtgcgccgtgaagctgggcgaattccagccgggccgttttcatgacgtccatgatttcctccgcgttctggttcacgaagactcccacgcggcggatcagcgcggagtccagggccgcggcgcgtgacggagcaatataacgcgggcttttgggatgaaagatgaatccgcagaaatgggctcccatccccatggcggttgacaaatcgctctggcgggtaatcccgcacaccttgattgcgaatgaatgcttcttcatgttgtttcttctaaaattgcagccagtttttcacccggctttccgccgtccatcagggcagtccccatcagtacggcctggaagcccgcttccgcggcttccctgagatgagccccggcgctcatggcgctggcggcgatccacacctccccctcacggcggagtttccccatgtccaggcaggcagccctgtccgtttcaagcgtatccaggtcacgggcattcacctggatgatgcgagcgccggattccctggcaattgccaggtccgactcgtcaaaaacctccaccacggcgttcatgccgtaggcttccgcctgttccctcaggatgcggagcgtccgcgcgtccggcgtcaggcgcacgatgagcagcagggcggaagccggggtggaggccgtctccatcacctggagctggtggaagatgaagtccttgcggagcagcggaagcccggcgcggctcatgcgctccagatacccgatgcggccgccaaaaaattgttcctccgtcagcacggagatgcaggaggcgcccgccgcggcatactgttccgccacttcctccggtttcagcccggtggcgatgacgccgcgcgacggggaggactgcttgaactctgcaatgacggccacggactgcccggcgggcggctccgcgatggctttcaggaagtccggcctgcgccccttccacgggcgcggcaactcccggcgggaggccatgtccgtaagcagggctatttcctccgccttggcttccctgaaccgctcaagcagcatgaagcgttctccttcctactccggcgcagacggcctcacgggccttcgccatgcagacggccaggtccatgtggtcctccagcaggaacatggccacccccacattgagaatcaccatgtccatcatggcgcgcgggcctttccccgccagaatgtccttcagcacggccacggcttccgatttggaccgaacggccaggtcctccggttcgcagggctggatgccgtagtccgcggggtccagggtcatgggcgtcagcctgccgttatggacgatcatcatcttggtgggtcccagcggcgtcacctcgtcataccctcctgcgccgtacaccacggcggccctgcggatgtgggactggctgagcgtctccgccagcagttccaccagctccggacgggccacgcccagcaggatgtgcgtgggacgcgccggattaatgaggggccccagcaggttgaacagggtacgtatgcccagctccctgcggatggggcccacattgcggaaggcgggatggaaattgggcgcgaacaggaaggcgaagttccgctcgtccagcaggcgctgcacgtcctccggagccacgtccagcgggaagcccaggccttccagggcgtccgcggagccgcaggaggaggacacggcgcggttgccgtgcttcaccaccttgtaccccattccggccagcgtcagggacgtggcggtggagcagttgaaagagctgcggccgtcgccgcccgtgccaaccacgtctatgcagtccccttccagcccttccacacggttggcgcgccccagggcgatgccgacggcatgggccatctccagcggggtctcccccttcatgcggaggcccatcaggaagcagcccgcctgggccggggtcatgcggccgtccatgatgtccgcaaagcccgcggcggccatgtccgccgtcaggtcctgcccgacggccagcgtgtccagaatgcggttgatgcgcttttccttctgccctgccggaacgatgttgtccgggaagttgcccaggagctggaggccgtccggcgtcaggatggattccggatggaactggatgcccacccaggggcggtcattatagcgcagggccatgacttccccttccggcccgcgggaggtgacggtaaaacgggagttcggctcgtcctccttggactggaccaccagggaatggtagcggcccacggtcatggggttgggaaggccggtgaacagccccgaaccgtcatggatgatgtccgagctctttccgtgcatcacgtacggagcgcgggaaacctccgctccggcgaagtagcccaggagctggtgccccaggcatacgcccagcacgggaacggcggcggggaggcgtttcaggaactccaggcacagcccggcgttgcgcggatggctggggccgggggaaatgcacacggcctccagctccgggctggccgccaggtccagaatgcgcggatcgtcattcgcgtacaccacaggcttgcggcccagggcgtaaaacgcctgcaccagattccacgagaaggaatcgtaattatcaatgaacagaaacatggtcttctcctttcaaaataacgtcaataatcttgcccttgttcatgcactcctgccattcggcggccgggtctgaatcgtacacgatgccggcgcccgcctgccagtggatgcggccgtccttcacccacatgctgcggatggtgatgccggaatccatgtggacgccgttcctgtccagccccagccagccgatgcagccggcgtacggcccgcgcggcaggggttcctcctccgccaggatttccatggcccgcaccttgggagcgccgctgaccgttccggcggggaaggccgcgccgaggatgtccagggcgtccaatccgtcgttcacctgggcggtcacgcgggaagtcatgtgcatcacatgggaaaaacgttcaatctccatcaggcgttccagcttcacggagccgggcttggcgacgcggcccaggtcgttgcggcccaggtccaccagcatcacgtgttcagagcactccttcgggtccttcagcaggtcggcggccagggcggagtcttcctcatcgtccctgccgcgcttgcgcgtcccggcaatgggggaaagctggagcttgccgtccgtgcagcgcaccatcagttccggggaggagccgaacagcgttacttccggcagccgcatgaagaacatgtacggggagggattgatgctgcgcatgcggcggtacagcgtgaaggcgtcaccgtggaactccgcggaggcctgggaggaaagcaccacctggatggcttctccgtcatggagcagctccttgatatgctccacgcccttcatgtagcccgcctggtccggcgtgcgggaaacctccccgacggaaggttcctccgtctcctgaaggggcgcgtgggacaggtcccggtgttcgcccaggctgatctgggtgaggcggttgtacaaatggtcaaacacgatcaccgtgcccgccaataccaggcaggattccgcggaagagggactgatggcctgcgccagcttgggctggaacagggcggcggtttcatacccgaagtagccgtacagagcccgcgtgatgggagcctgcctcatgtcgtcccccaccagttccagacgctgcatcagggcgcgcaggccgtccaggtaaggcatgccttccagctccttcagggaggccaggcggtcatcgctgatggaaagggaaagtttggcgtccacgcaggaaacggtcatcaggtaatcgcaggcgatgacgctgtagcggccccatctgccatccacctccgcgctctccagcagaaggccgggagtttggttctgggtcaggctcaggaacaggctgatgggcgtctccaaatcggcgctcagccgccggctgcgctgttggagggtaatgacggatggtggttgcatggatggatgatggtgtaagttgaaaataaaaaaactgctttgactctcggaggaatcaaagcagttcttgaaaaacggtcatagctggatgctactactgcacatcgggattcccccgtccggacatgggtatacgccaccaatagccgttgccataataacgggtcgtgctaaaaaagggctgtccagtgctgaattgcatctgcgcgtttattactcttcccgcccggcgttgtcaaaaaaactttccgtcaatggcgaaaaaaatccacggcgtccttcctgccgccggaaaaaaagcccgtggattccactgaacccacgggccttgaacataatgattgtcaacctttagaacagcgtcacggcgatgttgacgccggcggtgacgatggccaccatgctcatgagcttgatcaggatgttcagggaggggccggacgtatccttgaaggggtcgcccacggtgtcgccgatgacggcggccttatggctttccgatcccttgccgcccacgtggccctgctcaatgtacttcttggcattgtcccatgcgccgccggagttcgccatgaacacggccagcacgaaaccggaggccaggccgccggccagcagcccgaacacgccgggaacgccgaacacaaggcccatgcagatgggggtgatgaccgccagcacggacggccagatcatttcatgctgcgcgcccgccgtggagatttccacacagcgcacgtaatccggttccgcttccccggtcaggatgcccttgatttccttgaactggcggcgcacttccttcaccatcttctccgcggcgcggcccacggcgttcatggtcaggccgcagaacaggaaggacatcatggcgcccacgaaaaggcccatgagcactttcgggttcatcagggtcacctggaagtaattcatgaattcaggcagcgtgcaggaagctatcttggacacttccacgctcaccgcgtcattgatcttgtacatggtgtttccggtggcgtccccccaatgctggatggaaatcttcagctcttcaatgtaggaggccagcagggccagcgcggtcagcgcggcggaaccgatggcgaagcccttgcccgtggcggcggtcgtgttgcccagggcgtccagggcgtccgtgcggcggcgcacttccgggtccagcttgctcatctccgcattgcccccggcgttgtcggaaatggggccgtaggcgtccgtcgccagggtcaggcccagggtggaaagcatgccgacagcggcaatgccgatgccgtacaggcccttgctcatttcagcgccggtgaaatgccagtccccggaggccatgccgtaggccagcacggtacccacgacgatggtgatcacgggaatgcaggtggaaatcatgcatgccgatgccggagatgatgacggtggcgggccccgtcttcgcgctgtgggcgatcttgcggcagggataggagtcatgggaggtgtaatgctccgtgctcttcccgatgatgatgcccaccgccaggccggtgacgatggcgccccagatgcccgcccagttgtccaggccgatgagctggagcaggaaggcggaggcgatggcgatcaggaaggagctcaggttgatgccgcggttcagggcggccatcagctccgtctgggaagcgccgcgctttacgcgcaccgcatacacgcccagcagggagagaatggtgccgagggcggcgatcagcatgggtgtgagaacggccttgatcgccatttccggcacggccatgtaagccgcggcgccaagggccgcggatgccagaatggaaccgcagtaggactcgtaaaggtccgcgcccatgccggccacgtcccccacgttgtcgcccacgttatccgcgatggtggcgggattgcgggggtcgtcctccggaatgccggcttccaccttccccaccaggtcggcccctacgtccgcggccttcgtgaaaatgccgccgcccacgcgggcgaacagggcctggagggaggcccccatgccgaaggtcagcatggtggtggtgatgacgaccaggcgcatggaaagctccatgtcttcataaaaccagtccagcacccagtaccagacgccaatgtcaagcatggcaaggcccacgacggtcaggccgagcacggcgcccgaacggaaggcgatctgcaggccggcgtccagggagtggcggcaggcgttcgccacgcggccggaagcgtatgtggccgtcttcatgccgatgtagccggccaggccggagaaaaagccgccggaaatgaacgcgaacggcacccagggattctggatatggaggcagtacgccagaaaagcgaatacgacggtaatcagcacaaagaagatcgtgacgatcttgtattgctgccgcagataggccatggcgccgctgcgaacgtgcttggcgatcattttcatgacctcgttcccctcatcctgggctttcatgcggtaaaaaaagacggccgcaaaaatgagggccagcacggaagccgatgggatgagccaaaataaatcctggatggttatcattgtcagtacactttaaattaaagtggtaggaacataacacctggtccactttactccaagaaaaaacctccgttcggaacggaaaattcaccttcctgcggaaagaccagcaccgcaggaaaatccggcggattcacggaagaagcaagtaccgcaccgattaatccaaattgactccggtggttccggaagcggctgggccgcacctctttcctcctgcctacttcttgttacggttttctgctgccggaagccctggaaaacggcaaaaaaccgtggtattccgcgcaatgtgctctccttggccagctatctccggcaattcttgaagctgccctgattccgggaaaactggataaaaagaaaaagcaaacgttcccattggaaaaaacagcgcctacctgtccgccattccgtcaatgatggaaagctcctccgcggtgaaccgcgtattttccagggctttcaggcaatccatgacttgctgggggcggctggcgcctatcagggccgtggtcaccacggggtctctcaacacccaggccagcgccatctgggcgaggctctggccgcggccccgggccagggctgccaggctgcgaattttctccccatgctcccggacccgttcttccgttaaaaagacggaggaacctgccgcacgggaatccgcgggaattccctccagataacggtccgtcagcatcccctgggccaggggggaaaaggcgacgcacccggtgcccgtttcacggatggcctgaaaaacggactcttccggctcccggttgaacatgttgtaacggagctggtggaccaggcacggcacgccggcctccctgagcatggcgcatatctgcctggtttgctctgccgggaatttggaaataccggcatacaaggcctttccggaccggaccgccgtgacgagggcccccgccgtctcttccagcggagtctccgggtcatgccggtgcgcataaaaaatatccacgtaatccagcttcatgcgggaaagggactggtccaggctggaaagcatatgcttgcgggaaccccagtccccgtacggtccggcccacatcaggtgccctgccttggtagcgatgacaagctcgtcacggaaacgggataaatcctgcatgaaaatgcgaccgaagcattcttccgccgcgccgggaggcggcccgtaattgttcgccaagtcaaaatacgtgatgccggcgtcaaacgcgccatggataagctgccgcgcattctcgaaatcgtcggcagcgccgaaattgtgccaaagccccagggaaacgggaggaagcagcagtccgctgcgcccgcaacggcgatagtccagataactgtaacggccgggatcggggaggtaactcatcagaaggaaaaacgggaaggttcaccgggcatgggacgtacgctcatgccgcacgccggagcgccatgcctccgtgcggtatttggatgccagcagctccgccaccctagcgttcatgccgggaaacagctccgcttccacgcacagggaatgtccgtccgccagacgggcggccagcatttcatcccatccggcgggaagaaggcaattctggatgctcccctgatggagaacgccgccgcggactctcctctggccgccaccggccagcttttccccgccgggaagtactaaatcactcgtcacggggctggcaaaacaggcgcggccaccgtccggggcgtctccgtccagcatcacgcattccacgccgcaatctctcaaaacacgggccaaagccccgtgaatccatcggtacagggtggcgctggaaggccgttccttctctccccggcggtgcatggccagggtaaaggggatatcctgccggtggtccacaattcccccgcccgtccagcggcggacaaaatggagttcctctcccggaaaaatggcgcgtgccgtggcttcctcgtcaaaataaccgtaggtcacggtcggctccgcccagcggtatgcacgcagcacgggcttctctccccattccagcagggcttcatccacggccatggcttcctccccgcttctggcgaccgggtcgcgccacagcaccagctccggcagaggggacaaattgccgacgacatttgcgaaaccagacattttgcaactacagtgtaaataacggcaggacgctccgggcgggaaacggcagcggaaaaacccgctcccatcagcccccccagacacaggcctaacggttcatgggcagtgctacgcgctgggtgaaggaccgggtatagcgctcaaagaattcctccggagagggggcgggacgcttcttctgccggatctggtccaccagggccatgccttcatccgtcaccaccgtcatggaaatcgtcacggcagtgacgcgtccggacttcaaatcgtcaatattcacgctgctgccgatgatgtccagacggttgccgtacacatccatctgggtgcaggaaccaagccggttggcccccgtcgtcatgacgggcaccagcacggacgcccgctgcgtggcatccttgtccgacttgttgctgccggaattgccgatcttcttctggtaatccacttcaaaaatcagcgtcatttccaccacgttctccaccaggaaattggcgggaatggtctcatcctgctggtagcgggtataagcggaccaaaggtcctgctggcccaggagattctgcacggtatcctccgcgctgatcaaattgcggtacagggaataaaccggaaagccgtcagactccgccgtagcgtcctggtccagaatctggtcacggtaaagcagcttgtaccccacgcaattcacgtcaccgatgatgcggtcgttccgcatgtccatgctggacttggcaggattgcggtccgtagccgtggtaaagaaaatcaactgggaggcattcgtgatcttggcgccttccggccccatggtcatcaggttcactcgggcttcattcagagcggaagaaccgcccttcttcctggacgccgtggtcttggtcgcgcgggaaaccagatcgctgtcccgctgcaccagcatccattcaaagggattaccggcacggaactgcatgctctcaaaatccttggtcatggtatccatggccgtgcgggcaagcgtggtggtccgcacatcctgcagcacccatctccagatatccaccccgcgggaggtcagggccacaatcaccagcaccagtacggtggtgatggtcatggctgccaggagctcaatcagggtgaacgcgccggatttgattttggcaaatgtcttcatgatttttcagaggtcttcagataatgcccgttagcggcggaaagcgagattgcgcgtaaagatgggagtcttcaaattctcccacgtcaggtgctgcaaacgttcagggtccgtattcaacagctggaaaaactccgcctgatacaggacttccgccccccacggcaaattcaggccgccgcccttctccggcgtataaacgtacagggaaggctccgtaatcaccttgccgcggttgtagggattataaatcgtcccgtacttgggagccagcttgtacccgtaagcgttggaatccatgcgctccaccaccagctgggtcatgcgcacggcgaagacggggccgacaagcgccttgaaatcatcccagcggtccttgttgttcgccaggcaaactcccgtcaccaccgccgtattctgcccggggatgctcccgccttcctccagccagggctggggggtgccgtccttgcgggcgcccttggtcagatccgccctgtaattgtaaacaagaatggtcgtagcgggcttggacgtaaactgcatccagtaaaacgccttgtcaaaagcggaaatatatctggtggtggaagactttctggcattgggagcggcacgctcggaattgcgaagctctccaagttccgccgtcagggcgtggacaatgcggtccgcttcgcggatggtcagagcggactgaaccgtccttctagctggaatgaacatggccatgaacaccacgatcagcacggcaaccacgccgatcgcaagcaccacttccgtcagggtgaaccccttggcacgagactgtttcatacacttggtcaacataaaatgggaaatccggtaaaatatgaattagttgggaatcacctgctccgtcgtcctcagccggctgatattgcctttgggataaatcacgatgccgcctgccaggcccggcttgccgtccaccatcggagtcggtttctcctccttgccgtttccggcggaaccggaaaccaccaccaggcgggtgggggcgttcggctgggacatgcggccttcctcgtcaaactcaatgaaataaatatccgtcatccggttgcccggaagattgacggtatcctgcccgtcacggctggcaaagctgcgggctgcggacttgcccttggtcttcttggagccttccagcagggtgctgtaggtggggctgatgtaaaacccggcgggaagagtctgcaaacggttgaccagatgccactttccggtgcgcgtatttttggacatcacgcccagggtgcgcatgttgcgggcttcgtcctcaggagtgctcacgataatcaggcggctccacgttcccttgcccatggcgtccaggcgggcttcctgcaccatgccgtccaccatctccacggcggactggaggccctgccccctgccccctcctcttaacatgctggcggccaaggccatcatggcaaccataatggtgatgacgacaatcagttccaccagggtaaaccccttgctccctgacgaggaacagtgcgaagccgttccggaatgcttggaaaaatatctcatacagatgatgcaggattgaacaacgatttttggcatgctacccgtttcacacgggcacggcaatcattttttgagaaacgggaaggccggatatattcccgtccaaataaaaatccggctgggtttcaccacccgatcattcccggcaccatgaaccatccggaagaaaggaatttccggttgattcaatccacacatttcaagaagcataggaaggaaaaagctcttgaaacgcctctggaaggccgcttttccagagttcccgaccactcctcctgcatccgagggcaggcaatgccccataatgatccaagcagtttaaacggttcatcctttctccgggcctgaaagcccatctaaccctttactcgttggagaacgaaattcccggttaatgtacaaaggaacaattccgaaagcgcatggaatggaattagcattccatcattctccggaaaaggaacttcattcttataataagaatagaggaccgtcactcttccccttcatcccgggcgccgttccctccatgccggacgatactcctgcaccgcagaagattccatgctcccggcattcctggtgatagaggcacaaaaaggaccttgcacccatgggacactcttattattccgttccgccatgccaaatacatcaacatcacacccatccctattggaaaaaaccatcgaacgattcctgtttcattcccaatatgaaaaaaaccttagcgaaaagactctgaaagcctatgcaaccgacttgaggcagtttgccggcttcatgatggatcaaaggaacatctgccatttgcccgctatttccgcagaagatttgaagcaatacgttaaatcattgtcgggatttcagcccaaaaccatgaaaaggaaaatggccacactcaaagccatgctgaacttcattgaaatggaagacgatgacttcatcaaccccatgcggaaacttaaaatcaacatcaaggttcccttcctgctccctcccgtcatggactccatggaagtggcctccatcctgaccaccctgtaccgggagaaaaacgcctgttcaagcaaaatagggtatcgttatcaggaaatcgtccgcaacattgccgtggtggaactcctgttcggcacgggcatccgggtatccgaactatgcgctctgcgccttgcggccgtaaacctccataacggcttcatcaaagtctatggcaaagggagaaaggagcgcgtcatccaaatatgccaaaccgccattctggacgcccttcatgaataccaaaacctctgtctcactccttcccggcagaacacgttcttcttcatcaaccgcctggggcgcaacctttcctcccagtcagtaagaatcatgatcaaaaaactggccttgaaatccggcatcctcaaacccgtcacccctcacacgttccgccacaccttcgccactctccttctggaagaaggcgtagacatcaaatacatccaaaccattctcggccacagctccctcgccactacccagatatacacccacgtaagttctgccaaacagaaagtcatccttcaggattttcacccaagaaaaaatatgcagataattctgcaataaagagtgataactatttattatgaatcattttgaagaaaagataacgggttatttaagagaactatcagagagaagtgccgctgtaaaaaagatgtattattataaccctgaacttgaaaacactcccatagatgtaactcgagacattatgttggaaaaacaatgtactaaaactaagggtttggtacataagtttaacaatagggtgttgatcatgctgtcatatacctgcgctgcaaattgccgctactgcgaacgacaagacagagttggagttggaatggataaagacgggatgctgaccgagcgtgatattgatgccatttataattatatagaacaacgtacgaacattaatgaagtcgtttttagtggtggagatcctctgacaaaccccaaagtcttgcgttatgcatacttccgtttaagtgaaataaagcatataaaagtctttagaattcacaccaaattccctatcaataatcctttagcggtaaatttagacttattagaagaattaattcaattaagacctctttcctattttagcattcatgtaaatcatcctgacgaactgaacgaaatatctattcctgttattgaaaagatcaggaagcttggatatataatgttaagccagtctgtgtttttaaatagtataaacaatgatgtggatattctggaacatctgttcactacactttctcagataggagtacgaccctattacatttatcattgtaccaatatcccggctaaccaatactttgtcatgagtattgaagaagaaatttcaattatgacagaactcagaaacaggcttagtggaattgcatatcccatccatattattgaccttatgaatgcagtcggcaaaattactgtgccaacaaatcattggatgacaagtggagttgtaactggtatttgcgattttaccggtaaaatgattgattatgataattattggtgagtattatgcagcagcagatagaaacagaacgcctaattttaaaaccagcttcaataaatgatctggaaaaatatttagaattagacatggatccggaggttacgaaatatataccaggtgtattggatggctccgaaacacatatatcttttcttaaagagagcattttatggttctatgggaaaggattgggttattggtcgatatttcctaaaaacaatccttctttatttcttggctgggtaattctggctccttatgataccgatgagcctgaaattgaaattggctggcgattaaatcgtccagcatggggcaaagggtacgcaacagaagcagcacaggctattgttacatatggtttcaaaactgttggcttagaatgcatatatgcatatattgatttagaaaacaaacgttctataagtgtcgccaataagttgggatttagtttttttagtagttttatttatgatggggttccttgtgatgcttacaggatgacacagcaagagtatttacaaactgaaatataaatccaacaaataggtaatcttatacctgatattatggagagaataaaaattgcaattgtatttgatactaaagaagattatggcattgatacagccgatctggattattgtgacttctcttacatgtctgatattgaacacatgaaagaagaattggaatacgaaggatatgaagttatcctgattaatccacccagtaagttttttgagacagttaagaatacggactataaaacactttttgatgtagtttttaatatgtccgaaggttttaagagcagaaatagggaaatattggtacccatggtttgtgaaacattgcaaataccttatataggttccgatgcttttgggctatcgtttacgaaccataaattccatacaaaactatttgcaaaacatctggggattgatactccggattatttttactttgattacaaaattcaaaactttcaatctctcagggacttttttgaaacaaacagttcatggtttcctttaatagtaaaaccagacagggaaggtactagtatgggattgcgaaaggtaaataatataaatcagttggtaactgtaattgaagaattaattgaattatatgatcaggggctggtaattgaaaagtatattgatggacctgatatcttgtcttttattataggaacaagaagcgaggctaaagtttatcctttggttgaagttacaaataataaaggaaaacacctgaacttatgggatacagaaagcaaacgaatgaatacagagtatattcctgcccgtattccagaacatactaccgtaataataaaaaaacagtctgaattactccacaatgctcttcaattatatgatatttcccgtattgattggagagtagatgaaaatggtattccatttttccttgaaagtactccactaccatctcttggggatgattttgattgttgtgcaaaatcaatagacttaaattttcatcaactgataggcattacggtcaataaggcactaaagaggttaaaaataatctgatttactcccagaacatcaaatccgcatacattaagtcattctcaaacagagattgcccacatatgtcgtatgcatttttcattctctcaatcttcttggtaagtggcttgccaagaagttgtgataaatagacaatgttttttataaccgacaccttattgggttttataataccaaattgattgtcgatgtaataataaaaatgatctaatgcttcttcatacctgccttttgctttacataaataagcattttgtagaattaggcattccttataccacgcaaactggtttccgtccctattgtttattgtcgtaatttcagcaatcaattcttctgcttcatccaaatgtcctaattttcttttgcatgttgccgtattattcagaagagccaatttttgaaagccatcaaaactatccaaattttttagtattgataatgcttttacaaagtcatgctcaaatactatagtgtacactgcgattgaatttaatgtaaccaattgtccggtactgcccagctctttaaataactgtctggcttcctgtaaatatttgaatgactcatcacatttcataacctgtgcatactctgtacctatattatgtgcagtcatcgcatgcatatacttattcttatctcggaaataattatatgcttcatgcatcatactaatgccaatctcacccggatgtacagcatttgcttttcgcaacagattataatatgaatatgtaagctcaaattttttagcaagtgaaagagcataattgtagtgttttatataagctttattgcccacagtttccccgattgcactcaacatgctaaagccattaacatacaatttagcattagtcgctgtacatggttctttttcctctttgagaaattgcagcatattatatgcttccggcactttgttatcatagtaaagataataagctttttttattattccccacgatagtacattgttttgaatatttgaatatttttcaaactcataatagtcatttaatgcactcttgaagtcacatataacttcattactttctatactgtaaattaaagcagtcttaagcgttttatttgtaagatattttttgggaaactgttttatatccttaacaagcattattacctgactgtaattagcatatgcaaagcatcgggaaatcagtttcatataatacgcaatagactcttcataatcctctgcttttttaaaataataggcagcctttcgcaacaattcatctattttctgttcatctaattctgcatactcatatttaatttcgttggcaaaatactcggcaatcgctctgttccatatttttctatcctcttcttttacatatccatcaatggaaagatgtgcttcatcattttcaaaactatatagcgtattgtcaggtaatgttctgtaaattaattgtgatacatcctcaatctgcatcaataactgttgagctcttattacttttaaaggattctccagagtctttctgtcgaattccttaccaataatagatgctttttggatagcttctttcaggttatcatccagcttgtcaaatctttcctgaacgacccttcccattctgcggcttaaaacatccgggttaaagtctgacagttgccagatatcttcattattccttatgaatattcctttccgtttcaattcctccagattggaaataaaatctccgggatttgaaaaagagaggttaatgatttgttcgagatccttttcctgataatcacatgccggatattcagccttaaatatctcaaataggtcattctctttccatctttcaaaagaaatgtaattaacataccggctgaattctgcaaaatatttgtctaaagaagccggcggttgtgtgtcattgataagaaatagaaaaattatcggactgctatctgtagcattattggcacaaaaagaggatacttcggtaataatccggatcaattcttcctgataggattcactgctatcaaatataatggcagatggcgggttcgcatctaaaaactgaattattttaaggtataaattatgataatcagtggtgctttctttaaatgcacttgatagtgggtataaatgattagaatgttcagtagctctgtttactgttatataattataaccatagtgttgtacaaactgttttgccagggtcgattttccatatcctttatttgatagcagagcacatacagaaaaatctttgctttctgttgccgaacgaattttataaaatatatcttctgtatacttaggcatagttttgttggataagcaggcttatttcattaaaagtctctttcactaaatcttctatagaaaagaaacttatttctaattcttccttacctaagaatattcccaggtttattacttttacaccttcggaatgttgttctacaatagcattaaaagatgtgtcctctgatgttcgtttgtttttataaagccataccaaaacacttttatccatatcaaaaaatatatttcgtgccactttaaagaatacactgttgttgtttaattggatatcataactaataaaatccgaattttgttcttctacaatttgtatatcagaatgaacgaatagtttatccttgattaaataacatactttcgtcattatatcgaaaaacgagtcagcatttgaagaagtactttttattttcttagggcttttgctttgtgcctttttccggttccaaagaggttgccattgtctttctccggttgaagtttcattatcattacttgcccaaattataggaagtgtattattgggagtgttatgcggaaatacgatcagggcttgcgtattatcatatcccaaaggatattttttaaataacagaccgccgtatttctcacagatcggtttgataatatcccgttcttttttggtgaaaacataagaatttttcagaaaatgccatttcttcatctgttaatatttccccggcaacaaccacttcaaatgctgcattagcttttatatgagagataccttcctgtaaacctaataaagagaaataatagcacttcgcaggtttatttttcaaatgtttattgtagaaccgggtagactggttaccactaccaatgatatcatcgaaaaaaactatgttgacattcttattcaaatatttctcaaagtcatcttgtttgaaattatcttcactcaatcgtaactcttttctgtattgatacaagtacatacttccactggatgcggaagaactgcctaaaggaaagaacaatacatccttgagtgcatcgccaaaaacagcttgtatcttacctgaaaggtcttcaatgataccacggattctattatcatcataatattgaatattttccatgatttttatggcatattctatctctgatggtttgaaattcttaatccaagctataatctcggctaatttaatatttctttccgggctgttgggtacaaaagcccagttggtaagaacattttctatattgagtctgtatcgttctattaatttttccttgggtcccatttatccataataaatagttatcagttattggtattggcgatcctaacgatcagcatcataaatttcactcttattaggctattattttttagacttttgcaatgatattttatatcaaaaaaatatccattccaccaaataaaaaatctaacaaatattcattatatagtctgtttacaataaatcactttttacctacctcaattccacccaaacgccgcggtgatcgctggcctggcgggaggggggagagtcaaggatgcccatggggggcttgcggccaaggcgctttttcagggtattgttgatgaagagatggtcaaaggagtggtaggtgtctccgtcttcatagtagatggtccaggtttccccgcgggaatccctgggtttcaggcggttcaggcggtattccgttttagccggcccctggatgacctgcacggcgctgtccgccggaccgtcattgaagtctccgtacaaaagcagcggcatgccgtcctgggaggcgatggcttcattcaggtagtcccgcagggcatacgcttcccttcgccgcgtgtcttccgcggaaccgtcacggctgaggcgcgatttcaaatgaatgcccaccaggcggaacagccgcccgtccggcattttcaccgtggcgtccagaatgccccgcagcatcgtttttttcctcttcgtttctccggatacaggcatgtccgtcacggaacggttgtccacaatgggatatttggagagaagggccaatccccggtcttctccgttccgcatgaccaggaccttatgcggtaactgaactccttttcttttcaaccgcatttgcaggtcgcgcacggcggcttccccacccatttctgacaatcctactatttctgcaccggattgccggatgagttcggccacggcctcccgtgcttcgacgggcttgtattttacctggaagttgctcctgcgcggatcttccggtacaaagtagttgccagcatttattgtgaataacctgacaggttctcccttttccggtatagagattttctccggaacccttcccttcccgggcgcctcccgggaggcaggcaccgcctgcggcgtatccgtcagcggcttccattccgtcaagccgtaccccagcaccgcgcacagcacaaccagggccgcgatgacggaggttcccctgcgttttgacgttttcctgatcatgtccgttcccttgaaagattttctccatgaaggacgtagtgaatgaacaggccgagccgcacaaaattttccggcttattactcggctttcacttcactttcatccgtagttcatgataaaccatgaatgtgccttcattgcaaccccagaacgagtcccagcctgacgagcagacactttcccaatatgccgaacataccaggaaaagcctgattgcgcgcctggagaattgggaggaccagcgcacgtgggatgagttttaccggacgtactggcgtcttatttattccgtcgccctcaaggccggattgagggaggacgaagcctgggacgtggtgcaggagaccattctttccatcgccaagcagagcaagaagaatatttacaagccggaacagggttccttcaagctctggctctggaatatgacccgctggcgcatcaacgaccagttccgcaagcggaagaaggatacggccatgctgatgagcccggacgccacggagagccaggaacatcccatcgacaagattccggacgaagggaagaataattttgaccaggtgtgggagagggagtggcagaataacctgctccaggcggccctggaacgcgtcaaagcgaaggtgtctcccaagcagtttcaaatttttgattattacgtgctgcgggagtgggatgcggcgaaggtccgcagacagctcggcgtcacgattgcccaggtttatctggcgaagcaccgcgtaggaagcgccttgaagaaagagctgcaattccttcattcccaggaagaggagaaggagagataggcggaggccgccccggtgcaaccgggcccgtttcccgcttttctcctgccgttccgcttttcaggaatgattcctttattttgcctcttgccaaggcagatgttttgtcgttagataacggcaactgcaatgccgccctcacgcaacagacattccgcccagagagtttttacctgggacaagatcaagatggccctggcggcggcggaagaagggttttatatctggaatatcaaaacgggcgtcatccattacacggaccgctgcctgaccatgatgggggccagccgcaaggagaaggcccccaatattttcacccagccggagcttaccatccacgaggaggaccaggcctttttttcccaggaggtgcgccgttacctggacggccattcccacatgcccatgcgcattgaaatacgcatgaagaagctgaattccaagagctggagctgggtccgcatcaacggtctcgctcgcagggacaagcagcgccgccctgtcatgctggtaggggtatgggtcaacattacccggcgaaagacggcggaactgcgcgccgcggaagacagggacctgttccacaccctgattgagcacattccggacagcatttatttcaagaaccgggaatcgcgcttcgtgctggcgaataccgccacggccaataagctgggcgtgcccacgccggctgacctgaccggaaggacggacgattactttttcgatcaaacgatgtccgatgtttcccgcaaggaggagctggacatcatggctaccggacgccccatccgcgcccgcctccatcatgagacatggcttcacaaggatgattcctggagccagatcagcaagtttccttggtacggccgcaacggggacctgaagggcatcgtgggcatttccagcgacgttaccaagctggtgaagacggagatcaaggccacggaaacagcccgtattctggaagagcgcaacaagtccctggagaaggagatagatttggcccgggaaatccagttcgccctgcttccctatgagattccctcccgctcccatacggaacacggcctgacgcgccatgtggatttccaccacattttcactccttcagagggggtggcgggcgattggttcgatgcctttcccgtggggaattccggcgtaggcgccatcgtctgcgacgtgatgggccacggcatccgcgccgccctgatcgcttccatgctccgcggcctgatggagcaattgtcccatctggcggacaatccggcggcctttctgtcttccctcaaccaccagcttgccaaaattctgcaacgggcgaataccacgatgttcgcctccgccgtttatatttacctggatttggaaaccggcgtcatgaccgcctccacggccgggcacccgcatcccattatcctggggccggacggagttgcccgcaagatgccgctgcccaggggcattgccctggggctgctggatgatgccacgtaccagaacgcccagttccccctcctggcaggttcccgcgtcctgatgtatacggacggactgacggaagccgccaattcggaaggggaagagctgggcgtggagaggctgatcgattatttcaacaattcatcccccaagagcaccaaggattttgtccatcaggcccttacctgcgtagcaaagttcaccggctgcaccaaccaggccgacgatatctgcatgctgggcatcagttattccgaacacgaggcaaagccggggcattaacaaacccggttcctcccttttccggatatttacctccttcctccttttttgctggggaaaaatccacattccgtccgcctgaaaaacagggatcattcaagcaggaaggccctttcccggaaggacggtctgccaagttttcctttttccctgaagagtcctgccggcagggaggcacattctccctgcaaggccgcagatgattcccgccaggagaaaaacggcagaagcggctttcaattttcccgcaggaccggaatacgcctgctctcttttcagtaaaacaagttcaagaactgcctttccagcctctcccaagccgcattccggaattcccgccgccaggaacttcccgaatcgcatcttcctgaccaatccttaaaagccagcggaatacgggacggcagttttcccatgccgccaaatgacaaagatccgtcaggttgcctcaggacaatcatccggagagaatttgaagttgcgccagaacggaacgcttagcatccagatggagaacaaggcttccagccctcccgccatgatgatcgtcgcctggactccccaaacatccaccacggctccccagcccatggccgccaaaggctgcaccccaatcgtaacgatgctgaacagccccagaatggcagatttgcgttccggcggcgccagaagctgcacggcggatgaagaggtgacaaagagggaagaagtagccagaccggcaaagaagaagcagagggcctgtatttccaccacgggaatgatgccggccacgcataatgcgctccccatccacagcgtgcccgaggagagcttggcccccaccctgtcgcttttgcgcgcaaacggcaggacaaagaggatgctcaccatggcaccggctccgaccgctcccagaatgaggccggtattcctggggttcccgtgcatcaatgccggaacaatctggtaaagggattgcccgcagatgttctgaatgagcgcgctgatcatgatgaagagcaggctgcgcgtagaaagcaccgccttgagcccggaggcctttcttccggccccgcgctgctttttaggggcggaggtatccgcaacgcgccctttcagagccaccaggcagcctatcaacggcaggcttgccacgacattgccgccaaaggcggttccggccccccattccgcaatgatgtagccggccagcgccggacctacggcgcggcacgtgttgaataccagggagtacatgcccacggcctcctgcaactgcctgcgcgggatcagatcgcccacaaaagcctgctgcgtgggaaaacccactgtctggttgacgcccatgaccagcccggcggcatacaagtgccatagctggagcatgtccagcatcgtcagcaggaacagggctacggccaccagccattggacgcattgcacggctatgagcagttttctcctgtcaaaacggtctcccagcccggccagcagcatgccgcccagaaagaaagggagcgcgttcagggcggccaggaagcccaccgccgtggcggagccgccggaaatgtcgtatacaagaatgcccatggccgtcacctgcagccacatcccgatcagggcggcggcctgcccggaccagaagatttgcaggttcctcacctgaaggggcttgaaaaagcccagccagtcattcagccatttcatcagctccgccatcctagcccccgccgccggaaccgtccagacgcgagtgcggcaacggaagccctcataatcccggaacccttttattcctccgcggtatagcaggccgggtagtccttggaaggcagccagacgggaaggtctttcatcctgtccgcggcgcgttcggaaaccggcatgcgccagattttaaagaaaggccccatgttttttcccgtgaccttggagaaggcgttcatgacccattcccatttcttttcatcactcagcttgccgttgtcgtacggcttgtcatggaattgaagggccacctgccggaaagcgtcaaatcccagatagtacatgagctccacccagaagaagagctgcaccttgttgggcgcttcattgtaggtctggtcgccggagaagtattttttcatctcagcgctcatgccgtacggccccatgccgccgccccagcaggattcaaagtttttcccggtgcccattacctcgcagaccatggagaagatgttgacggatacttccgtctggccctccatcgtaaacggaggcgactggtggttatgccccagttcatgccacagcccccagcttccggaatggatgatggagccgctggcaatggagtccgtccagtccttcgtagccatggcgggataaccggaatgcccggccccggcggaaatctgcctgtccacgacaaaacgcatcgggtgatgcaggcggtccggcttggtgtcccatcccatgatccagtcctggagggccatgtttttttgcaggaattcagccgttttctgaacatccgggcaccgcttcaactgctccacgggcatcgtgacaatgaggcggggcatgcagatttccccccacggcgccttggtattttccagttgttcggcccattgttccggagtggtcttccccatgacgaacagaggggccggcacggctccggaaatctgaaccttgaatacttttccccgtttggaacgctggcccacattcacgtaaaccaggccgcccatcgggttcaccattttcacgcggccccggtccgccggaacctgcatggttatttccggaacccttttccattcatccagcttgtgcaggctgtccgtatggcaccctatgcgcacgctgaccgtgctgtccttgggcgcgccggacagggaaaaggagatttcccctccggggggagcatacagtcccgtactgtgccagccgccgatgttggaatctatttccaccgtccttcttaccgtctgggccccgtcctccggaacgccgggaaaatccttcgccgccgggcacgccttcagggtggaaagcttggcgtccttccattcccggcatttttccagaagctcctgcatgcgccgggtatcattacctcttttccacggagcggctcccgcagggaattcctccattcccgccattttttccgccttgtcccaggaccatgtttccagcggcttgtccttatccgtttgaatttcatccctggaggggattgagtagacggaaagctccggcatccggttcttcacaggctggggaaaacgcccttccggttcaggctcatcttcttccacagggatgttttcctcctgcctgcgggcctgttcctcacgttcgcgccgttccagctcctccctcctcttcttttccttctcttcgcgttgagcctgctcccggagcttttgagccgcttccgcagcctgccgttccttcttttccctggcttcctcacgcgccttctgctctgcctgcctctccttttccttcttctccctgatttcccgctcacgctgcattctctgtttttcagcggcttccctggccttcttctccttcattttacgctcggcagtcaattcctgggcagctttcctttttgccaggttatcctggtacagataatatccggctcccgcgccgcaaaccagcagaagcactaaaaaccagcctacggcggaacctctggagacgcttcgggtaaaagaaggaatattcatgtgatcggaattcggaataaatcgtcattatttctgcatcgcagacatttcttgtcaatacgattcttccttttccacgggagctttcatggaaagaacattccggaaaccgattttccccgcatccggcgtcccccgtttttcaagcgtccgcttccggaacctccgccttcatcccgaaatgggggaacgcgccatgcatcaggccgtccagcacgccgcgggtgcgcggttccgggctgatgtatccatggccgcaggctaccatggctttcacttcctccgccgcattggagggacagcaccggaacgcttccggcaaatggcgcatggcgtccaggtcattgtgcccgtctccgaagatggccgcatggacgggaggcacaccgaaccgtgaggctacaaaagccagggaagtccccttgttgtagtcgcggtggctgaaacgcaggtagggcccagccctctgcgtgacgatttcatcatacggtccaaccgtgtcctgaatgacgcaggagacgtcatccagcccgcaggcatcgttcaccaccagggaaaaagcgtcattggcctgcctgcggagttccagcccgaagaaccggtgttccagatggtccatcaatgattccagcattccgccgtaacgggtgaacaggtcgtcatgggccacggagcaggcatcgttccacggaacgccgggcatcagccgcccttccgcatccgccagatgaacgttccgttccatcgtcaccgtaaaatccggggcaaacgcttccggattaccctggaacatgtccatcagcccttcccgcaggtaaacgggatccctccccgtattgatgccccagagcacgccgtaccgcgcccggagtccacgcatggttctgaaaaaaacgcgtctttcctccgcagggccccccagcgtgaacagggtatcgtcaaagtcaaaggagaagagataccggggcagtccgggcctgggcaaggcacggaccggcagaaaacgcatcagttccatttcaggccagtcctcccttcaccgcggcgcgcctctccgcatgcacgacgggttccgccagcggaatatcctcctccaccggctccgccgagggaatgtgttcttccacgggttcggcggaaggaatggtttccggaacgggttccgcctcagggatgacttcctgccgcggcgcgggcttctcccggcgtcccggcgcagcgggagcgggacgggctgccgggacggcagacggcggacgcgccgcaggggccgttttcctttctcctgcggaagcggggattctggcctcggcgcccacgccggcccgcacctggcgggcaatgggggtattcatatccaccgcatacgtgacgggcaggcttccggcgggaatttcctctcccggcttgcgcatgtggatttccaccctgcggttggcagcctgggcattccggtcccccttcgtggagactaccgggcgggaggccccgcaggcgcgtatgtagagcctgcattccccgttcgggcgcgtcagggcaatgccattgtccttcagccactggcgcacggcattggcccgcatcagggagagcacggcattatattctccggaaccaaagctgtccgtatgcccctctacaatgaaaatcgtgtccgggtttttcatcatcagcccggcgagttgaagcatgctgaggcgcgcggaatttttcatcaccgccttgttgtattcaaacagaaggtccgcgcccagcctgctgtaaccgctgtccttgcccagggaggactgggccatcaactgggaaagtgatttactgccgtccggcagatgggaatcatcctggccgccagcccccttgagcttgttgttgtaccattcgtccgggttgaccatgtccggctccgccgtcttgatagtcgctgggctggcggaagttttcagcatctcgggcggagaaggttcaggcagtcccttcgcgacggcattcatgtccacctgcggcattttgggggcgagggattccggcggggacggagtaaccggatcggcggaaaagctggtttcccccggagcgatcaccacctgttccggcagcatgtcctccaggtccggcaattccggcggcacttcctcaagctgctcgatatccggtttttcaaccacttccgccacatccggtgcgggacggtcgtccgctttcagcacgattttctcaggcagcggcttccggtcctcctgaaccgcgggtgacttgtgcacatgaatgcccaggtcaaaccagctcagaacgatgaagcccaggtagtgcaccagcacggcggcaagaagggcccccaccgccacggcggcaagatggcgcggcgcaggcaggatgaaacggctgcgcctgcggcggttctcgcggagttcacgggtgttttcctgattggcactcacgggatcatcagcaaaaggagaggcacggttcatgaaccggaaggagcggtgcccgtagcaggtgcactgtaggtttcatgggacaacaccctgggcatgggcatgcgcgtattctcatgaatccattccgcaatgccagcctgcaactcgtcatccccggcatagacgttgaccttgtaggttttctcgaatttctcccccttttttccttcaatggaatggaggaaggtccgctcccgggtgccgtagggctcgccttcccggatggattcataaagttgttttttctcgtttctcagggagtcgtaaatgctcaggcaatcctccagggtggagaagaagtactggttcgtgcagaccaccatgacgggataatccagtttcagggcatcgtctacgggagccacgtcaaacgtactgaaatccgcacgccagtcaacgccggcatccagcagccagtacgcggcataacacaggggcttgccccagtcctgctccatttcccggacggccacggttttcagggaagggaagcagtccatgctgaccatgcagcggatgcggggatcttcagacgcggctttcagcagcaccgctgccccaaacccctgccctacggcggccacgggcggcaatcccccctgtttccgggatacggcgtccagcagagccgttacgtccgcatattccttcaatccgtacgtgcagaatttccgggcgtcgtttttcccgcgcggattccataccaggcacgtgtaaccggctccggtcagtccttccgccagcggcagggagcctttcaccccctggtcccaggaggtggctatcaccaccagctccggcttcgcctccagatgcggcattcttccgcgcagtttcaaggtatcccgcacgcggctctggcgcggggacaaggcctccggacgccccggacgcaccagatagccttcaatggcggtaccgtcggcggagacggcttccaccggctccatcaccagggaatccgcaacgggagaagcggcgggttcatccccccccacgggaacgagcaacggagtggacacataccacgcaaaccacaccaggacgcccactgctgccagaaggagcagaagaaacagttgaacaagacgtttgaacatggaaaagctgtacccggaaagcggttgtcaggaagattttatcccatcctgtctacgttgacaacactcaacttctatcaggagaatatcttccgcacgccattccggcccgcatggagccatgccgcaccgccctccgctggacaggcgagggcgcacggacatgcggttccggcaagcctccgtccccgcccggcggccaaataacgctttatttcccgcccccgatctggcatccttgtcccaccttactttttcatggcaatccaggcccgacatttccgccaatggttcgcattcctcctcctgcttgcgctgggaggaacggcggcctggttcctgatgccccgggaatggtcccagatgcaatgggaaattcccggcacgccgtccgaatatccccttgcccagcttctgcggccctggctcattctcctgggctgtttccttccggcgctggggatgctgctgtacaaccgttcgggcatcctggacaggtatgtggcgcgtacctggttcacggctttcatcatgtgcacggccatcctcacgctgatttacatcatcggcgattttgcggacaatgtgggggacctgatgaacctggattcccccctggcgggcaccttccgcttctacctgagccagctgcccatgatcctgaacctgatccttccctacacccttctgctgggaacgctctgggcgcttaccaagctttcctcatcctcggaaatcaccggcatgctgcaatccgggagatccctgctccggatcaacgccccggtcatcatcggcgccgtctttgcggccatctacttcggcatcttcgggtttcactgggctcccaattccactctgtacaggaaattgatgttttcctccctgagccagaataaaaatgacgacgcctcccggagcaccatctacaagaacgacgcggaatcccgcatctggtacctcggcgaccctcccggaatagactcccccggcgagccgttcaggcatgtgcgcgtggaacagttcagcgcgcccggaaagatggagtacgagctgtttgcggatgaagccatgtgggacccggcttccagaacatggacattccggcaagccatcaaaaggaattattcccaggaggaaccccgccagctgaacgacgtgcccgtgttcgccgggcaggaataccaaacgttgaaagagcattatcccgagaccccctggcagttgatttcccccaacgtccgcgtggatacccagggcactccggcactccaggaaatcatcaggtccggcacgacaaacgccaagtacctcagaagcctgcaaacggaatggcacgtcaggatagcccgcatgttttcctgcattatcctgacattcatcgccattccttccgccatcacgttccagcggcgctccgccatgtccggcatcggcattgcgctgttcctggcggcggccatgctgttcctgtatgagtttttccccacgctggcctccgcaggctacctccccacctggctgggggcgtggatgcccaacatcatttacaccatcatcgccatccgcctgttccagaccaagctggcccacagaagcttcatggagatgctgagaggcttgaaaaagacacccgtccatgaccaaccctgaccaccttgacgactccctggcagccgtccggaaagcccgcgaactgctccaccgggcacgcgccgtgatttttgactttgacgggctgctggtggatacggaatacgccatttattcctcctgggaacgcgtgttcgcatcctgcggccacgccctccccctggatttgttcaaccagtgcctggggagcggctacacccactggaatcccggggagcatctggaacaactgacgggccgcaccttcgactgggaagccgtcaacggccgccgccaggaggaaatcgtccgcgacctggagcacgccggccttctgccaggagcctgcgaactcatccggagcctggcggaagccggaacgcccatgggcgtggcctccagctcttcccaccgctgggtggacggctggctgaacaggctggacatcatgccctatttccaaaccgtcgtctgccgtgacgacggccttcccgtcaaaccggacccggccctgttcctaaaggctgcggaaaacctgggcatgcagccggctgaatgcctggtgctggaagattcccagaacggcaccaccgccgcgcaccgcgcaggaatgcccgtcatctccatcccgaaccgggtgacggagcaggcggatttttccctggcaaccagtaaaatccgttccctggcggaacttctttaggaattcgggaattccgccttccattccgttacgcttgtttcttgacggaattcctttcatgccttatgtaaggagaatggcttcccaacgtaccccattatatcactaccgcgtcaaagacaagattgtgggccctatctgcctgacagacctccacgccctgcttgtctccaagaagattcttccggacaccatgatccgggaggaacattcccagtgctggatgccgctcgcaacggagctgcgccgccaggagcgcctggcgcgcctcagggcatccgccttcatgctttcctgccgccctcctaaaagctgtctcctgttttacatcattgcccttctccttctggcctgcggcgtggcgcattccatcatgctccacaccatcctttacatggaagtgctgttcgtgcctgccatagcgtttttcatgggaaagatgctgatgtacatgcaccttcttaccggaggcatgaggaaaatgcccgcccaggaaccggaacgctgaccagacgcaaacattttcctcctccccgctctctcccctgcagcctatgagcccgatacccgccagagcaacgctctaccattaccgcaccgatgagaaaaccgccggtcccgtcagcaaggaagtgatcgacacgctggcggcagccggcaagcttccgttttccaccaccatggtcaggaaagaagattcccggaactgggtccccctttccgccattctgcagaggcggattaaattcaaggcgctccagccttcaaagaaggagcagccttccatccgcatcctgttttatgcagcggcagccctctttttctgctttggcatcgtgatatttttcctgacgaaccatgccgaactggaagtaatcatcctgattccctgcatcctcgttttcatgggcaagcttttatgctacgcccatgcacttgtggaaaagtgcggcatcaccaacgctcccggcagggaataagagcccgccaccgtgttgtaccggaaccgggccgccgcttcccgcatctgccagcggataaccggataacttgaaataaagaaccgccgggaccgttgaagatccggcggtttgaaaattactgttacggagaattatttatttaattccgcaacggcggcttccaggctgggcacgtcttcgatggagatgacggtggcatccttgcagatgcggcccatcatgccggccagcgtcttgcccggtcccagttcaatgaaaaggcggtggccctggtccaccagcttctgcatggaggccgtccagcgcacggagccgcacacctggtgctccagcacattgcggatgtcgtccggcccttccaccacgcgggcttcatagttgcaatagacgggcatggaaggcgtgccgaaggagacattcttgagttcctccgccagcttcaccatggcgctgtgcatcaggcgggaatggtaggctcccgccacattgagcttcttggcgatcttgcagccggcagccttggctccggcaatggccttgtccacgccttcttccgtgccggaaacgaccgtctggccggggcagttgaagttggcaacgtccacgtcgcattcctgcgccagcttgatgacgttttcatccgtcccgccgatcatcgcggccatggtgcccttggtagcgttgcaggcttcctccatgaacgcgccgcgcttctggaccaggcggaggccttcttcaaaggtataggttccggcagccgcatgagccgtgaattcacccagggaaaggccggcggcagccacgggattcagggaaggcgccagctccttcaagacggccaggcaggccaggccatgcacgtagagagcgggctggcagttgcaggtgcgggtcagttcttcgccggggccttcaaacatgatggaggagagggattccccaagcgccttgtccgcctgctcaatcaaggccctggctgcgggatactggtcatacaaatctttgcccatgcctactttttgggcaccttgtccggaaaacaataatactgcgtccatagttgaggctgaattataccgttccggcaggaaagaagcaagagcgatcttgccactgcacttccgccgtaatctctttaacgccaatatgaatagaaaatccgccccggtctctgcgagaggccggggcggatagttaaacctgatgtgtcagggaacggccttaggcggttgcttccgtggttgcgggagcttcttccttttcagccgtttcgcggggcagatcgatgatttcgatcatggccacgagggcggagtccgtcagacgctggcccagcttgacgatgcgggtatagccgcccttgcgttccgcgcagaggggagcgatttcatcaaacaggcgcttgacggcgaccgtgttgtgaatggtggcggtagccaggcggcgggaatgcacgtcgccgcgcttggcgagcgtgatcagcttttccacatagggacggagagccttggccttggccagggtggtggtgatgcgtccgttgaggatgaggctgcatgcctggttggcgagcaaagccctgcggtgagaagcgttgcgctgaagcttggaggtttttacaccgtgtctcatgatgatatttttctatgtgtgttggttttgtgagatttagtcgtcgtcgtcttcgatgttggcggcaatcaggtctgccaggcccacggggctttcctcttccagacccaggcgcggcttggcctgcggcacgggaccggtaagcagggagggatccacctgaacacccagggaaaggcccagttccagcagcttgtccttgatttcgttgagggacttcttgccgaagttgcggtacttgagcatttcgctttcgctcttcatggcgagctggccaacggtggtgatgttggcgttgttgaggcagttggcggcgcgcacggaaagctcgatttcgttgacgctcatgttgagcagcttgcgcaggcgggccgtttcctcgtcctggacggcggaaggagcttcttcaaagttgacctgcttgtcgtcatagttgacgaagacgtccaggtggtggcgcagaatggcggaggcctggagcatggcgtctgcgggggagatgcggccgtccgtccatacttcaaggatcagcttgtcgtagtcggtcatctggcctacacgggtattctgcacggagtacttcacgcgggtgaccggggagaaaatggagtcgatcgggatcacgccaatgggcatgtccggcaccttgttttcgtcgccggtggcaaagccgcggcccacgcgcacctggaattcgcattcgaacatggtgtcctggtccagggtgcagatgatttgatcgggattgaccacctggtaggtggtgtcgtcagtgatgtcggcggcggtcacgacgccctgcttgtgcacgcgcagggagagcaggcgcggttccttgccgttgtgcttgaacttgacctttttcaggttcagcacgatttccgtcacgtcttccaccacgccgggcagggaggagaattcatgctgtgcgccggcgatgcggacggaggtgatggcggcgccttcaagtgaacccagaagaacgcggcgcagggagttgccaagcgtatggccgtaaccgttttcaaacggttccgccacgaaggtcagatgattcgcatcattcgggtcttcaattttttccagacggctggggacttcaaagcgggccagcgtggtaacggcggtttcttctgcagtagtggtttcgttttccgacataatcgtatgtaatgtaccgggtttcccctcagcacgggcatggcgggcaatccgcctgaaggacctacggcatgttttggaaacgcccgtgcggggagcaatttaacgatctgttttcaacaatcaactcttttcatgtccgccggcaaattttctgtgacttaacgtgcgtcatctggcatagtggggcaaacctatataccaactcatgaagcatcctgattttttggacaacagggattttacgggggaagacaagaagcgcccctccaccatgtccatggacaccagctaccaggctctggaaggagtcgtcaaaaaactttccgaaatagcctccaccaggcacgatccccgctacctccaggagtatatcaagacgggcatcaacatggcgcagtccgacgcctccgaccacgattttaccgtcctgatccgttccgggcgggagatgtaccgggccaactgcgttttcgcgccgtaccgccacatccgcaagatttccgtgttcggctccgcgcgcatcaggaatgacgagccggcgtatgaaacggcgcgggagttcgccagggaagccagcgaacacggttacatggtcattacgggtggcggaccgggcatcatgcaggcggccaatgaaggagccggcgagcaacgctccttcggcctgaacatcaccctgccgtatgagcagacctccaaccacgtggtagcccacagcgacaagctgatcaatttctattatttctttgtcagaaagctgaatttcgtagcggaaagcgatgccatggtggcgttccccggcggcttcggcaccatggacgaggtgtttgaaaccctcaccctgatccagacggggaaggccaccatttacccgatcgtccttctggattcccccggcaagactttctggctgaactggctggccttcatccgcgtggaactggtggattccggcctgatttccgcggatgacctgcacctcatccacgtcaccaagaatccggcggaggccatggagcacatcgaccgcttctaccgcattttccactcctaccgttttgtcagggacgccatcgtcatccgcctgaacacgcacctgcccgcccagtgggtggagcacctggaacgggacttttcagacctgatcctgcccgggggaagaatggtccagagcggaccgctcccggatgaggcggacgaaccccacctggaccagctgccacgcctcattttccccatcaaacgcggcaattacggcaggctgaggctgctgattgaccgcatcaaccagacgcccagccggacttattccccaccctcccatgtctgacgcccttcccgcgtggctgattccgctgattttcggcctgatgggagcctgcatcggctccttcctgaacgtagtcatttaccggacgccgctgggcatctccgtcaatgatcctgcgcgctccttctgcccggaatgcgaggaagccattccgtggtacctgaatattccggtgctaagctggctggcgctccggggaaaatccgcctgctgcggaacgcgcatcagcttccgctattgcttcgtggagttgcttacggccctgcttttcgccgccctggggtggaagtacgcggacgcctccgcgggagccgccgtgctgctctgcctgtggactgccatggccatcgtcatcatgttcattgacgcggagcatctgatcgtattccgcacccaggcgctcatcggcgccgcagccggagtgggagcctgtgccctttacccgtttctcctgccggacaatgacgtcatgacctggacggacgccttcacggcctccgtgctggggggaatcgccgggtatgccgccatcaggctggtgattgaactgggcaagctcctgttcggcacctggaagcagcattttgacgctcccgctccgtggagcctgaaggagccggaatccgaccgggacgagctccagctcattatcaacggacagcctcacgactggtccatgcttttccaccgggccacggacaaggccgtcatttccgggggctccgtcaccattgacggggaaacgctccctccctgctccgtcaccctgcgccaggacaggatagagctggagaacggagacgttttcccgctggaagacctggaaagcgtggaaggaaccatgacggatattcgcgcgcagcgggaagccatgggctccggtgatgcctggattctgatgatggccggatgcgtgggcggatggcagggcgcggtgttctgccttttcctcggctccctgctggggattgtgcaggcagtcgtttcacgcatggggttcggcaggaatcttcccttcggccccgctctgctcagcgccgccctgatctggctgctgggtggcgaccagtggtggctggcctatctccgcttcatttccggagaataatttttccctccatgacacggctggaccgcaccccttccgggctgcggtctttttttacagatttatttcatattcaacagctttaccattctgcaccccggcagaaaaaagggaagccccgcaaaggctccggccgcccctttccggagcacgcacgtttttattttgcaaccaggacgaattccgggggttcatcctagcaaagggaggcgtttccacctgtttgagatatcacagcgcgacgcccctttccgaaacgcatcaaacctcaccactcaaagttatgaccaagcaaatgattatcgccgcggcctttgccgcatgctccgcgttcgctcaggacgcgccgccgccccccgccccggacgcaccttccgacgctccggaaatgcagcccccccctgaaagaaggggaggcccccgccaccgcgccggaggcagggaccgccagggcccaggtccggaacgggccaacctccaaatgaggagaattgatcccggcatcatgatcatcggggaagaactggtcatggccaagtatgacaccgacaaggacggcaagctttccgacgaggaaatagccgttctccaggcggacgtcaagaaagcccaggaagccaggaaggcagccatcctgaagaagttcgacaaggacggcgacggcaagctttccaaggaggaaagaaaggccatgcaggaagaatggctcaaggaccatccggaagccgccaagcgcatggaagaaatgaaggcccgccaggaagcccgcaaggccgaaatgcttaagaagtatgacaaggacggcgacggcaagctttccgacgaggaaaagaaagccatgcgggaggactgggccaaggaccatccggaagccgccaagcgcatggaggaaatgaaggcccgccaggaagcccacgctgccaacatgatcaagaagtttgacaaggacggcgacggcaagctttccccggaagaattgcaggctatccctccccatcacggccagcccggcccgcatcatgccgcgcccggcagtcccaagggaccgggtgcgcccaagatggatggcccgcgccgtcccggaggccccagggctgaaggaccccgcgcgcccaggggaccagaaggacgcagaggcggtgaaggacgccgcggagacggtgaccgcggtccccgcggcaaccgtccggacggcccccgcccccagcttgatcccaaccgcgcccccatcatggcggccggctggatcctgattgaggaaaagtatgacgccgacaaggacggcaagctgaatgaagctgaaatggcacagctcaacgctgacgcctccaaggctctggaagcgcgccgttccgcacgcagagaagccaggaaggcagcccgcggcaataacgacatgccccctccccccgctccggtccaggaagaaggggatgatgaataagttcacccgcagaaacgcatagcagaaacagagagacggccccgtctgccttacggcaggcggggtttttcttatcagggaaaagggaaaaggaattaggggttataggaatcatagggaactttagggattatagggaattcccatcatcacccctcttacccctcttacccctcttacccctcttacccctcttacccctcttacccctcttacccctcttacccctcttacccctcttacccctcttacccctcttacccctcttacccctcttacccctcttacccctcttacccctcttacccctcttacccctcttacccctcttacccctcttacccctcttacccctcttacctagcaaactctctcggacttacttaacccttccccttccttccaccaagaaacagaccgggggaggcatgcggcctcccccagtcagagttaacgaatcaatttcctgccgcgcctcaggctccggccttcatggcctgcttgacttcctcatgcagcccgtgcttccgggagaagaggagggccgccggagaggcgatgaagatggaggagtacgtaccgatcagaatacctgcggaaatcgtccaggcgaagtcttccatggaaggaccgccgaagaagtacaggcacaccagaacggccagcgtggaaagagaggtcagaatggtacgggaaagcgtctggttgatggcttcattcatgatctgggacgcgctttcattcgggtccgagaagcggaggaattcgcgaatgcggtcaaacacgatgattttgtcattgatggaatagccggccaccgtcagcaacgcgccgatgtggatgacgttcagctccgtgccgctgatgatcaccagccccagcaccagcaggacgtcatgcgtcagggcgatgaccgcaccgatggcgaaggtccattcaaaccgcaccgtcaggtaaaccatgatgcccagaatgccgaagacgagagcccaggcggaagtgatgagcgtatcgtatcccatggactgcccgatggtttcctcgctgaacggagcgtggtccaggatggggaacgccttgtccagggccgtggtgatggcagtcttgtcctgggcgttgtcggagaagttgatcaggatgttcaccttgctgctgtccgtggattccgccacttcctgcacggtggctttctgggtcagggccagcttgttcacgacaccttccacttcccggaaggagatgtctcccttgttgaccaggtaggagatggaggaaccgcccgtaaagtccatgcccaggcagtccttgcccttcatggcccccaccacgatgcagatgagcagcagaatggcggacagggagcaggaccagaccttctggcccatgaagttgatgttgctcttcttcttgaagagattcaggaatttaaggtccttcatcatgccgatggtatccgcccagtagaacaggacgcgggtgacgagaatcgccccgatcatggaggtgatgacgcccaccgtcagcgtaacggcaaagcccttgatggtgccggtggccatccagtacaggatgacggcggtaatgagggaggtgatgttggagtcaaagatggcggagaaagccttgtcaaaggagttgcggatagccacgcggaagggacgccccatttccttttcttccctcaggcgttcgtaaatcagcacgttcgcgtccaccgccacgcccagggtcagcacgataccggcaatacccggcagcgtcagctcaaacccgaagatggacatggcccccagaagaagcagggcattgatcgtcaggcccatgatagccaccagaccggcaaagcggtagtagatgatcatcatgatgaagcagagaatcagccccgtgatgcccgcgtattccccctgaaggagggccgtatggcccagggaggcggagatttcactggcggattcaaagttgagcttgttggtcagggggttggaaagcaccttcgtcagggcctccgcctcgccgggcgcatccagtccgctgatttcaaagctttttgaaagaatggcctgaaccgtgggcgcgctcttgaccacgtcatccagcacaatggccatgcggtcgtggcccagctgcatgcgggaggtcaggttgtacatcttgtccgccccctcgttgctcagggtgacgttgacatggccgggacgggccaggtccaccccggcgcgcacgatgtccttgcccgtcagggattcacgtttttccaggaagattttttccgtgacgtcctcgtttttgccgttcttgaaggtgtattcatacatcctgtagccgggaacgcggatgcggccttccgccaccagttcattgttgcgcggatggacggggagaatctgcagcttggccaccttggtcaggatggccttggtttcctcgcgcttggcagggtccgcggcgggaatctgcacttcaatgaggttcaggttgtcctttttcttcgggcggatgatgacgtcattggctccggtgctgttgagccgttccgtcaggatcacgcacgcctgctccatggcctggtccgtcagcggaatgggcttgccgtcatccccgatgttcggttccacgctcagcgtgaaggagacgcccccggcaatgtcaatgccgtatttcaagccctgctggaagagggagaacagggaaaaggacgcaatgccgatgatgaagatcgtgccggcgttgcgcttgaccttgtcctggtcggaacccaggtaccagaaaaacacacccagcaataccagaccgccaatgaaaatgaagagagggttgttgaagagatcgtaaataaacgcgagaggagcggacattccgccagccgcggggagagtatcggcagatgccaggagattcatagacatttcaatccggattgggtgtgagtaatacggcaagggattgtggagaaattcgccagcaggtcaagccttctgtgcgtgtacccgttaagaggaagcctccccctgcggaccgccggaaaacgagctccgccgcgagcatgaaaaacccggtttccctgcggaaaccgggttgaaagaagaatggaaaaggggaaacgccggagattacatgcctgccaccgtttcaacgggaacgggcgcgggcgccacgggagtgacgatcacgggcgcggaaaggggggaggaatccggaacggcgggggaagcgggcatggaaggagcatggccggcggcggcgcgtccgcgccggatgagctcggaaacggtcaccagctcataaccgcggtttttcagccctttcacaatggcgtctacagccgccaccgtggaggcgtggatgtcatgcaccaggatgatggagccgggcttggcgccgtttacggcgcgggcggccaccacggaggagccgggcttgcgccagtcattcgtgtccacgtcccacatgatggtggtgaagccgaagcgctggcgggcccaggaagctacgccggcgttcgtgtagccgccgggggggcgcatgaccacgggaacaatgccgcaggcgttgcggatggcttcattggtgctctggagctgagattccgccttttcgcgggataccttgctcaggtaggcgtggttccacgtatggttgcccacttcatggccttcactgaccatgcggcgcactacctggggatgggctttcacgttgcagccctgcatgaagaaggttcccttgacattgttgtcccgaaggatgtccagcaccctgggggtcagcgtcccgtggggaccgtcgtcaaaggtgagggccaccactttgtccggcacggccacgcggctgaccgtcactcccggaatgcggggggaaagcggggtgttgttgtaggacgggctcacggacggcacctgcacggacttagggggcagcttcacggcggggcggtccggcttcttccccggagcggtcacgggggaaagggaggtctttaccggagcgccggactccaccggctgctcctgatgctgggaacaggcggacagcccgagcgccagggcacatgcaaggaataaacgtttcttcataacaggtttttggaggatgtacgcccatcccgccttcttgtcacgtcctaaatcatccatccgtgcggcatgaaaaagaaggaggcttcccctccctgggaagggcgcccgcgggaacgaggcgggggattattccggactgtccatgtcgatatagctgacggataccgttctgcggggattggaggggtcccgaacctccaccttcatccgtttgaaaaaccaggagccgtccttcagcttcatcacggaatcaatcatgaaccttttagccagttccccgcggccgtcaatgccgtccacctgccacatggctccgttttccttgtcaatccagacgcgcacccaggcatactgcccgaccttgggattcgggttcggaatctggacaatccagcagtcccggcccttcaccgtgctcgccgcgtcgtcccggacgattttggcctggggccagtacaggtagcgcatggagaggtcctcatacgtcacgtccgtccccgcgatgggcaccgcgtactgggcgaccggcagaacgcctgctttcccgtccttccaggaaaggatttcctggccgcggtccttgaatttcaggtcaaacctgttccagacgttattcaactggtactggaaggcaatgaggttgccgcgcaagctcatggaaaagggaactttcacgctgcgtttgcgtatttgccccttgatgtccttgttctcctggagggtcgccccctggcgaacccttttcagcagttgcccggcatccgggacggcctgggaaaatgaaggagccagggaaaggaccatggcggccatccccgcgaaaaaagtggaaagcaaagaatgtctgcgcagcatgaattgctcatatcactccggaaacgcggaaaaaaaccttttctcagtcaccgggcggcgtccgtgacattttgcgctagattttgctcgactaggtaatacaaaacgacaagatgtgcccaacgacatctattgatccatcaattatggaaacgcctgcattcttgaagcccatccagtcctatcctggggaaatcgtccagtttattgaaagaatcccgggggtggacgtaaccggagaccgcgaaaccgtgctggaacggctggaaccctaccacaaggcggaagtggaggccctgggctggcggtggaaggacctgcgccgcgctgaacaggtgcacggcaccagggtggccctggtgggggacatcggctccaattatcccgtggaaggcgtggacagcctgatctgctccggagtttccgactgcgtgcttgccatttacgtggcggactgcgccgccgtctggctgtacgacaaggaaaactgccaccgctccctgattcactcaggcaaggcgggaaccgccggcaacatcgtttccaacaccatcaagtccatgaagaaatgcctgggggtggaccctgccaacctgattgccgtcatctccccctgcatccgtcccccccattatgaggaagacatccccacggccatcaaggcccagctcgttgaggaaggagtgccggaagaccagattcacgattcaggactggacacggcggcggataccaagcgcttctactcctaccgcgtggagaaggggcagacgggccgcatgctggccctcttcggcccggaccacgccacccgcccgcacccgatcatcctttaacagcggaaaggcagcgcctttcattccttttgcccagcgcatcacggttccgccgtggtgcgttttttttgcaggtggcccatacccgttggcgctggacgggaccggcccgcaatcccgcaagggacatggccgcatcccaccgcggcaggaccgttccggttattccggacccgataatccaagttgccgttcccgcattcaaacatcattacatttgcaatcatggcagtaacaatcagcgacaattatcaggtaaaatacaccaggaaatggggcaccctgctccagcagcacgcctcccgcctggacaagtacgtcagcgtcatgcgcgacttgagcggcaaagtggtctttctggaccaattcggcgttctggacttcacggaaaaaaccacccgcgtgggccagaccgttctgaacgaggcgcccaccacgcgccgttccatgcgtccgcgcaccttcaccaaggccatcggctacgacgaattcgacgctacccgcctgggcgacatggaccttcccgtcagcaagacgattgaaggactccaggccgccgcagggcgccgcatggacgacgtgatgatctccgccttcctggacacgaattacgtgggggaagacggcatgaccgccgttccgttcaaggagagccagcagatcgccgtggaccacgtggacagcgggaccaagggcgcgagcaacctcacggtagccaagctgcgcgtggccctccagctctttgaggaaaacgaggcatggaaccaggacgccccccagttcggcgaccagctcgtcattgcggtgaccagctcccagatcatgagcctgctgcgggaaacggaggtcagcagctatgacttcaacaacgtgaaagccctggtggaaggcaagatagacaccttcatgggcttcaagttcatccgtacccagcggcttccgaaggcggaggacggcacccgttcctgcctggcctgggtgaagagcaaggcgcagttcggcatctggaacgatttcaaggtgaagctttccgtacgcgacgacatggaggaagccctccagatccgtgccaagttcgcctgcggcgccacccgtctccaggaagaaggctttgtcaaaatcctgtgtgacgaaggggccagttaatccccggacacccgtttaaccctgaaccactcccctcttccatgaagggaggcgccccggaccggcctgcggtccggggcttttgtctttccccggtacgcgtacacgctccaaaacgggaatttgactttcccggcataccggatacattgccctgatgaactggaagcgctttcatctggtactctgcatgctcctgctggcggcatgcgctacggcacgcggggagaaaacacgcgtcctgattgtggacggcttttccaaccatgactggcagcgcaccaccgcctgcctccggatgctgctggagaacgagggcagctattccgtggacgtgagcaccttcccggcacgcgccacggaggcggaacgggaggcatggcatccggatttcaaaggctacgacgtggtgatccagaataccaatggcggaacgaacggtcccgaatggggcgccggggcgaaaaaggccctggaacagtacctcgcggagggaggcggcatgctggccttccactccgccaataacgcctttccccggtggccggaatacaaccgcatgatcgggctggggtggaggccacgggattacggcacctccctgatcattacggatgatgaagccatcctgcgcctccctcccggcgaagggggccacacgtcccacggggaacgggtggatgcgctggtcacacgcctgggagagcaccccattcatgccgaactgccgcgccgctggagaacggcggacgttgaagtgtaccgttatgtacgcggcccggcggaacacgtccaggtgctttcctatgcccgggacccgctgacgggcctcaattttccggtggaatggacggtccagtacggaaaagggcgcgtatacacctccacgctgggccatgtctggcccggagaccccagcctgaaggggattcaatgcgccgccttccagaccctgctgttccgtgccctggactggctggcgggaaaaccggtccactacgccgttcccggagattttccggaccgggaaaaaccgtccctgcgtcccctcccccatatcctccttcagatggtctccccctgaacgggcacgcgtttacgcatgccgccccatgcctttacacccagagctggcccacgctcccgcgccggtggcgtagcgttgcgcctccatggaaaagctgacattttccgggcgccaaaatggggtaatgtcattaatagaagattgaccttccttccttagctgggatagtaggatgtatgcagcagattgtacgtgaacatcagacctatccgccgaaaatcgttgcgtccgtcacctcatgggagctatggaaaacgctgaaaggaaaggatttaacggaccagtgcgactgggtggaactgcgcgtggatgcccttcccccggaactcacggcggagcaggtcatggagttcaggccggagatgcccctgctggtcaccgtacgctgccatgaagaaggcggcctgcgccgcattccggaagaggagcgctttgccctgctccgtgcctacatgccgtacgccaccgccatggacattgaaatcaaggccatgcggcatgccagggaactaatcatggaagcgggggcacgggacgtcatcgtcatcggctccacccatgacttccaaatcacgccgggcgtggactacctgcgcgaactggaaaaacgggcgcgcgcccacaaggcggacatcgtcaaattcgcgttcacgccgtgcctcgcctcggacatccagacgggcgtgcagcttttcaccaagcccaaggggccgattgccgtgatgggcatgggacccatggggcccgtctcccgcctgctttactcccagctcggctcctgcctggtgtacggctacctgggggaaaaagagacggcgcccggccagtggcacgtctccctcatcaaggaaaccctccgccacctcggccctattctccgctgattccggagcctttctttccgctctctcatgaacattattacttccgcctttctggcggcacgccccaaaacactcaccgcctccctcattccggtatgggcaggctgcatggtggtgcagaaactgaccggaaactggaacgcggccctggccctcctgacgcttgcctcctgcctctgcctccagattgcctgcaatttcttcaatgacgccattgaccacgccaagcacgccgatacggaacggcgcaccggccccgtacgcatgacggccagcggagcgctctcccacggaacggtcatgatcatcggcctcgccttcctgctgggcgcgtgcctgctggcgctccccctcattgagctgcgcggctggcccatcatcgccatcggacttccgtccctctacttcacctacgggtacacgggggggccatggccgctggcctacaaggggctgggggaaatattcgtcatcctcttcttcggcctggtggccgtcctgggaaccatcctggtgcagataggcacggctccggtcgtccccggcacgctggtggaatccctggcggtgtacaacgccggcatcgtggtgggcattcagtgcggccttctgtgcgccgtcatgatagccgtcaacaacatccgcgacagaaaggaagacctcactacgggcaagcgcacgctggccgtgcggctgggggagggaaaagcgcgcgccatggcccaggccttcatcctggcggcctacatcacgctgcccacgtccagccgggccctgcacctgaacctctcccatacgtggtggatgtggattcccgccatcctcttcggcggctacctgatgctcctgatccgcaaaacgcctgcggacaaacgcatgaacaaggtgctggccctcgcctccctccacctgctgctgtacctggccacgtacacaattctgcccgcacactgaaaaacgcctccttttcccaacgtagtaacatacgtgtatcatgaatctgcttaaattcattcccgtttttctcattctccccaccttcttctcctgcactcaaaaaagcactctggaaatcgccaccgggaaggtgacgaccatcaagctgggcaacgtggtccgcatcaaggaaatcaacgtgctgacctccgcggatgacggcaccttcgccaacatggcgggcacggcggcggaagcgatgacgcccggcatcatcggcatgggcacctccaaactggcttccgccaccggctccatcgtggacggcagggtggaggccaccaaaatgatccgcgtgcgcgtcaagctcaaggacacgaacgaactcgtggaagtccagcaggaagtaacgcccaacttcaccctgaaaataggccaggaagtcgtcatcacccagggcagcacgcccggcaacgtctggcccgattaacggaaatgaaccacgctgcggcacccgccccgccacaccggggcctcctgattaaaatcgccggcctcctggtggccgtctcccccctctgtgcgtggaactactggaacagcattccttccgcagcgctgctggcccccctgctccttgcggccctgttcgccggaacggcatgggccatgaaaaaaaacgtccgtgaaaccttccgcccggttcttccggcggtgcgtctcacgctggccgctgggctggccttcacgcttatcacccagctttcccaggctgccctcaactggcttccccaggtactggcgggaacggcaatcatgccgcccgcatggattatcccgctgggtcacctgaatctgctggtgaccttctgtgcccttcttctgctaaccatggcggcggcctgtgcatgccttctctgcatcggaaaacgcggaatccgccccaccgcggaaaaaacgcaaccggactcccgaacccggccttcctgacggaagccgccgaagacgccaagaagatactccggaaatacggggatgaacatcccctaactctcccgcatcaggcggaacacgtcttccggacgcatccccgcggcacgcatctcctgaaggctcaggctccggtccctcttggcaagccgcttgccggaggcgtccttcaccagccggtgatggtaccactgcggcactggaagccccagcagggcctggagcgtccggtgaatgccggtcacagggaacaaatcctcaccacggctcacatgggtgacgccctgggccgcatcatccatcaccacggcaatatggtagctggccgcacaatccttgcggcccagaatcacgtcccccagttcctccgggcggcagacctggtctccggaccgcatgtcccgccacagcagggggcccgtaatccgcgccgcggcgcggcagtccagccgccacgaaaagggcttgccggatttgagaagctccttccggcgccccttgtcaagcagacggcaagttcccggataaacgtccacgcggccgccctgcggcgcgccgcccatggcggccacctcctccgcaatctcccggcgcgtgcagaaacaggggtacagcaccccgcggtccttcaatatctggagggcgtgttcataagcgctgaagcgtgaagactggaccatcatcggcccgtcaaagcggatgcccagccagtccaggtcttccaggatgccccctacaaactccggacggcaccgcgtccggtcgatgtcttccatcctcagcacgcaccttccggaaaaacggtccgccagggaacgggcctcccacgcggccagggcatgccccagatggagacggcccgtagggctgggggcgaaccttgttactatgggggaatccatgcggcgccgccaccataaaaaagcgcagccgccttttcaaaccctttccggaaaattattgcggcttgacagaaagaggccgggaaagtaggagagttggtccctttccctgcaccttcaactttcagtacatgctttctcttctcaacatcaactccgcctccgtcatgggctggctggaatcagcggccacccagcaatggattgtgggcatcctgctgctgctcctgttcatctgcttcatcaaggaatggatgcccgtggaaatcacggccctggcaggaaccgccgtactcatgcttacggggatactgagcacgcgggacgtgctgtccagctttgccaacagcggcccgctgacggtggtctgcatgttcatcctgagcgcctccctggaaaggacggggctgatcggggacctctccaagcttttcaacaaggtagccaaaggccgggagctgaccgcgctgctggtcatcacgctgggggcgttcatggtctcccccttcgtcaacaacaccccggtggtcgtcatcctgatgcccattgtgctggccttctgccgggaccacaacatcgcggcctccaaactcctcattcccctctcctacgccaccatcctgggcggcacctgctccgtggtgggcacctccaccaacgtggtcgtgctgggccaggtgcagaaactgggctatgaaggcatccagatgttcacggtaactcccatggggcttatttacgcggcggcggggctgctctatctctggacctttggccgcaaatggctcccgtcccgccccaccctgtccactatgctccccggcggcatccagcgcgacttcctgctccaggtcagaatccccgcggactccccgcacatcggagccactcccgtcagcctcatgcagtccgaactgctgggcaccaaaatcgtggaagtgcgccgcaagggcttctccatgcaggaggaactgcagcacatcaacctggaggagggcgaccgcatcctcttcctgtgcaatgccagaaaagtcaaccaggtccgggaggccaggggcgtggacctgggctgggacgacagccgcggactggaaacgctggaacagcgcgacgtgcaaatcgtggaaggcatgattgccaacaattccgaattcgccggactgtccctgtccgaactcaagctgcgccagcggttcaacatttttgtgctcgccatccacaggcagggcaagaacatcacggacatggggccggataccaagctggccgccggggacaccttgctgctggaaggcccgcaggaagggatgaaccgcatcctgaccaagcagcgcatcattcccctgagccagcgccccgcggacgcgcacaaccgcagcaagcagggatgggccatcctggccatggggctgttcatcttcatcgggctgctgggctcctttgagcagtacggggaattcttcaagttcttcgcgcgcttcaaccccttctacctcgccttcatcggcgccctgatcgtcgtcatctccggctgcgtcaagccgaaggaagcctaccaggcggtggactggggcatcatcttcctgattctgggcatgctgtgcgtgggggaagccatgagcaagaccggactagccaaggccatcgccttcggcgtggtggacaacataggccccatgggctgcctggtcgccatctccggcctctacctgatctgctccatcctgacagaaatgatttccaacaatgccgtagccgccgtcatgggaccgctggcctatgaaatggccctgcaattcgacgccaaccccatccccttcatcctggccgtcatgttcggcgccagcgccagcttctccacccccatcggctaccagaccaacacctacgtgtacaacgcaggcggctacaaattcaaggacttcgtgaaagtagggctgcccctcaacattcttctgtgggtcatcttcacctgcaccgtcggctggctgtacccgctcaagtaggaatgcccgatttttctgaaaaaggcccgctgaaaatttttccgcgggccttttcacgaccggcaggatgacgttcattaccccccggtccggcatcaggaggccaaacaaccatcatggaaccaggcaattctccttcaccggacttgccggaaagccacgatcggggaattcccctatatgttaacgcggcagcttccgcagaaacacaggagcacgggaccttatgccctcattagcgccacccgcatggactggcacttgatcagggcggaaaaagcggcatagtccgcctcacggtcggaggaaaccaggcagtaccggtactgcggcaggcaggcgtcttcctgttccgcattgcggaggcgcagggagatggtttcgtcacaatccgtttgccgtccgcagaggcggtttttcagttcttcctgcggcacgtagatgtagacgtccgtatagcatttgggaagaatgccgtccacgcaggcgcggatctgctccgccccctgcacgtctatgtccatcaccacgtttttcccctgttccagaagattcaggatgtccgccttcagcgtgccgtaacggttgccgtgcacctccgcatattccagaaagtccccccgctccaccctggcggcgaattcggcggcagtcaggaagtggtagtccaccccgtcaacttccccggacctgggacggcgcgtcgtgcaggagatgctgtacacgcacagcccgttttccgtcgcgcggcggcacaaggtcgttttcccggaaccggaaggcccggacaccaccagcaaagttcccaatggctgtttcatggctgttattcgatgttctgaacctgttccctgattttttccagctccgtcttggccgccaccaccagatgggccagcgtggagtcgttcgccttggagccgatggtgttgaattcccggaagatttcctggcagaggaagtccaggggcctgcccgcgggcgcggacgaaccgcacaaggtgcggaactggtcaaaatgggaggaaaggcgggtgatttcctcggaaatgtcgcacttgtccgcaaacagggccacttcccggatgatgcgttcatcatccgcagaaacggacaggtcggcctccgccagacgcttgagcatggcttcccgcagcctgacgggcacggaaggggcgtgctccgcgatgctgaggcggaattgttccagcgtatccagcttgcccagcacgtccgctttcagattggctccttccgccgcgcgcatggcggtaaaatctttcagggcgcccttgagcgcctcttccaccaccggccaagcctcctccggagaaagggcggcttccgccgtggaagtgatgatttccagccgcagcaagtcggacgcctggaggggcatgggctgcccggccaggtcagccgcacggttcagcagccccgcgagggaggccagcttgttttcatcaagctggagggagccgtccgcttccgccagccgttccacggagacggagacgcccacgcggccgcgtgatacggccccctggacgatggagcgcacgggggcgtcccattccgcatagctgcgcggcacgttgacggcaatttccgtctgtttgcggtttacgcctgatatttcaacaaggatgttgtaacggtctgtctgggcaacggctctgccgaagccggtcatgctgttcatggttacgggtcagatttaggttaagaatgggagtaggccttcttcacctcgtccgccacgatggaaagccccttgcgcaggagttcctccgtctgggtgaagctgatgcggatgcattcatgccggtgcggccagggttccccctcctccggaagggcgaagaagaagtggtggccgggattcacaaaacatccccgggccttgcaccgttcgtagagttcctggcacgtgatgggcagcccctcgaaccacagccacaggaacatggcgccttcactcttgtggacgcgccacgggatggattctccgaagagttccggcagcagggacagggcgaattccgcctgtccgcggtaaaacggcgtgagggtttcacggcagacgcgctccagcgtgccgtcttccagatagggcattaccagcgcctggcccaggttgttcgggcacagggaggaggtggtcaccatgctgaccacggcccggatgacgtccgggcgcgcaatcacgatgccggtgcgcgtgccgggcagaccgattttggaaaggctcatggtcaggatcatgttttcatcccaggccggcttcacgggcacaaagcagatgttgggcagcggcggtccgtaggcgttgtcaatcatcaggggcaccccggcgcgggacgccatctcccgcaggcggtccagctcctcatccgtcaccacgttgccggtggggttcgtggggcgggacatgcagacggcggccgtttccgggcgtatgtccaggcggtcaaagtcaatcacgtacttgaacgtatggccgtccagcatgcggatgccgggccggatgccccggaacatcacgcccccgcacagggactgggactggtagcccacataatccgggcacagcggaaaaaggatttcacgcatgcctccgcccgggcaaggccccgcgagcatgttgaacagcgtgaagcaggccatctggccgccctgggtgatcgccacgttctccggcgccaggttccagccgcagcgttcattgagaaaacggaccagcgcgcgaatgaaggcagggtcaccgcccggatgggcgtaatggcccaccagcacgtcaaactttccattcctcaccagctccgccatgctgcggcgccagagttccgtcacctcaggaatgacggcggggctcccaccgttcaactggcacaggcctgtttcctccgaatggagggccttgaacaaatcctccatcaaatcatcaatacccgttctggccgtcaggtggcctccaatctccgataattgcatcatgccgcgggcattgtagccgcatgcgcgttttatgcgagaaaaatcattgttccgcagggcgcatgaacagtttgactttcccccccgttaatgttcataatccccggcatgttcaatatcgtgcgattcaccaggcgtacctgtccggcgctggcccttgcgctggccctcacctcgtgcgacagcggtacgaatgaagcccttacctcctttattacgggaaattcctcctcggaacaccagcagctccaggcccagctccagcaggcgaaggacgccctggcccagatagaccaggaaatcagccgcgcggaatcccacgacgcccgcgtgaactacaatcttcaaaaacggctttccaccccgggaaaagtcaccacgcctttcacggtgaaggatattgacattctgccctccaagcgccgcgacttcgagcacctgtgctttgacattgaagacatgcgcaagacgctggctcagcgcaagcaggagttccacgccctgcaataccagtataacgcgtatgccgccaaactggccgaattcaagcagtcccacccggtagattaaccccaccccacgcaacccatgactgactcaccttcccccaagcagccgtccgacgaggccctccctccttccgaagacgaaacccgcttcgcccccagggagaacggcgaagaacacaaggacggaccctccgcccctgcggctaaaaaacgcctgaaaacctccctggacgttgtgaccgaacacgccgcggaagaagaatcggcccgacaggaagacgccgaacggaaagccaggggagacgcccttttctggaatctgtgccttgggctgttcgccctcatcgtcatcggggccggctacatcgtttatgaaaaattctcccagctcccggacccggtcaaagacgcgcgggaggcgctggaggccaatcactcccagctcctgaaaaagcaggtacagctcatggaaatacggaacaggaccgcccccaaggaacagctcctcggcctgctggacatttttgaacatacggcatccgatctggaagagacgcagaagtccattgagaaggagaaaatgcgcgtggccggcatccggggggaaatccgctcctactttgaacgctaccgccaggacgccagggccaaggcccgcggccgcaaattcgacatcctcagaacatcccattccggcaaaacctacctgaacgtggaaatcacccgcgtggaaaatgaattcgtgcgcatcatgcacgaacaggggagcacctccattccggccggagacctcccggacgacatccgggaaatgctggcctacggcgaccccctgaacatcacggccatgaaccagacggacgcctcccttcaggcccccgtgatccgccgggcgccttctccggccccggctccctcccccgctccacagccccccaaaaagaaagtggtggtggaggacctggacccgcccgccgggaaaccgcaaattgaaacgcccacacacacgggagattcggacggatcctcttccgggaacatgtgggttcctcccgcccattctccgctgccccccatgtaacaatcatctccatattatgaaaacactcatattacccctcgtggccgcgctccttgccggagtcgccggagcttccgaagcctggagcactaaccccgcagaggccatgcagcaggccgccgcccggaaaaagggcgtgatgctggaattcaccggttccgactggtgcggagcctgcatcatgcagaaaaagcaggccctttccctccccaaggtgcaggaagacatcgcccgctccttcattcccgtggaactggactacccgcgtaaaaagcagcaggacgaacagacaaaagcttctctggaaacctacaagaaatcctacggcatcaccggattccccacgctggtgtttgcggacgcccaggggcgccccgtccataccgtcgtaggctactccaatccggaccaggtcatgcaggatacggaaaaggcggcggaagccctcaaaacgcagcaggccctgacggccaaactggcgggacagcttacagagcaagaacgccgggaagccctggtccagctgctgaacacggttccccagtccagcatccgcaccttctataagccggctctggaagaactggcgaaactggacccgcaggatgcttccggcatccgcgccaaactgaacaggaaagagctgctcaatacccagagagaggaattggccgatacgttccggcagaaaaacgtccacatcctggcggagcaaaagcctgacgaagccctttccatcatggacggctacctgaagaaggacgggctgcttccggaagtcaaacaggctgtcctcatgcaagaggtgaacctgctcatgcagcaaaacagggtgaatgaactggaacggccccttaaagaagccattgcgcttcttccggacagctttgaaggaaaaatgtgcagcaggcttctggaaaaactgcccgaaatcaagaaggaacggggccagctgaagccgggggaagagcccccgcttccccccggagccatccgggccactaaaatgatcgttcctccggcgcccgcgaaaaaataacctattttttcctgccgggtaccgggttctccctgcccggcaggtccgcacatggacctttccgccaaccacatcctcgtcgtcttcctgctcactacgctggccggtctcgccaccggcatagggggcttcatcgccttcttcatgaagaggacggatacgaagacgcttaccttttccctggggttttccggcggggtgatggtgtacatttccctggtggaactgctgggagaggcgcagcaccggctgatggaatttgaaggtcacacggcaggcgcatggattgccattgcctccttcttcggaggcattgccgtggcggccctgattgactacctggtgccggaagacgaaaacccgcacgaagcgcgcggcccggaagacatccacgggcagggcagcggggaattttcctcctccaaaatcaaaaggtccggcatcctgttcgcgctggccatcggcatccacaactttccggaaggggtcgccaccttcgccgccgggctggactccctgacgctgggcacgtccatcgccctggccgtagccgtccacaacattccggaagggattgccgtggcggtgcctctttactacggtacgggcagccgtaaaaaggccctcttctattccttcctctccggcctggcggaaccggtgggcgcggccatcgccatgctcttcctgttccacttcctcacccccaccgtgctggccatcctcttcgcttccgtggcgggcatcatggtcttcatatcctttgacgagctgctgcccatggcggaacgctgggggcaccaccacatttccatcatgggcatcattgccgggatgctgctgatggcggttgtcctgatctgaaccggccctgctgcgggaaagaaattttccgtgtcctggacgcgggcgtattgagcatttcccggcgtcagggggtctaaacggaaacccccttctcatccatgccggactcccctgctacccctgctacccctgctacccctgctacccctgctacccctgctacccctgctacccctgcttctcctgcttctcctgcttctcctgcttctcctgcttctcctgcttctcctgcttctcctgcttctcctgcttctcctgcttctcctgcttctcctgcttctcctgcttctcctgcttctcctgcttctcctgcttctcctgcttctcctgcttctcctgcttctcctgcttctcctgcttctcctgcttctcctgcttctcctgcttctcctgcttctcctgcttctcctgcttctcctgcttctcctgcttctcctgcttctcctgcttctcctgcttctcctgcttctcctgcttctcctgcttctcctgccgtttccgccgctccacagccatcttcctccccttcccccctttcctgctggaaaaaaggcttccgccgttatgcggatttccggggctgcacttcccgggcggaattctggtggttcatggctcttcccctcctggccctgattccggccttggcaggctacatcctgacggactggctgcacattccggatacaaggctgagcgtttacggggacgccctgaccatcctcctgtgggcagccctgatagttccctgcgcggcggcggcattcagacgcctgcatgatacgggcaggagcggcctctggattctttccgtactgcttcccttcggcctggggcacctgatctttttctacctgacgctgggagaaagcaagacggacggcaacaagtactgccgccgcgcgggcgcacagccggcaaacgcctccgttactcccggagaacggaaaaagccgcctttcacgccgttttacctttactggctcatcagcctgcggaagctgaccacggtggccgggcgcgcctcacgggcggaattctggtccttcttcctcctttccgtcctcctgttcctgccgctgggctacagcatgatagacgtggacagcaacccgctgggcttttacgtctccccgtcccgccaaatcctgctgtacgccgcccacccgcaggataccctgatcctgctggcgcacgcctgctttaaccccaccttttactttttctaccagtccggagagctgagcatgctttccctggagcttctggcggctgtggcggggctcaacatcctgttcaacctgccggtggccgtgcgccgcctgcatgacagcagcctgagcggaaaattcatcctgattcccatcctcattttcatcgttaccttcctgctgattttcctgctgcgcctgattccggaggacatgacgccctacctgggctatctggggatggcctccagcctgatggacctgttttccatcctcttcctgtccatgatgctgcttaaaagctctcccggtcccaatgaatatggcgtgcttccgcaaaaaataaccgtatcctgattccaggatacggttgaaaaacagtcaacgccgcaggaggccgcattgttcgcctgcaaatgggagaacgtcagtccccgaagcatacgcccaggtcgcgcgccgtgcgcactagctggcagtcggggtccaccagcttcagggttttcacggcttcctcaatgggcacggcagtcatctgcgttccccggagggcaaccatgcagctgaacttgcgcttttccaccagctccacggcgtaactgccgaaccgcacgcccagaatacggtcataggcgcagggggaaccgccgcgctggatatggcccagcacgcaggaacgcgtttcaattcccgtggcttcctccagtttcttggagatcaccttgccgatgcctcccaggcgcacttccccctgggtcttttcatccagcagcaccagttcgtccgccaggcgggcgccttcggagaccactaccaggatttcccgctgcccggccgccttgcggtccttgatgcatttcaccacgttttcaatggagaagggaatttccggcagcaggatcacatccgcgcttccggcgatgccgccttccagggcaatccaccccgcatgccgccccatcacttccaccaccatcatgcgctggtgcgcgtttgcggtggtttccaggcggtctagggattcggagacgatggaaacggcgctgtagaagccgaaggtgacatcggtcgcgcccaggtcgttgtcaatggtcttgggcacccctaccacgggaaggcctatttcagaaagcagcagagctgtggactgggagccgtctccgcccacgacgatcagggcgtccaggcccagccgccggatggtggccttggtcttttccagcacggcgggttcaatcgcccccttctggtccacgcctaccttgatggcgaagttccccttgttcacggttcccaggatggtgccgcccttggcgcgcaagccgcggcagcagacaggagtcagccattcaaaccgttcattgccttcctcggacagaagcccttcaaaaccgtcgtaaaaaccgacaacgttccagccgcggcgggaagccgcgcctaccacaccttcaatgactgcattcaacccgggagagtcacccccgctattcaaaacaccgatgttcatattcggtgcctcttatagcagaaaattccggggccgtctacttcctatctcttttctgtaccagatttcacgggaagctggacaaactccttgggatccttcatgtccatgccggaagcctgccagttttcccacacccgccagccggtggtcatcatctgcttggccaggggatagcggttcgcagagccgagcaccacaataatcatgcgctgcgggtaaatcacctccgtccccgtctgggggctgcggcgggagatggcgttgcgcgtcacgctgagcagcaggcaggggccggcggcgcgggaggttcccgccttgatgccgtccacgccgggagagctcatgagcttgttgttgttggaaatatcatacatcgtcctgcccttggtctgggactgcacctcaatgcggcggctcgcctgggaaacgatgtagcagaaggccgggttctgcatgctgtaaacgcccagcagggccatgtccagcgcgcaggaggtggaaacggagttgcccgcgtccaggccgtggggagcggtgaagcgcgtcttggccatcctcagggaacgggccaggttgttcatttccgtcacgaaggcggcaatgggtgagccgccgccccggcgggacaccaggtcacggcccacaaaggaggcgatggtcagggcggacacgttgtccgagcccagcagggtggaatacagcgcgtcccggagcgtcaggcggtctcccggctggaggtccatgggatttccggcgcggaggccgaaggcttcctgcggcacggcgatgaaggtgtccagcggcaggcgcgtgcgggccacccagtccagcgtcaccatggcggtagccacctgggagaggctggctacgggccgttttgcttccgcgttggaactgaaaagaagtttgccggaattggcctcaatggcgatgtaactgggccgttcctgcgcctgggcggagaactggaatacacaggccagggtcaagaggaatagagatagctttttcatggcgggaccggcgggatagtgcccgttccccccacgtttgaaaagtctaaaatattttccgtacaacacttatatgtcatgacacggaaaaacgcattgacctttcggctcctatcctatttgttggaggaagccgtttcccgcaaacggaagcagtccggacatccccaccgccatgaccagcattcaatttttttacaaccgggactttccgggaaacgccctgcgctccaatgccctccaggcgctgaaccgtctgggcatgaaaccggagatgcgggaaacggaagccgcgccggagcaggtcggcgctccgcttcccgccctcgccattgacggggagatcgtcgtttccggcgtggagccctccgtgcgcgagctggaaatcctctttgaagaccacgcgcaggaaggagaggaagattccgcctgcggcgcgtgcggcatggagtgcggcggcgtgaacggcacggagcattgccccatgtgcggccagcacggggaaggcggcagcgtggcgggcaggattatcggcttcgtgatcctgctcattattctgttccttgcggttaaaatactgtcctgaatctttccacgccgccttcgtcttccctctttttacagttgccccacgcgccgggattggaccggcatgcgccggcgcagtcgccgctctgcttctgggcgccttctttctgcgccgccgccccttccggaaatgggcgtgcgcagcggcggagttttacgtggccgtttacggcgtttccagcccatgcaggcggtcttgataatttcttgaattcccctttccgtcaggacacagtaacggcatgcgctccttcttcggttccattctcctgattctggtgctggccgcccttggcgccaccatttactaccactggtccaccaactcccacctggagttcgaactccgcaaccctgacgaaccggaaaaaaccacgcaggtcatcaacatggagaagcgggctgccgccctccaggcggccccggcggcggaagcccctgctcccgctgctccccctgcggaagaagttccggctcccgccacggggataccggaagccacggaattgtaagggcgccactttccacaccatgaaaccggttatcggatacacgctgggcgaccagtcgggcataggcccggaagtcatctccgcagctcttgcctccggagagctcccggaaggggcggaataccgcctcatcggcaagagggtgcaggtccccctcggcaggccgaatgcggaatccgccaagcacgcctttgagcatctggaacaggcggcccatgccctgcgggaaggaacggttgacgccgtcgtcaccgcacccgtctgcaaggaaaccctgcacgaggcaggcttccgctggccgggacagacggaattcttcgcggaacgcctggatacggacaattacgccatgtgcctgaccggaaaacggctgacggtgggcctggctaccatccacacgtcccttcaaagcgtgccgtccctgctgaacacggaggaactggtccgcatcggaaccctgttgaaaaatttctgcctccgcaagggaatcctccgcccgcgcatcgccctggcggccctgaacccccacgccggggaacacggcgccttcggcgacgaggacggaactatcattgccccggccgtagaacggctgggggccattcatccggacgcggaatttgacggtccgtccgttccggactgcgtgtaccgggacgccgtggaagggaactatgacgccgtgctggccccataccatgaccaggggctgattccgctgaaactggtggacttccataccgccgtgaatgtcacgctgggccttccccgcccccggctgagcccggaccacggaaccgccttcaacctggcgggcgccggaaaggccaatccgtccagcaccatccacgccttccagctggccgtaaggatggcgcagacgcgttaacgcccctcttctttccggagttttttccgccacacctctgccacccgttccgaggctgaaacccaataccggaaggtttcttccatcaggggatcactttcctccctttctcctttattccacaaaagcagagcaatcgttaacagatctgcggcggaacgttccaaggcttccctgtcatgctccctcttttggaaccagcaccattgttcaggcgtcagggccggaagcctggaaaacctttccgccatctccacctgccggtctgcataacaccggattaacaaaaaccgcctctcacgggaaatccggggaaccgtatccgtcaacaaccccagaacttcgccactccagcaccgttgcagcgtttcttccagactgccgttaaccagcgggtcgtgatctatcttataagacagggaagattcaggattcaacttccaggccagcagcttttcataggagtctccctccggggatgacggcagaggcagttccgcctgcgcgatgaaatcatccagggagtctatcgccgtcttggacgcccacatcatcctgcgcagcgcagaaaatccctcttccgcctcctcatgggtaatgacgccgtcatcctccaattccgataaggaaactatctccttctttttttcccgtttcctgctttccgccatttttctgaacaactgcacatccacgtcagccacacggcaccactcctgcgtggtagggggtccggacatgaacgcttcccgccacgccttttccatccggtcagcctcccggttcaattccttgaccacttttttgcaggaggaggaatccttcacctggctgccaatcgtctccaaagccctggtaaacgtttcatcccccaccacatccaccatccggacgccggaacgggcgctcccgcagcagaggaatccggcaagaagcgccatgcagaacaatttcaccatgaatggatgattggcaaccgtacgggaaaagtcaatctcttccgttgcggcgttccccattctttccttccccggcgggaataaaatgcaggaaacggcatcttcccggaaacaaggtaaaaaataggcttgctttctgaagacaatcattgcaccttacttgcccgcaaggtgcgcaccgttcgcacgacacatttctaattatcacaagaccatgagaaattacgaagctcttatcgtattcaacatgaagggtacggaaacccccgttgaggagttgatcaataccgtagccgccacgatgaaggaagaaggcgccgacatcaccgccacggaaaacaccggccgccgcgaattcgcttacgaatccaaccacctttccgccggccagtacgtgacctacacgttctctgcggaaccttccgccatcaagaccatccgcgaacgccttcgcctgaatccccagattcaccttcagtactacaaggtgctcggctaaagccggcccatgcggacgaagcatccgctccttgccttttatcaaaaagaaccgcctccctaaagaggcggttcttttcttatggcctgttccttccgtgcacggaagcagggaagccttgttcagtaaacgtttgccgccctggaggcaatgttcctcagcagctggcggatgggggcaacaggaggcagattttccacgccgtatgccctggcaattttttccatgcggggaaagctgatccaggtgctgccctccttatcctcccatacggcaatgcgcagaggcagttccgtggcaatgcccgggttttccagcatcaggttggtgcctaccttgggagagccgaagatgacgaccttggaggggggcatttccagtccggcttcacgggcgttcttaccgtggtcaatcctggcaaagacgggaatggatttttccgccagaattttttcaatgcgctccatggtttcgtccacgccgaagacgctttcataaagatacagggaatcgtcgtccagatggccggagcccagcttgggatccagcgccccggcgatgcggcgcgccagattggtcaggtccacgccctccttgttcgccgtcagcgtcacgcacacgagttcggacgggtccgtgaaccggcagatgtaggaggagaagccgggaacgccgcctttaatgtccatcaggcccttgtggtgagggaactgccagccggccatggccggaacgattttcccgttgtccagccggatgggcttgtaaatcatgtcccggtgcttttcatccttcaccaggatggagcccgccaggcaaatgtcccagaagctgatttcctgcggcgtggaccagatgtccgaaaaaccgcgcagggaggagcgcgcgggcggcggaacggatttaacggagccgtcctttaccgcatagcccgccgccgtttccgccgggtccacatattccacacgggatttgaacagggaatgcctgttggcgtgttcgcgcacgttgtcctgctgcacggctcccagatccttcccgaacatggtgtgctggaggcccagcggctggaactggttttcccggacgaattcttcataaggcatgcccgccaccgcatcaatgaccatggacagaagcaggaagttcgtggcgctctggcgcacgtccgttccggaggggaattccagatcgttcagcctgaccagggaaaggagttccgccggatcataatcccggcctatatcgaactggggggatttcctgtagtccggaatgccggaggaatgctgaagaagctggagcacggagacattctgccaggcttccggcaggccggccacatagcgggacaccttgtcatggatgtccattttgcccttttccacgagctggaaggcggcaatggcggcatatccctgggagatttccgccgcaggccacaaggtattggtggaagacagcaggcccgtttccgcattggacaagccgtatcctaccacgcggggaatgtagggggcctggacaatcgcaagggtcatgccgggaattttttcctcctgcatgaagtcgtaaatcaactggtccatggactgcccaaggtactctaccctggaatttccgcggccctgggccgggagctggatggttgcagattcttgagcggacattttggtggggatgttatttgcatgtgcgggaaggccgcccagcatgcacgcgcatgcgagaatccctcctgttaacctgaatgatttattcatgggtgtctttttataagaccgcattccgcgcatacggttcattcaatttgtcatcactatccccaaaataacgcaaaggcgggagaatgcaatcctcccctgccccgtcctccaggaaaagggtcctcccgtcccggttccgtgatttgcgggctacagggaaacgaagttttccagcaacttcacgcccagtttctggcttttttccgggtggaactgcgtggcgaccaggttgccgcgcctgatggcggcggcaaaacgcacgccgtaggtgcagaaggcggccgccagggattcatcctccggctgcggataataggagtgcacaaagtagaagtacggctccggccccatgcctttccagatgggatcggcgggattggaaagagtcaggctgttccatcccatgtggggcaccttgagttccgattccgcaaagcggaccacgcggcccttgaagatgcccagtccgggcacctgttcgtcttcctctccggtttcaaagagaacctggtagcccacgcagatgcccagaaaaggcctgtcctgccctatccacgtccggatcagcggcaccagctcctggctgcgcagcttttccgcgcagtcgccgaaggcgcccacaccgggaagaaccagatgggtcacgcctgccgcatcctccggcgtgcggaccagatggccagtcacgccggcagcctcaaaggtgttcagcacgctgcggaggttgcccgcgccgtaatcaatcacgccgagcttcatggacttacagcattcccttggttgaaggcagcgtcccggcggcacgcgggtcaatggccgcggcctgccgcagcgcatgggcgatgcccttgaagacggattccgcaatatggtggccgtccctgccgtagagcacttccacatgcaggttgcagcgcaggttgttggccagggcgcggcagaattcctcgcacagggtcagcggaaagttgggcgcgtccggaaggcccccttccggaatgcggaagaccacatacgggcggttgctcaagtccatcaccacgcgcgcgagggtttcatccatgggcaggtaggaacagccgtagcgcgcaattcccttcttgtcccccagggcgttcttgatgcattcccccagaacgattcctacgtcctccaccgtgtggtgggcgtccacttccaggtcgccgcgggcctggagggtcaggtccatcagggaatggcgagccagcaaatccagcatgtggtcaaaaaacgcatggcccgtggcgacggcggcgcacccggtgccgtccaggttcagttccatgctgatgtccgtttcaccggtgacccgtttgcaagaagcgttcctcatgtgactcttctatactgaagccgcggcggaagaaagcaggaaataccgcatggggtaagatttgcccgcttttccgcgcaaaaaaccgcatggcccagtaatagggccatgccaccggagccccctccatcagaagaattccaggaggcttttatattaaacaacacggggtaaatggactaaacaggcccgacggacagaacgggtccagctttacttgatccatcctgtccatgaaggccacttttgcggcgcttcccggagggtcttttctccgggaaacagccggattattttttcctggccttggcagcggcagcccgttcctcctggcgcttcttgtcccggtcttcacgggccttgcgcgccgcttccgcacgttccgcgcgttcgcgggcacgctgttcctgcaggcccgcgcgcaccgtctccgtcagttcctcatagtattccctgggaacctgggcggtgcggacttccgtcagggcctccatggcctcgtcaaatttcttctcgtcacacaggttccaggccttttccagtgcggcggaaccggccccgttttccgggtcctggtttttcaggcgttccgcatccgtagcggccaccagcttgacgtccctcatggcttccagggagccggccgcaggttcaaaccaccggtccccgcgctccttgaccttcttgcgcaaggcccggtgcacttccgtgagctggttttcacgctcccggatggcggtctgccttttctggaaagcgtccatcaggagctggcgctgctctttcgtcagcttggggtctccgcggcgcttttcctcttcctttctcaaggtttcacgttccttttccagggctttttccttggcggctatcatgacctccagcttgcggttgagctggccggcgattctggaggcatccggataggcgtccgccaaagcggcggagccggggtagccgtcacgcaggcggtcgtacacagccatggcctggtagggattgcgcacggcaagcgccttgaagcgcttcaacagcttgttggcctcatggtcgtatttggtgcgcacggtcacttccgcctcctccttggcttcctgggcggcctgggctccttccaccagcttcttctcctccagcagaaccaccaccctggccctggccttgacagcggcgtcatgggcaagcccctggggattcttcttgatagtcttatccaggtccgccagggcgctttccaggtccttggcgttcatggtttccggcttggcatacgtcttgttgatcttggcggcctccagttcatccggagtcgccttcttgatggattcaatcagttctcttttaacggtcacggaatccttgatcccgccggctacggggaccaggaggctgacgctttccggcgtttccacctccacggtgcaatccttgtaaacggttccatccttgagttttacttcatccgccgcggcaagcggaacgagtgcggtcaacgccaatatgagggacttgttcataaatctaaggcttttttccagagtaatctgacgaatacgtatcttgcactttaccagaagacgccctcttggcgacaaaaaaaagcccggagccgtaaaaacggttccgggcccggagagataaaaaacaggctgtttctggcttacttctcggcaacggcttcttcagcggccggagcagcttcctcactggaaacgcggggggcttccacgatggccacgatcacgtcgccggccagttccgtgttcacgccggagggcagtttgagatcggcaatgcgcagggtttcacccagcttcaggccggagatgtcggcagtaatggcttccggcaggttcttcacctggcagacgatagccagttcatgaatggtctggtccagcacgccgcccagggctacgccgacggcttcgccttccagaataacgggaacgatggagtgaatgaccgtggtgtcggtcacggcctgaaagtccacatgcaggcaggcgttggtgatggggttgtgctgcacttccttgaggagggccttcacgatcttgccgttaatgtccagggccaccaggatatgttcggaaacggcggaagccagcatgcgagcgaattcgcgggcgtcaacctggatattgacgttgtcaaaaccgggaccgtaaaccacgccggggaccaggccctggctgcggagttgcttcagattaccggagccgcaggctctcgtttcggccttgagggaatgggatgtagccatgttttatagaggcaatattgagtgttgattgataatgtttcctaatcgggttcaggcagaggccccgccgggatttctgaacccgcgtaaaccggtactcaggtcagggcgcaggactctgcactaaaattggctaaatgtcaaataatgatgatacggattctccgtcatgtatgcgctgcacggcatggcccagcaggtcgcccacgctgatgcagtccaccttggggccataggccatgggaacggtgtcggaggtaagaacgcgttcaatgcaggagccggcaatgcgttcgcgggccatgtcccccagcacgccgtgggacacgcaggcaaacacgcgctgggcgccgcgttccttcaggatgttggcggcggcgcacagggtgccggcggtctccgtcatgtcgtcaatcaggacggcgtcacggccttccacatcaccgatgacgttcatggcttccacatgcgtggcgttgacgcggtgcttggcgacgatggccagctccgcacccagggcgtcggaataggcgcgggccattttcacgccgcccacgtccggggagacgacgaccaggttctggaggtcttttacatagtgctcgcgcaagtggcggattaaaacgggagcggcgtacaggtggtccaccggaatatcgaagaagccctggatctgggcggcgtgcaggtccatggtcagcacgcggtccacgccggcggcggtcagcaggttggccaccagcttggcggtaatgggaacgcggggctggtccttgcggtcctggcgggcgtacccgaagaaggggaccaccgcggtgatgcgtccggcgctggcacggcgggcggcgtccaccatcacgcacaattccatgatgttatggttggtgggggggcaggtgggctgaatgaggaaaacatccttgccgcggatgttttcatttatctttacaaaactttccccatcggggaaagtgttcaccgtgacgtccgtcaactgaatgcctacgctttgcgcaatgcgctccgcaagttctctgtgtgctgtaccgctgataatcttcataccggaaactgaaaagcggacgcattctgaacacaggtccacataatcgcaatacttaattctcacaatttgatttttctccatgatgggttcccccgttccagatgccaaagagagatttctaaccgtccccatgattgccgccctggccgtgtgcgccatcctgctggcggtgccctacctggcgtttcccgaattcggctctaccgggaatgaaagcagcatccagtggctcgtttcctcctggaacaagcagacggattacgaacacggctggctggtggtccccatcatcgccttcatgctgtaccacgccagaaagaagattgcccaggcgcccaggcgcatggactggcgcgggctgatccttttcatcccggcggccctgcttctggcgctctccttccgcgtgggacagccccgcgtggccgtgggcgcgcttcccctgatcctgctgggcggagcctggtacctggccggaccgcagatcgccaggctgtgcgccttccccctgctcttcttctggctgtgcattccccttccctctttccagcaggccacggtggagctgcaaatcgtcgccacggagctggggcacctgggtgcggcccttttcggcgtggatacctacctgcaaggcaccaacatccgctccaccggcggccactgggacgccttcaacatctcaggggggtgcagcggcatgcgttccctgatggccctgctcatgctgtccgccgcctgggcctacctgtccgacctgaagttctggaaaaaatgcgtgctcttcctcagcgccattcccctggccgtcatcggcaacggcgtccgcatcaccagcattgtggtgctggcggaatacggggaccccgagtttgccgcgaaaacctggcacgactggtccggcctgctgttcttcttccccatctgccttctcggcctggcggccgtccactccctgctggccggggagctgatctggaagccgtcccggcgcaaaaagctggtcgttaaaatgaacaagtcccactaagcgtttccgccgccatgaacattaaaacgctcaagattttcgtccttcctctcctgctggccgtcacgctcggcggcatttacctgatgccgcgcaagggagaggtgcaggattcgtccatcagcatggccctccccaccggcatgaatccggacggctggcacggcacgcgccggcaggagtctgaacaggagcgcggcatcctggctccggacacggaattctccaaggcggattacgtgcaggaagtccccatcagcctggacgcgccggaaaccgctcccgtgctgtgccgcgtctccatcgtcaaatccggccatgacctgaacaactccatccaccgcccggaacgctgccttccggcccagggtcatttcaacctgacgggaaccaaggtggaggtgcccgtggaaggccacggaattatcaggatgaccaagctgaaatcccagcagaacatcactccggaccagccgcagcctatcattctggacagcatgcactattacgtgttcattggccaccgccacatgacggaggaccacctgacccgtaccctgacggatatgaaggacagggtgctgtacggcgtggaccagcgctggtgctacttccagatttccaccgcgtacggggacaagatcaaggtgccggaggaggaagcccggaaacagacggagcgcctcatcagccagcttctttcccaactggtgaagtgggacgaactggacaggtagcgctccccgccccgcggcggtcagcccggaagacggccttccagccatgcggaggccgcctggaaaaggctgcacgtttcttccgcgggggcttcatacagcatgggagcgggcctccggtgggaataaaggcgtccctcccggtcgcgccggtagccggaaaaagccaggttggcgtccgccccggcgcagtgcccccagcggccgccgatcctgggcaccacgtccatgaagccgcccccgtcccgcaagtaggcgttcccccaccattccacgcaggccgggcgcgcgtttttctgccggcgcgccacggcgtctatggtcaggaggcagagcggagcggcctgaacagactggcgcctggctacttccaccgcgcaggagccgccatagctgtggcccaccagcacgacgggcagcccggggcattcccggcgcagctcttccagctccgccgcaatttttccgcacctgtccaggaacacgccgcagccgcctccgtcccagtggtaataggccgtggcatgcgccacccctggcaaaaaaccgggaaacctcttttccacccggctcaggcaacccgccaccacgtccccgaagccgccgatgaacacggccaggtaaccgggagcgcttccgcgggaaagcaggttcagtgtcctttgaaaatgcatgacggagcccatgatggagaaatcacgtcaatatccaagtccataagacgttctggcttgataaaacctgcaaactgtccaaatgtgatggtatgcaagtaatcattcaccaatgggccttcaacggaagctttgaccagcttgcctccctgccccgccaggaactcgtcaacgactggttcggctacgacgtggagccaagcgcggagttcgccttcgccacggacggcgaatacctctggttcctggcctcccgcagcaaggaagccaccgtccatccggacgcccggccaggccagttcctgccggagctgtggcggtacgacctggcggaatggttcatggccgccggggacggcaccaattactgggaattcaaccttgcgcccaacggcgcgtggtgggcctgcgccttttccgacacccgccgggccaatgaagacattcccgccccgctggccgtggataccaagtgcatcctgacggacgagggctggtgcgccatggcccgcattccgctgaacgaactgcgcggcgtggacgtacgcgactgcaagctggccgccacgttcatcctggacaccccggaccagattttcctgaccacggcggacgacctttccggcaacccggacttccaccgcccggactgcttctgcacccccattctcaagtaatccatgtctttggaagaagacatttcccgcatcctggggcctgaaaaggtctccggggcttcggatgtgctggccgcgcacgccggggacaaatggtacgcgtccgtgctgccggaggcagtcgtcttcccggaaagcacggaggacgtctccctgctcctgcgctacgcctcctccatgaacattcccgtcacggcccgcggcggcggcgtgggatacgtggggggctgcgttcccgtgcgcggaggcatcagcctttccctggaacggatgaaccgcattctggaaatctccccggaagacggcgtggccgtggtggaacccggcgtcatcacggcggaccttcagcgggaagcccgcgcgctgggctggttctacccaccggacccggcgtccaggaaggaatgcagcatcggaggcaacatcgccacgaacgcaggaggccccaggtgcctgaaatacggagtcaccaaggcctacgtgctgggcctgaccgtggtgcttgccagcggggaagtggtggaatgcggagggcgcacccacaagaacaaaacgggcttcgacctcggagacctcttcatcggttcggaagggatgctgggcatcgtcacccgggccattctgcggatcatcccccatccggaagccttcggcgcgctcagcgccagctttcctcagttcccgctggccgccgccgccgtgcagcgcatcctgaacagcgggcaccttccctccgccctggaaataacggacagcttcactctccgcgccgcccgggcctatctgggggacagcgccctgccctccggcagccgcggccacctgattgtggaagtggacggcaggcaggccgccgtgcgggaagaactggattccctctgcgccctgctggaagaatgcggcgcaaccgacatcctgcgcgcggacacggaagagaaggcggaagccatttggcagctgcggcgtgaattttcctacagcctgaaagccaccggcatgaccaagctgaatgaagacattgtcattccccggtcccgcctggtggagctggtggagttctgcgaggccatgaaccgggaaacggggctggacatcgcatgctttggccattccggagacggcaacattcacaccaacatcatggtggacgattacgcggacccagagaagaaggccctggcagacgcctgcgtggacaggctgttccgctgggtgctggaacacgggggcaccatcaccggggaacacggcatcggcctggcgaaggccaaatggttccgggaagccgtgggagaaggagccttccacctgcacgaactggtcaaatccgccctggacccccggaatttgctgaatccgggcaaaatgggactcccgtaacgtaaaatagacttccatgatgcccccggacggggcatcatggcaaccgcacttcatgaacagcccgcacaagtccatcctagctgccctttacgaccatttcccggtcgcagatgccatcctggtgtttattctggaccatcccctggcctggtttacgcccaaatggcgcaggaaaggccgcatggccctgaaagcggtgcgccgctacgtcaattacaaccgcgaccttctgccgcccgagcgcctggcggagtttgaagaaaaccgcaacatgctgaaaacggccctccgccggggtgacaggcagcaggtggaaaccatcaccgccaaactggaatccacgctggaatccattcccggcgcgctgccctccggactggcggaaaacgtggaggtgctgttcgtgattctggccattttcctgggcctgcgctgttatgtagtccagcccttccgcatcccgaccggctccatgcagccctccctgaacggcatccgcgccatcccccaggagggagaccccaccctgatgaagaaaatcggggacatgatcctgtacggcggctcctatgtgcatgaaacggcctccaaggaaaagaaaatcgtccgcttcgagcccgctaccaaatacctcctgctcacggtaaccaacgtgattttcgacgacggctccaagctggaaattccggcggcggaggcggagacgcgccgttacttcctcaaccaggaaccgcgcttcgagtccgaacggcacacgccgttcagaagctacctgccgggggatacgatcgtgaacgcccgctttgacgccggtgacctgatcgtggtgaacaagatggcctaccacttccgcaagccggagcgcggggaagtcttcgtctttgacacgcgcggcattgaaggcatcgccaacaagggaagcagcaccgggcaggaaggcggaacgcactatgtcaaacgcctctccggcgtaccgggagattccctgtccatccgggattcccaattgatcgtgaacggaaaaccggccacggaatggaccatccagagggtagcttccggcaagcccccctaccagccctgcggctatgtggcccttcccgcccccctcagcctgctggacggcagggcctacatcacggaagggggaaccgtgcacctctccaatgataaaaaacgcccctacctgcgtgagtacgtggccctgggcgacaattccacccgtgaaaactcctttgactcccggtactgggggcccgttcaccaatacaacatcgtaggccccgccagcttctgcctgtggcccttcacttcccactgggggcttatcccctgattcccggccattccgcaggcacgctttccccgtcaagacatgactcaagctcagactattacaagcaaggccaagtccaacctggccttcgccctcattgaccttcctgaagaagaacgccgccacatggcggaattttacgccttctgccgtacggtggacgacatcgtggacgaaccgggaatgacgccccgagaacgccacgacgccctgaaccgctggatagaagtcatcaacggcggagacgttctggagctgacggagctggaagaagacatcatcgccctcatccaggacctggagctggacaccacccccatgctgcacctgattgaaggctgccgttcggacatctgccagcaacagcccctgaaccgtgacgaactgctggattacacttactgcgtggcctgctgcgtgggcctcacctccgcccgcatcatgggcgccggggaagccgcctacccgtacgccatcgccctggggcacgcgctgcaaatggtgaacatcatccgtgacgtggcggaagactgcggcaaatccaaccgcatctacctgcccagagaggacatggaccgcttcggctacaccctggaagacctgcgcggcagagtctattccccccagcttcaggaactgctgcaatatgaagcggacctggcggaaaagttcttcgcggaggcggaggaggaatacaaccgcctcagcccggaagacaaggccgccctcatcccggcccaggccatggcgctcatctaccacaccattctggacaaaatgaaggcgggcggcttccgcatcttcgacatccgctaccgcgtcaacaccttccacaagctctggcttctgttccgcaccaagctggacatcgacccccagtcctactacgacaagtccaaggcgtactatgacaggctggtcggcttcctttcccgccccggcaggaaggatgaaaagtaagggccgctctcccggcgcgcagggcagaaaaccacggcctttccttccggccctgcgggcattatgcttgtcctgaaagctgtgttcctgtaggaatgcagcatgcaaactcccgcagccgccctacttcttgttctcacaacactaaccgggctgtgcgcggcagcggactacccggaacgggcgcagcgcacacaatccgccgggaaccatacctggtacatagacccggaccagggaaacgacggcaaccccggaacttccccctccacggcctggaagagcatgtccccggccaaccgcctcatcatgtcgcgcggggacacactcgtcatccagcccggagagcatgcggcctctctggcgctcatgggggaaggctccagacaggctccggtcactatccggttcatgcccggcaggcacgttttcaagcacggcgccctggtcaccggaaagccgcagatttccaacaccaatgacgctcccaacgaggccaaggccatggccatccgcctggtggaggccaaaaacgtacgcctggagggcaagccgggagccaccgacatcctgctggagggaaaagccattttcgtctgcatggagcacgcggaaaacgtttccctgaacggcctgggctttgactacgtgcaccctaccatgggggaattcctggtaacggaagttgaaggaaacactatgaaggcgaccattccggacggcaccctgtatacggtgaaggacggctccctgacttggcgcggtcccggctgggaattccggatgggaggatattccaaggtcttcgatgccgcctccggcactttccagggccgctttgacccgggaaaaacggtcattaaagaactgtcccccggaaaaatcagcatcacgttcaaggaaggcgccccgaccatgcgggcgggacaatcctaccagaaccgcaacacgcggcgggactgctgcggatttttccagcacaggagcaggaacatcgtctggaacaactgccatatctactacatgcacggcatgggcgtggtttcccagttcagcgagaatatcatgttcaataacttgaagatagcgccgcgcctcggctctctgcgcaccaattcctcctgggcggacaacctgcatttttccggatgcagggggaaaatcatcgtcagggactgcgtgctgggagcctcccatgacgacgccatcaacgtacacggcacccacctgcgcattgtgaaccagccggcgcccaataaaatcaccgtccggttcatgcacccccagaccttcggttttgacgccttcgcggtgggggaccggattgactacgtttcctgcaagacgctggttccttacgcctccaataccgtttccggtatcaaaaagctcaatgagaaggaaatagaactcacgctgcggcagcccaaccccgggaacatccagcccaacgacgccgtggagaacaccacctggacgccctccgtccacgtcagcaacacggtttgccgccacattcccaccaggggcttcctgcttaccaccaggaagccggtgctgattgaacggtgccggtttgagaagacgggcatgcctgccattctggtggaggatgacgcctccggctggtatgaatccggtgtggtcagggacatggctatctcccgcaacaccttcattcaatgcggggaggccgtcatccagatcgtgccgcacgccccccagccggaaggaaacgttcacgagaacatcaccatcaccggcaacacgtttgacctcaggaacggcaccgccatccgcacccgccataccggcaacgtaaaggcggagaaaaacaccttcaccaaagacgggaaaaacattcccgcggagaaggcggtggatatccggtagggagcctccccttttaccggtgccgtgaaacgtgcaccgtcacggagacgctgtccgtccgcggcaggatgaacttgcgcagggtgacgatcacgtgacgcgcgccgaactccttcaggcaaacctttcccatgtcctccgccagcgtttccaccagcttgcggggccgcgccatggcttccgccctcaggccgcgggcgatggaatcataacagacggtcctggaaaaatcgtcgttcaggccggagagggcttcatccggataaaaagtgatatccgccttcagggtctgcatggaggcgcgttcctcctccggcacgccgatgaaggtatccagctccaggccgttgatgttgatggaatcctgcgtatctgaaggcagggcatagcggcgcatcagcgtgcgcaggacaagcaggtccggaacgatgatgtccggcctggccttggaaagctgggcggcgtcattatagccggtcagcacggcgatggacgtgatgcccgcatggtgggccgtctctatgtcatgctgcatgtccccgatgaacgcggtttcatgggcatgcagcccgtgctgggccagcagggtgtggatatgggcgtccttatggcggatgcccgcgtgaatggcttcaaaatattccatcatgcccagctcccggcactggatgtcgaactccttggcgtccacgctggtgaggataaagcagcgcacgccgcgcgcgcggcagaactccaggaattcccgcgcgttcggcagcacctccaccggcgcgttggaaacgcggaaggcgtaccggaaatggtcttccagttcattcaaatccgcctggggcagcacgcgggcataatagtccggatagggaagctggaattccgcgcggaattcatccctgtccatgcagggttttccgtactgggaaaaaacgtaattggacgcgtccagcgtcagggccaggtcatccaccagggtgccggaccagtcgaaaatgagattcttgaacatgggaatgcgtatcgggaaaaactcagtccagggcgtaccgcatggcggccagcccgaagaaggcggccgtctccacccggaggacgatggggccaagcgtaacgggagagaatccggcctccagcgccatggccgtctcccggtccgtaaagtcgccctccggccccaccagcagggcagcactccgcacggagcgggagcgggcttcctccagcacgtccctgaccgggcgcacgccgggcaccagggaggcgatcacgttcagcccttccggcgctccgcggcgcagccattccgcaaagggaacgggagacgcaacctcgggaagcgtgttctggccgcactgcttgcaggcctccagggcgatgcgctgccacttctgcctcttggcctccgcctcccgcgcgttcaggcgcacgatcgtgcggtccgtcagaagcggaacgatggcggaaacgcccagttccacggatttctgaatgatgaggtccatgttggctcctttggggaccgcctggcacagcgtcagatgagccaactccggagcgggaggacattcctcccccggggccagcagcaccccggagctgcgcggaggttccgccaccacggcatgggcggcgcggccgcagccgtcaaagacgacgcaggaatcaccctgtttcaggcgcagaaccttggcggcatggtgcgcctcatccccgcgcagctcccaggagggagcggcccattccgaagccgggaggtaaaagcgagccatgcgtgaaagggaaaaacggaccttacttgttcttcaggtagcgcgccgccttgtcggcaaacgccacgcaggccggctggttgcgcttctcatccaccgtggaggcaaaggcgttcagcttgtccatctggtccttggtgagctgggtggggatttccacctccacttccaccagcatgtcccctacgtccgaactgcggagggctttcatgcccttgccgcgcaggcggaagatcatgccgttttgcgtgccttccggcagcttgatggtggccgcgccttccagcgtgggaaccttcagcctgccgccggagacggccagggaaagcggaaccggaaccgtgcagctcaggtcgttgccttccctctggaaaatatcgtgaggttttacgtcaataaacacgtgcaggtccccggtggggccgccgtgcaccccggcatccccttccccggcgatgcggagctggctgcccgtggccacgcctgcgggaatgcggatggtgatgtgggaatcctccctcacgcgcccttccccgcggcagacggggcacgggtccgagatgatttccccggtgccgtggcaggtggggcaggtggactgctggacgaaaaagccgctctgctgggtgatgatgccgcgcccctggcaggtgggacacgtcttgaacgcttcctttccatcccgggctccggtaccgtggcaggccttgcaggtcaccaggcgctcaatctccagcttcttggtgcagcccttcgcggcttcttccagcgtaatgtccaggtcatagcgcagatcggaaccgggcctcttggaggatctcttctggccgccgtggccaccgccgccgaacatgtccgcaaaaccgcccatcccggaaaacatctgggcaaaaatatccatcgggtcctggaacccgcctccgccatagccgccgcccgcggcgggaccgccctgttcaaaggcggcatggccgaagcggtcgtaagcggcctttttgtccgcatcggaaagcacctcgtaggcctctcccagctccttgaacttctcttccgcggaaggatcgtccggattgcggtccgggtggtacttcaaggccagcttgcggtaggccttcttgatctcatcatcagtggcgtccttggaaacgcccaggatctcgtaataatctttcttagccatgtggcgtgaatgttaaaaaaacggtcaaacttgcggttcgggttccggagtctcggccaccacgacgtttgccgggcgcagaagcctgtccttcagcttgtatcccttgcggatgacgcggagcacggtgccttcaggctggtcggagggttcgcgctggagggcttcctccgtggcgtggtcaaacatgctgcccactaccggttcaatggcgctcacgccattgctggaaaggaattcgtccaactgcttcttcaccatgctcatgccgatgtaaatcatggaggcggtgtccgcgctggccgccgccatgcccatttcaaaattgtcaatcaccggcagcagttcttccagcaggcgctggttggcaaacttggcgcattcttccttttccttcaccatgcgcttgcggtaattgtcgtattccgcggcggtgcgcatggcggtatccctccatttaagcaattcctcttccagggaagcttccgctcctttttcctctgcgggggcgtcctgggcctgttccagaacttcctgctcttccgcttccgcgttcttctctttctcttcgttgctcatgcggacaatgtagatacttttaccgaatgcgtcaacggcctgctaagacatggatgacgtttgacgcgtgatgaccggaacatgatgcaactcatctacgcagaaaagggaatggcggctttccggccagcctccctaagcttccggaacgcctgcctcaggcagcagccgggcaagcttttccgcgcagccgtccggcagctccaccactttcagccgggctgactctccgcgcagcaggctgacggcggaccggggaacgtccagccaggcggacaggaacaggatgacggccctgttcgccttcccctccacgggaggcgcggcaatgcgcagcttcagcacgcgtccggcacggggatcgtcctcccagcccgcggcttcgctcttcttcgcattgggaatgactttcagggccagcttcatgccttgcacctttccgtcccggatttcccgctttgcctcgccaccaggtccgcgtacctgatgaggccgcccccgaacaggtccagagcgctccccgccgtggcgtccatcgcgccgccgctcagggcgtctatctcgtcaaaatcctgaatacggctgattccgccggcataggtcatgggcaggcggcgccagcttcccagcatctccaccagttcccggtcaatgcccgtgcagaggccttccacgtccgccgcatggataagaaactccgcgcagtgctccgccagcatgtccagcgtctccgccgtcacccggagctccgtcaaggtctgccaccggttcatggccacggcccagccgcccggaaccctgcggcagctcaaatccagcaccaggcgttccgcgcccacggcggaaacaaggtccttaagcttcccctccagaaatttcccctccgcatcaaacaggcaggaggtgacgatcacatggctggctccggctgaaatccattccttcgcgttccccggcgttatgccgccgcctacctggaggccgcccggccacgccgccagggcttcccgcgccgcaaggtcgttgccgggtcccagcttgatcacgtggccgccgtgcaggccgtccctgcggtacaaatccgcataccacgccgcgtcgcggtcggagacgaaattggtgcgcagggaagcgccgtcctgcgtcagggaaccgcccacgatctgcttcacgcgcccgtcatgtaaatcaatgcatggtctgaatctcgtcacgcggccactttgcccgccccgtccccgcaggtcaagaagggattaccctccggcgccgtccggaaaacgggcgcggaaaattacacaaaacagtcccgggcctccgctttaccggataaccgcccctgaacatcgttcaagaagccgatgaaaaacaacctcgtcaaaaacaacctcctttcctactgcgccgggagcgccctgtttgccctcctggccttcccaccttccgttgcggaagccggaatccatctgcacggtgaaatccgcatggccccgggaggacaagtcagcctcctgtatgactcctccggattccctatctggggctattccgcatgcggccggcccatttacgcctattcccccgcaggcatgcccatctacgtcatcaggggcatctaccgcggctgctacgttcccgcctggaatcccaggccgcattatcacggccccttctggcctgcgggcgtctgccgcgggcgccatgccgcgcatccgcggtgcggaatgccagggccgccgcggccccactgccggccctgccgccccaggcctccctacggcgggccgccgtcccatttccaccgccggtaaaacaacacgcgccgcggaaatacggaacggaaaaaggccactcatggaataacgcgccttccggctacatcctttcctttattcagggaaggaaaggccgtaccacccttccccgagcagcttcaccagggtgaaggaatattcccccttgcggttgggctccttgctgcgggaaagcaggacgcgcacgcggagcatgtcaagctcgtcattagcgttcagcacccggtatggggaatgctccatttcctcattgattttaaacagcataaacagtcgcttgcccgtttccgattttctgggaacataaaccatgggccgcgcaatgctgcgctcctccgacccgttcattccgggagcgatcagcttgaacgcgtagttgtccttattctccgacatgcggtcccggatcatccacacgcggaattccgcgatgtcctccccttttccacggacaaaatcctcccagttcaccggctggtagcgggcgaactgctgccagtccagcttccaggcgccatcctgtccatccttgaaaaagcagaattccatgtcgggcgtcttttcaaagcctatcagcaactgggcgcagggatgcccctccacctcaagcacggcgaaacttttaggccccacgggcttgctggcaatcacctcaggcggagatacggcgtaatgcctgaccatcaaaggaagcgattgcagggaattccacacgaaggaggatttctggaccacgtccggagcgctcaaatatttctgcgcctccaccaggcaattgcgcagcaggtcctgccgctccatcgggggaatgtggcagggaggccagaaactgtagtccaccttgtccttcagcgtggcctgcaattccccggacagcatctccggcgtggcgcaaatccgcgcggcggcccctgaatcccgggatgcctggcgcttctggagccagaaaaaaaggccgccgaaaaacagccccagcgccatcatgaagaagatgacggacagaatgcgccccagcgcgccgcccgcttttccgccgctcctgcgcgcggcaggggaaaggggcggtttattgtcagataaatcactcattttaaaccggaaatacccacagaaaacaactgcggaaggatggtcaaacactaccggaacgccaagggtaacgcaacgataaaaaacagacacatttttttatcccttccggagaaaattgtttcacatccacaagcgggtgatgtacattaaaccggacgagtttcaagaactcccaccttacctttcacccctccctctttttaacgccatgtttggatcattcaccaccgttcccgcccccaagggcaacaagaatcctgaatccacccccagctggatggacgtagccaagagccaggacacccccgaaccggttgcggaagccgtaccctcccccgcttcctacgcccccactacgcgcgtccagcaactgacccgcaacgtgctgaactccgacgtggaggttgtcggctccctgcgtttttccgacgacctgctgattgacggcaccgttgaaggcgacatttcttccgaaggggtgctctccgtaggccagaatgccgtcatccgcgcggaaatcaacaccaagtccgtcatcatccacggcaaggtcatcggcaatgtaacggttacggaccgcgtggaactgaaaagcaccgcggaactcgtaggcgacatccaggccgcctccctggctattgaaggcggcgcgatcttcatcggccattccaccgtaggcgcccccacggtaggcaccgccggagcctccgccgcgaagaaagcggcccccgttcataccttcactccggaaccggaagcccccgccccgaccagccagagcacgctggacattgacgcggaataagaaaaaccttctaccagccattttcaggggcgtcaaaggaacggatcgttcttttgccgccctctttgttccatgactccctccttccatcccgttccacggaccagcagcgcgccttccgggaaaatcaggcgtcccgctccggccccgccctggacgctcccggcaaccgcggaaagcagtcctgcgcccacccgggaggtagaatgcttttcctgccgcaaaaacacttccgttcccgtcacggccgtttccgccagatgcgggcactgctccgcctacatcaagctggacgacgtcatcctgcacagcaggacgcacagaacgaaggtgcagacctgcggaagcgtcaccgtgcaggccaatgcagacctgaagggactgaacatcgaatgccgggacctggtcttatacggcagggcgtccggcgattttctgtgccggggcgtctgcaagatcaaaacggaccagcacatctccggctccatctccgcccgcaggctggtggtggaaaaaaagacgacggtgctggtcacaggagccatccaggtggaaaacatctggatccagggttccctggaaggaacgctcatggcggatgaaaccgttaccatccaccggcatgccaaattcctgggggacatcacggcgcgccgcctcatcattgaggaagggggggcgcaccagggctcctttacccggcttacgtgacatgaaccttcccatctccatccgcggcgcacgccagcacaacctccggaacctggatctggaccttccatccaacaagctgatcgtgttcagcggcccttccggctccgggaaatcctccctggcgttcgacacgcttttctccgaatcccgcaggcgtttcctggattgtctttcggcacgggccaggcagggcatggaacagccggaaaagccggaggtggacagcatcaccggactgcccccggccctgtgcctggaacaatccgccaggcagcagagttcccgcaccctgctggggagcatcacggaaattctggactacctgcgcatcctgtatgcggctgccggcactccccatgacccggaaacgggcaaggaactggtgcgcaaaagcccggaccagattacggaggaactcgtctccctgccggaacagacgcgcctggtcctggccgctccggcggaagccctgctggcccaggaccctgcggcgactctgggcgacttccagcgccagggctttctgcgggtctattggaacggggagatgcaggatattgaggaaataggctccccggctcctcccccgccggatgccgccctggtcatcgaccgcatcatcgtccgcggggaaaacacggcctcccgcctggcggactccctccaaacggccctccggatcaatccggacgaggtgcgggccatcatcaccaggccgggggaagaaactagcgtccaggccttccatacccgctaccgcaacccggaaacgggcttcctgcttccccagcttacgccccgccatttttccttcaactctccactgggcgcgtgcccttcctgccagggctccggcctgaatgagcgggaaaacggcccctgccccgcctgcggcggcctgcggctctcccccctggcgctggccgtcaccatacacacgccggaccgcgcctataacctggcggaactgacggctctaccgctggaagacatggccggagagctggaacggctgaagacgcccgcctccctggcggcggcgctggacccgctcatgaaggagatcaacaagcgcgtgcgcttcctgaacgaactgggcctttcctacctctccctggaccggcaggcaaacactctttccggcggggaactgcaaagggcgcgcctggcctcccagctgggcggcggtctttccggggtcctttacatcctggacgaacctactgccggacttcaccccgccgatacggaccgcctgctccgcgcgctccggacgctccgggaccaaggcaacacggtcctggtggtggagcacgacgaacaaattctgaacgcggcggaccatctggtggacatgggccccggctccggcacccacggcggccgtattctggcgcaaggtccccttccggaaattctggaaaacgccgagagccctaccggatcatggctctccggcaaacggagcatgcccgcctccggacacaggacggttcccaccgggcatctggtcctggccggggcggacaagcacaacctcaacaacgtcaccctgaacatcccggtaggcacgctgacctgcatctccgggccctccggttccggaaagtccacccttgtccgggactgcctcatccccgcggtcaggcaggacatccccgggaaaaagggcgttccgcgccgcgtgcagggctcggaacacttcaaccgcctcgtcgtcatcgaccagtcgcccatcggcaggacgccgcgctccacgccggccacagccaccggactgctccaggttctgcgccccctttacgcccagctccctctttccaagcaaaggggatacacggcggcgcgcttctcccccaacatccgcggggggcgctgcgaacggtgcctgggcacgggtatgattgaagtggacatgaactttctgggcaacgtcacgatgccctgcgacgcctgccagggccagtgctacaaccgggaaacgctggaagtcacctggaagggaaaatccatcgcccaggcgctggcgctgacggtggatgaagcggcggaattcttctcctccctgccccgggccgccgctatcctgaaaagcatgcaggacgtaggcctgggatacctcagcctcaaccgccgggcagacaccctctccggcggggaatcccagcgcatcaaaatagccgcggagctggccaaggccccggcctggaaactggcggaggacggcaagcgcgccctcttcattcttgacgaacctaccagcggcctccacttcaatgaagtggcccttcttctgacggctcttttccgtctgagggacgccgggcacaccatcctctgcgtggaacaccacaaggacctgctgaacgccgcggactacctggttgacatgggccccggagccggaagacatggcggaaacatcgtggcggaaggaacgcccgccgccgtagcagccatgccggaagcgcccacggcgccgtggcttctcgcccgttaaggaagaataattattattatcttgacgtttttcaggcttttatctagcaatatgggaattcctctctgcttttccgatgaatccccgttccttttccctagcgctgctggcgctgtttcttcttcctgaaacactccatgccacgcccgtattccttgaaaacgtctccgaatccggcggatggtatgactgcaacaagaaaaccaaatggaagtggggcagcggttccatgacagaccgtccttccggctactacagcccggacaatcccgtagacagccagctctgctgggcagcggcggcctccaacgttcttcaatggtggcagaataccagaagcgacctctcacctacgacccccaacggaaaatcctccacttacggcaacatgccggaagcctgccagctgcgcatttaccaaaccctggcgacgagctggactgacaagggagggtccgtggaacaggcttacaactggtggttcaacggaggaatgctcccctccgccttttatgggaccgactccacgatcagggacaacccctcctccgaaggaggctactggaaagagctgaacctgaccgtgacctacgacaagtggggaacgccggacaacaccccgctattcagctcctacaccttctgggagggcgataccagggacggaatctacagcgttttgaaaaacagcatcaacaacaactggggaaccacgctcagcatcggcgagtacggaaccggccacgccatcaccatgtggggctatgatatggacgcggacgggaacctgattatctacctgacggattccgatgactatgcattgggaatgttccggcagaaagtcatcgtggacgatgagaaacacatctatctgaccagcgtggacggtgaaaacaacgtgtacggctataattacggtgaagcaggcctgaccggcacccggctgggcgaacttcaaagcttcaccgccccgctgggagacctcaggattccggaacccggcactggaattctctccctctgcggcgtattccttaccgtgtcccgccgcaggcgcatcctgcggtaaggccttccgaactcccttctctctcaaaaacgggtcttgattcttgccggggaaatgtgcagaatcgggaaacgcataagttcagaagagcatgaattgttccaatgttctccagtgcggttacctgtgaaatgaatgacgcttccaacaaccacggcgagctggaaagcaccgtctcgacctattccgtcgacatagaaacccttcagcagatagccctgaaaggagacgcccaggcactgtttcaactggcgatcagttatgaacaggggcgcggggtagcggaaaaccagcaggaagccttctactgctaccagcaggcggcggaactgggccacgtgacagcccaactcaaccttggctgggcctactccaacggcataggcgccccgcaggacaatgacaaagccttttactggtaccggaaagccgccgagcaaggccatcccaccgcgcaattcgacctcgggttctgctatatcaacgggctgggcgtggaaaaagacgaaaaccaggccatcacctggtacaaaaaagcggcggaacagggtcacgcggtagcccagctcaacctcggctggatttacgccaacagcgccagccagaaaaactgggaacaggccgtgtactggtacaagcaggccgcggaacagggggatccccgtgcccagtacaacctggcctggtgctacggcaatggaagcggcactccccggaatccgcaaaaagccgcctactggtatgaggaggccgccatgcagaaccacgctacggcccagtataacctgggctggtgttatgaaaacggtttcggcgtgcagccgaatatcgacaaggcgctggtatggtaccacaaatcagccctccagggccagatcacggcccaatacacgctgggctggtgctacggcaacggccggggcatggaagtggacatggccaaagccgtccactggtacaccaaggccgccgaacagggccatacaacggcccagctcaacctggggtggtgccacctgaacggcaagggaacgcccgtcaaccgggaggaagccttgaaatggtatctcaaggcggcggaacagggcaacgccacagccatgttcaatgtgggcaactgctacgcccacggctacggcattccgcaggatgacgaacaggcggcggaatggtaccagaaagccgtcaggcacggcaacaaaaaggccgccagcgccctgcgccacctggcctccaagcaggaaaaagagaaaaaaccggatgcggaggcctgaaaaaacgcttcttctttttacaagaatcggagaatcccttttcgcagcgcagcagccatcaaaaaacgcagggaaaaaacatatccccatggcttaaagaaaaaacgtccgcctgggattgaaggcccccggccttcatcaagaagccgccgcattccatcaccgccgcctcttcctcccaccgtccgccgggcctttccgggacaacctttccaccgcctccggcagccgtgttgcgccatcgccgcccagaacgacgtcaatatcctcaagagcgcgaatcagatcgatcacttcccgccggggcaaggccccacccgcagacatgcagaaatgggtgcggcacgccagcggccttccctggtaaatcatgcacttcccctgcccgttcagaaatgggcagcttccgtccggcggcagctccacgcgcgtgcgtccggcggcgcgccacgccttccaggccatccacgcctctccctgcgtcacatgcggcgtctctcctgtcagccggaaccggcagcagtccgccacgcccgtgcaggaacgctgcgcccgggaagcgcggagagcgccttcatccagaaggcgccgcacttccatcagcatttcagcggagggaacagctccctccgctcttccatgacggcactttcccggcgccatgactgcggcggttaatgcgtcaggccatcggccttcgcctggttccaatacgcgtactcggaacggttgaagtccacatactccggagacaaatccgtggtgtacaccgtatgggaaaactcgccccggttcaaattgatatccacctggaatgcggaaacctgcacggcctgccgcaaatcgtccgacggagtatccgcctgcatgccgccgcggcaggcggccaatccggcgatgtcgatgtcgatcttctcttcatccaccttcgcgccgcaatagcccacggcatggataatgcgcccccagttgggatcgttcccgttccaggaactcttcaccagggatgacttggcgacggcttccgccgccttcttcgcttcatcctccgtacggcctccggtcacatgcacggtcacaaacttggtcacgcgttcgccgtcctgcacgatatgcttggccagctccagcatcacatgggccagagcctgctggaacgcgtaaatatcttccggggattccagcttcacgccggaagcgccgttcgccatcaccagcaccgtgtcgttcgtgctcatgtcgccgtcgatggtgatgcaattgaaggaacttttcacgccggactgcacgcacagctccagcacgtcgcgggaaatacccgcgtccgtcgtaataaagcacagcatggtagccatgcagggattgatcatgcccgcgcccttgcagcatgcgccgatgcgcacgggcctgccctgcaccatgaactcaatggcaatgatcttctccttcgtatcgctggtcatcacggcctgggccacctcgtgccccttgtcgcgggaaaggccttccgccaattccgggaacttcgggtaaatgcgcatcatgggcatcggcaggccgatcacgccggtggagcacacggccacttccgcaggcttcagcccaagaagttccgcaacgctcctgcactcgcccctggcgtcttccacgccctgggctccggtacacgcattcgcattcccgctgttcgccacgatggcgcggatattccccttccggaggtgctcccggctcaccttcacgcaggcggcctgcactcggttggtcgtgaacgtgcctgcggaaacgcagggttccgtggaataaatcagggccaggtccaggcgcgtggccgtaggcttcttgatgccgcagcttacggcgctccccacaaagccctggggcgcgcaaacgcccccgtcaaccggaatataggatgaatcattcatcgtcttgaagtgccttccagcgtatcaaaaaactacaggacccacaagccttccgtttcatcgaacccgcacatgatattgaaggactggacggcctggccgcccgcgcctttcaccacattatcctccgcgctcatcagaatcacgcggttcgtccggggatcatgggcccagccgatgtccacgcaattcgtccgcgtcacattcttggtatccgcaggctggttgcgacccagaaggcgcacgaacggagccgccgcataagcttcttccaacaggcggccgacggactcgggatccgctcccttcttcaccctggccgtaatggtggagcaaatgcccgtattcacgggaatcaaatggggggtaaaggacatcaccaccgtcttcccagcggcatgggaaagctcctgctcaatctcgctcaaatggcggtgcttcggcacgccgtaggcatggaaactctcattgcactcgcagaacagcaggggaatggacgccttgcgccctgcgccgctcacgccgctgccggagcagaccacgacgtcctccggctccagaatgccggccttgaacaggggaatcaggggaagaaggatgctggtgggatagcagccgggggaagctacgatgcgcgcccgggcaatctcctccctgcgccactccggcaggccgtacacggcctcctgcatcagggccgtatccggatgggcgttgccgtaatactcctcgtacacttccgggctgtccaggcggaaatccgcactcaggtcaatcacgcgcacgccgcggtccaccaggccgcgggcataggaagcggccacgccatgcggcagcgccaggaaagccacctccgcgcccgtggcggcaatcgcgtccacatcagaatccgtaaacttcaggtcggaacccggaacctgccggaaacggggaaacacctcccacaacggctgtccggcatactgacgggaggtagcgcacaccagcttcactccgcggtgattcaacaggatgcgcaacaactcctgtccggtgtagccactggccccgacgactgcaacttgaacttgcttcatgacaaaaaagatatgctatgaaaaaagactcttgccaacactaaagttttcctatatacacctcgccgtcgcaagacacggccccggtcggtccgattttatcgggttgtagcgcagtctggtagcgcacctgcatggggtgcagggggtcgcaggttcgaatcctgtcaacccgaccacttttaaccgctgtaagttgaaaagcttacggcggtttttcattttcaggcatattgaaataattgccgtccgcctgcctctcaacatcatggggatgtgtgtctttctatccatgagcccgcgtcaatgcggaaaaattaggaaaaggagaaaagcacgtggaatcgttgtattctgcccatttggcgtttccgcctgacgttgcatgcgggatgacttctttttgaaatacatgcaaattcctttcgcaaggtgtctgtcctgaaacaggttcccgagtaatcaggagatatgtatccaaggaaaaacaggatgttcaccagccggggttatcccgaaccaattagacaacaatcatgaatgagattatcacgattaacggaatcctgatgaccacgcagaatgaattttccgctcatgcaggaaacgcaagcattcacgtcacggcacaggaaaaggaaaaatggaactcaggcggtcaaggacctaaaggagacaagggcgatccgggagccccgggaccggaaggcccccaaggccccaagggtgaacccggcatccaggggcctcccggcccacaaggccccaaagggaacaagggagacaagggagaaacaggcccggcaggtccgtgcggttccagtgtggccccgggctgcttcatgtggttctgcggcagcacagccccgaacggctggctggaatgcaacgggacaattctccaaatcagtcagtatccggaattgtacgcggcgatcggcgccacctatggcggcgatggcgtaactaccttcgcccttcccgatttgacaagagacaacggattattcatccgttccacatctaacggtcgcgcagtgggaaacatgcaaagcgatgccatccgtaatattacagggaaaatacctaccactccagtgacctccggaggtactgcacccggaacgggagtgttcaaacaaacaacagcaatcccagatgactggtgcggaatgaattcttttgtgagccaccggataaccaatgtcatttttgacgcatctgaagttgtccctacagcggaagaaaaccgccctgtcaacatttccatgctgccgctcattaaatattaaaggataaaaaccgtcaaccaggttctaccacagagaagaacgggcggaaaataatataaatgaaacaacattttaaatataaaaaaatgccagtataataaaagctatatgtgttttctgaccgaataaggaaagcatgtactatcctattccaataaggagaaaaccaactttcataaaattcaattttagctggtgtaagtccaattacttacatcagctttacattttccctgtgtacgctgcacactcaatctttcaacgcaaacaagtaaacgttaaaataggaaagaataacatggaaaagtaaattttctatctgaacatatttttatttttctgaaaatcaatctttttcattgttgagctatgtttcatttgctattattggaatgatatcgcaccactgctgaatcagtggaattctttcctttccctcttccttctgaatgggaaagatgaattatttaccatcccataccagatgacacgcataggaaagtccatacccttttttttcgtccttctgagtttcttttcttctgcacaggaagccaatgttcctattgacagcattccctttgagctgggcactgccagccgcatttacgtgaaggggagcgtcaatggcagccgtcccctgcgttttctttttgataccggagccacatccatggtcatcagcaccaattccctgaaaggcgttcccatggaattcaacgagaccgtcgtcaaccacggcgccacagggtccgatgaagtccgcggaagcacggagaacaaattcgccatcggggaacaagccatggagcacgttccctttattgccattccctattcaccggaccagtgggacggcgtgctgggcctttggttcattaatcagcaggtaacggaagtgaactacaccgatcggaagatttacctgtatccgcacggttcctatacgccgccggcgaatgccatccgcctgaagattgagtacgtgatgggcgttccggttgtccccgcacaagtgacggtcaacggaaaaacccaccagctccgtttatccgtggataccggctctgaccgtgtcctggacctcaacacgcctttcgtcaaaaaacatcatttgctgggcagccaaaagccgttttccatttcccgcatttccagttcggattcccataccggggttctggaaaacgtcatgttcgacagcatccaactgggcggctgcaagcttcctctcatccccggcgccttctccaccgtcaccagcggtattcagagcatcgcggaaatggacggcgtcatgggcaacaacctactgaaacggttcaacatggtctatgattcccgggaagggtatatttacctgattcccaacaatctgctttacactccgttttatgattgcctgctccgcccacagccggacgcggccctttcccccgggaagtaaggcattccggcaccacccctaccctaccggacgcttccgcgcaggttgatgatgcgggtgcagaggtccaccagcttcgttcccagccgggaatgcagaacgcggtagatgccgaagagggcgcaccgaacgcggaagtcgttccctttcgcaatgtgtctcaacaggcggaagggggattccggggatttgacgaactcacgccattcatatttgtccagcagcgtccggacggcgtccagagcctcctttttttctgccgccgtctggttcaacaggttggaggaaaagagctggatgctgccgttcagccagttcagcaccgtaatcccggctctttccagcacgccctgttcccggtaggccgccgcaatcaggtcgatgcgttccagagccggataaaagccggaaccctttttgtccggggccttgtacacgttcaccagggagtccgggcgggtaggacggtagatgtacaggcagtccggtattttcacgattcttttcacatagggctggagcaggttgttgaagagggcgtcactgccctgcttcattccggaccggaagcggaggcccgtttttttcaggaattccgcccggtacagcttgtcccagcacagttcgctgaacggccccatcgttgcaaagtcatagtggccgcaatgccattccgggcattgcaggccgttgagcatgctccagcggacggagaggggcatgtcccccgcaatcgtcgcccccatgcacgccacgtccgcccggtattcctccgccgccagatacaggcgctggaacatgacgggggaaatgtagtcgtccgggtccacaaagccgatgtattccccggaagccgcatccagcccggcgttccgcgccgccgccacgcccgcattcggctggtcgatgacgacgaaccgttcatccacggcttcatattccctcaggatgtccagggttccatccccggagccgtcgttgatgcagatgatttgaatgtcccggagcgtttgggcgcagacggtatccaggcattttttcatgaagggggctacgttgtagcagggaatgatgatggaaacgagcggcatgtttttatgaaaataaaggttagcgtgatgaagaagagtttaattgacggaagaggtccatccatgcggcgcagacggcatccatcgcataacggggcgccttgttccgggcggcttcccccatgcggctccttagctccggctgttccatcagccggatgatggcgcgggccagggcgtccgtatccccggggggaaccaacaggccgtcttcttccggggaaatgacgtcccgcggaccgcacgggcattcaaaagccacgcacggcacgccgcacgccatggcttccaccagcaccatgccgaagccttcaaagagggaggggaataccagcatggaggattgaagcagtttttcccgcaccttccctgtggctccgcgcagcagcacgtttttttccagccctttttcccggaccaggcgttcaagagagccgcgctccggaccgtccccccagatttccagtttccagtccggatgaacggcggccactttttcccacgcgcgtaccagcaggccgaatcctttcaccggaaccagccgcccaacggccacagccgtcggacggtccagggaggcaacccgctccggccgccatacgcacggattgggaatgacatgcactccccgcctgcccttccagttttcttcccggtcctgccgggtgagaacgacggtagcgtcataggttcccctgcggaggccgaattcatagaagtcggaaagagcagccaccacgcgcgcacggattcccccctgaagccgcgcatagtccttccggtacgttccggagtagtggaattcgcgcacggttttccacggctttccgcgcgacaggcgcggtatcatgaatttttccgactgcccgacggagacgactatatccggacggagttcatccagcgccttccgcagagctttcgcatgcctcctgcgccggaccagaatgcccttcagcacatacaggaatcccttccagtcatcctcatagtagttcacacccaggtgaaccaccttcacgcccggagagagggaggaagcggtcctccgggaatcgttggccgtcaccagcattatttcattgccggggatggcagccagggcggcagccttggcgcgggtcacggcctgaatgccgcccgccgcgtccagatcatccagtacataggctattttcatctccgttattcctttcttccgtttttggccagaatgaggcccgtcaggaccactccgaacggcagggccgccagagtcagcaacggccgcggtgattcccgcaaaaaacccggattgcgggccagcagggaggcggagacgtaatgaaccgcctccatgaaccgccgacgccgggagggctggtatttcattccctccttccgcagaaaggcgaatccccgcgggttgagcacgtattggcggaacatgttcctggaggagccgtcctcccggtattccaccaggcaaagcaccttgttcatcgtaagcagcggggcgacgcggtccgccagcatgtacttgtagcccagccccacgtatttttcaccgggaaagacgggatacggcggcaattgcttcatcagcgcggtgcggtacaccagcttcttgtctccgcggcctcccgccgcataaaacccggtcaatgtggtttcctgcacatcccctgcaaaggccgtgccgatgagttcgcccgtcttcacgtccgcatccagccctgccagtccggctacacggtcacttccgtgacgttcccagaatcccaggatggaggccacggcgtcttccggcatcaggtcgtcggaatccaggcagacattgagttccgtgtccatcaattcatacgcggcattgtgggcggcatgcatgcctccgttttcctgatggtggcagcgtatgtccagcgcgccttcccgcatccattccttcaccagttcctccgtgccgtcggtggagccgtcgtccaccaccagccagataaaatcacggcaggtctgccgccgcaggctttcatagcagtggcgcaggcagtccgccctgttgaaggagggcgtgaagacggtgagcaggggtttcatgcttcacctccctgtgacagatagagttcctgaagcttttccgcattgcggacgatgtccagccccgcttcacggatgaaggcggacgcatccgtccgttgccagccgtccgccagttccgctattttccgcgcccaggcggcgggggattttttcagggacataaaattcacatggcccgggaccaccgcgccatcccccggcacccggtcggacgccaccacgggcagccccgccgcctgcgcttccagcatcgcaatgccgaagccttcaaaccgggaggggaagacaaagacatccatcccctgcaccagggcggcaacgtcatccctgccgcccatcaggcggatgctgccgtcccattcaggccgctccgcctcctgccggatcctgccctccccttccccgccgcttcccaccagcgccagcagggcgtccggccttaccgccagcagggcgcggaagacgcgcagcagaaattcgtggtttttgggccaggaaaaattgccgatgtggcccactaccagcctgccttcccagcccatttccttccgcacccgctcccggacctccggggaataggtgaaccgccccgcgtcaatggcgttccggacgacgatggcgtcacgcgcgcccctgcggccgaaaagccagcgcccgcacagttcgttgcacgtgaagcggtgcgtcaggcagggacgcatcaggtgcttgagcacgaagcggaacagggagtttttatcgattcctaccggagagctgtgggcatgcgccgcaatgaacggaatgttccgcgccgccgcctcacgatatacccagtagcccagctcggaacaatggccgtgaaccagcttgtattccggatgtccgtcaaaaaaagccgctattttttcctgatacgccgccagaccgcgcagggtgatgggcggcagcctgtaaatccgccctcccagcctccggatttcctcttcataaatgccgggcgtctcccggtgcaccaggaaatcaaattggagcctgctgcggtccatgtggcggtaataattcatcaccatcgtttccgctccgccgcggttcatgatggtgaataccatgagcactcgttgaggggtcattttgccagaattcttttaatggtcagaaggaacaggtacaaaccgggcacgcatcccagtttcacggtcaggaaaaacgctttccaatgcggggggagaggcgccagaggcagctccctgaccgccgtccggcaccagtcccgtttcagcagttcatggagaatacggcatttccggaaggaggaggccggagcgtcgcagacgttcaagcccaggaaaatgacggagagcgccatgcggttccgcagggcctgctccgcttccggataagctccgctttcccgcacctgccgctccatccggcggaagagttcctcccactggtccgccagctccggcttgtaccgcttggtcagggctcccgccgccgtcttccggtaatggtagaaggtggtggggatgtacaccgccctgcgggccgcccggaacagggaaagattgcagagcacgtcttccgcggagccgatcagggcggtgtccacgaagaaggcttccccttcccggaacagggaacgcctgtagagcttgccccaggccgtaccgtaggagtccagccgttccggacgccccagttcagccccggacggccccaggagccggttcctcagccattccatggattccccttcaaacacccgctcctcccgccagaacagcaccggggcggacgccgttccatattccctggcataactccagaacacgatgtccgcgtcccttcccagcatggcttccatggcggcctcgcacgcgtgttcgtccagccagtcgtcagcgtccacaaacatcacgcattccccttccgccagctccagcccggcattccgggaggcggacaagccggagtttttccggcaagccacctgcacccggccatcccggcggcgcagttcttccagcatgtccccactggagtccgtggaaccgtcattcacgcagatgacctgaatatcccggtacgtctggttcagaatgctttccaggcagcgggagagataagcctccgcgttatagacgggaacgatgacggaaatcacggcctgcctcctttcctttcctgaaggatgcggcggaacaggccgtcccattgggccgtcaccgtttcagccgcgtaccgcttcacattttcccgcgctttcgcggccatggaggcgcgcagtttttcattccccatcagaagttccagggcggaagccagttccgccacctttcccggccgcgccagaaggccgtcctccccatggcggatgatgtcgccggggccgcaggggcagtcaaaggccacgcacggcacgccgcacgccatggcctcagccagcatcatgccgaagccttcataccgggaagacatggcgcagatggaagaccgcagatattcccgcatgatcctccgggtgggcggatgcagcagaaaactttcttccagcccttcccggcgtatttcctccctcagctttccaccatcccgctccgctccgaacagctccagcttccattccggaaatttaccgtgcgcctttttccaggcggccagaagcgctccatagtttttctggggggaaaccttgccgacggcaatcacccttttttcttttccggaagagggtgcctccggataaaacggcaggggattgggaatcacctccacattcgccatgggccattcctcccggttgccgggcgtcagcaccacaaaacgggagaagcgttttcccaggaaccgcatcagggcgaattccagtttcatgagagcggaagatttcaggccgtccgcctgaatcagccgggaaacgtggcgttcatagaccacggggcagccgcagcccctcagcaggaagggaatccagaatcccttgaagccgtcgtcgcaaacggaaacgacagcaggcttgacggcgcgcaccgccttccgaacgccgcttgcccaggccttcagcctcgcggcgggatttccctgcatgcgcacgtcatggacgtgaatgccgggccagaagtcataaaaaggctcctttccttcttcattcagcgtcaggatatggatttcatccccgtaccgttccgccagcaggcgcgtccggacggagagcacccgttccagccctcccgctccggcgatgccgttggtgatgtataaaagccgtcttcccatgtcagatcaatgcctccagtttcaggatttcatcacggttgccgtagtcacgcctccggcattcctcagacaggctttccaggcgcgcgtcatccttcagcagccggaacagggccagcgcggcgccgtcctcgtcattggggatgatgattccgtccacgccgtcttccagatgcccggcggaggtcggaaagtttgtaatggctacgggccgtcccaatatctgcgcctccctcaccgccacggcctttccctcataccgggacggctgcacatacagcccgcaggcggccatgtacgggtaggggttggcctttttacccagaatgaccacgtgttcccgcatgccgcaagcggcaatttcgcggcgcagggacgcttcatccccatagccgatgaggtaccagcgcagtttttccatccccattgccaccaggcgcgcggccagcctgacggcgcggtccatccccttggcatgagagaaccttcccacggtgcacagggacggggccccctccatcacggcggaaacgtcttccagagcggcctgttccctcaccgcttccggggaaacgatgttctgcatctccaccagcttatcctccagttccggaaagcgggacaggaagcccctcccggcctggggggaaatggagatgatgcggtcatagctgcgccacaccggcaattcacgctccacattgattccgatggaggagtagtccgtatgaatccaggctattttcctgcgggccagcaccttgtcccggacgatgcggtggggcgtcaggaagctgatggccaagtcatacacgcccagctttttcagggaaggaagaaacggggagacggcggcggcggcatcgtcaaagacggcgtagttttcacggccttccagccgttttccaaaacgggcggaacgccgcttggcccacaggcgcgcggcggcaatgcccagcctcccttccttcaggatgtcctttaccggacgggacagcgcacggtaggagggaagttccggcagaaggttcactttatccggaatcagcggcatcagctctccggaatggcggtaaacgaacaggtccacctggaaacgggaggcgtccagcgcatccagcagccccagaagagcgcgttccgcgccccccagctccatgtattgaatggctatgaatatacgtttcatctgcatgccagcgtgcgcatgtggcccatcagcccgcggaagggggacgtcctgaacagcacgagtacgtccagccccagcggaatgactacggaaataatgccccacatgaacaggtccgccaggggggaggaaaaataggagcgggaacagaggggatacgtcagcgcatatcccgccgccgccagcagcaggtaccatccgtacgtgatgaagtaccgcctcaggggctggtggaatacatgcctgtacaccagccgggggaattgccagacgcctatggagagaagactgagcgtcgccgccagcagcacgcccgtaatcccccaccactgcaccagcgtgacggaaagggcgacgttgatcacgccctggagaagcggggagtaccggtcctggtgaaagatgcccgccttggtcttgaacaccatggcggaacgcctcatgcccaccacgaagaagttcaggatgatgacgaacgagcaggccccggagagcatgtattcaggccccagccaccagacgatgaagggattcagcgtgttcagcagaacgatggaggacacccctgaaatcagaaagttaatcaggaaaaccctcttgaaaatctcgtacacatgccctctatcctcactggcgatcaggttgcccacgctttccgccatgctgtagatcacctgcatgatgaaggtggaaatggttcccaccaccagcatgtagttggaatagaagcccaccgccgccagccccacgaagctggaaatgacgatgttgctggtggaatgcatgaagtagccgcccacgctgtgcaggaacagggccttgacgttgacgacgatctggcttttcgtcacggcgtccagggcatgggagaccctgctcctgacgtaggggtacagggcatccaccttgcgcaccatcgccacgttgaaccccgccaggaacagggattccaccaccaggtacaggacgtagttgcccgtccagtacaggatggccagcttggacaggttcagccccacctggtagatgaagttgatggcgcccagcctgtaatttttctggtccgcgttgatgagggaattcttgtacgccgtcaggtacggcaggatggagttgaagacgaagatgaaataaaccagcgccaggtagtccagatgcccctcgtccttgatgaaacagccaaggaacggatacaggcccaggcacaggatgaacacggcggcggcaatgatgcggtacaccttgcggtaaaattgcagcagggccagaatccgcggccggtcgttctccgccagaggcttgtagaggtgaaaaaccacgctggttccaaagccggactccagcagcgtgacagcggccaggatgttggtcagcaggccgttgaggcccaggtactccacccctatttcattgacgaacagcttgcgcgtcacaaagcccagcagggtcatcgtggccatcaggctgatggtcaccagaaagttcttgccggagttcagcgttctcaagccttcccctcctccccgtttagttccacgctcagctgcagggccattccctgggcgaacggcatcaggctccacacgtcggaatacatgccgatgcccttggtatccccctggcacatgtccagcacgccgttgcggcgcgtcacccccatcagcgccttttccgcacggaaggcggctttcagaaaacgctcctctccggaaatgcggtaggcggccagcagcagaaggcccagcagggccgttccggaagattcaaacacggattccggcctggcgaccatccagccgaagccgccgtttttcttttgcaggggcagcagttcctccgccagcgccagaatgcgccgcgccattccagccgcctccggcctcccgtgccgagccatcaggcggtaaagctcacacaatcccagcgcgtaccagcccaggccccgggaccagtcatacagccccagcgggtagccgcgctccatttcaaagccatgggcggggaaggaagaacccggcagcagggccatgtcatattcctccacctgcttcaccgccaggttccagtattccccttttcccgtacgtgccgcgcaggcggccgccagcgggcaggccagcccgatcgcatccacgtaacgcacgccgggctgcctgcgcctgtaggccagcgttcccgcccccgtccgcagggattccagcaatgcggcggaagcctccgccacctggtccgccccgcggcatccggcctccagaacggcataatccagcagcagccggtccgcctcccaccgttccggctccggaacggccaggcaattcctaaccagttcatgttcctccagactgcggcgcagcctttccttcaacgcctcatccttcctgtccgcggcataggcgtgcagacccaggaacaacccagccgcctgccacccctgaatggcggcgtccgcgtaggttccccgcgccatctcccacaggatgcgcctgccctggtcccttttgggaacggccggcatgcgccgcgtccatgccgcggccgtccgggccagggcctcctgccacgcgcgccggtcctgccagcgcccgatatggaaacgccccgccagcgtccccaggaatcgccaggcatccacgcaaaccacggccagaactagcaggagcaggacggacaagatggaaacgtacgcaatcatgaccgcttcaacagggttgaaagttcttccggcagacgcgccaggcgttcccggtacgcggggattttttccgcataggcggccttcaggccgtcctccctttccatcatccggacaaacgccttcctcaactcgccagggtcatccatcgcctgcacgggcagcacgtggccgtcttccgtcccgaacaaatcgcgggcaatccccctggccttcacggaatatcccgccaccagcgtgggaacgcccgtggaataggcggcaatggaggcgtgggtacgggcggccaccaggaaacggcaccgggaaatgcagcccttcaattcctcacagggggcgtccccaaccataacgacgcgccccgtgtgccggaaacgctcccgcaacgcgcccagcggcttccggtcatcgttgccgggccacaccacatggggaatgagggccacattcatatccgtagcttccagcaggtattccaccagccgcacatagttttccatcacggccccggcccttccctcatggccgataatcagggggctgacgttgatgccgaccatgttcccttccttccagccctccggcaaaggcccctccttcaccggaagggcaaacgccgggtccgggtacagcaccgtgcgggggcacccgcattccaacagggcgtcacaggtcagggattccctcgccacaatcaggtcaaaggcccggaggtcctccagcatccgccccttcatatccttccgttccagggaacacccccacaggacggtgggcacgccggcgcggcgcagcaggtcgttctgcaaatagatatgcacgggctccccgtagcagtaattgtccccgccgctgcacagggccaggtccgcaccctccttcacgatgccgccgaacgcgagccggtcaaaggcgtcacggacgcccagcacgcgccgccgcagccacgcgcccgcatacccggaggagcacctccggatgggccgctgttccggcagcaccctcaccacctgttccagcccataacgcctgtcttccccgcacgcggaggagaatagaacgccctgcccgggacggagcagcagcatcgtggacctgacgatcgcctcgcagccgtgattgccgctgcctccatggggatataaaagaatcttatgcatgcccattcgatttattttttccggcacgcgcgccttccatcagcaggaacaggcagaagggccagcggttgaataaacacatgctcatccacccgggacagtggaacaccccgggataagcgcgcagcaggttgttttccggcgttcccacaatggtcctcaccgccttcatgcgctccgccaggccgtaccggtccctgaaacggtagatttcaaacagggcgttgtacaccagcccccaccagcggaaggccaggtattcctcgattgacgccccttccagccccctggtatggaagtacttccgctccaggcggaactgcctgacaatccagatgaatttttccgggacaaaacgcgtggacagggtgccttcctccgcccggcggtagaagtatccggccttgtccaccgttctcaaacgcctgatgtatttcaggtacgccatgttgaacatcaggtcctctccataggaaacgtcctccggaaagcgtatggaatgccgggacagcagggtgcggcggtacaatttcaccaccgggccaaaaagcaggaaggagcggaacagccgtacccaggcttcctcctctccgggcctggcgtccagttccatgggctgcggcaccgttacttcatcctttttcccggcgcggacggagcacagcccttccaccaccaggtcgcaggcgccgtcctccacggcggagaccagttcctgaaggtaggagggggtcacccagtcatccccgtcaatgaaacacagccagcggccgtccgtttccttcatgccgcggttcctggcggcggaaacccccatgttcctgtccagatggatgacccggacgcgctcgtccccggaagccagcctgtcgcacagcgggccgctcccgtccgtggagccgtcatccaccaggcagacgtcaaaatccgtgaaggtctggtccagcacggaccccacgcatttttcaaggaaacgcgcggcgttgaacacgggaataatgacggatacggagggcatggcggttcagcgcgtttcttcaaaaagttctttcacggcattcatctgcccatccaggtcaaaccggcttcccccgcggagcgcccgcccgcaatagtcccggcggtccgcctttcccgtcagaatatcttccagggcgcggtaaagccccagcaggtggttttccgcaatcaacccgaattccccgtccccaagctgctcccggactccggaacacagcgtggccgccacgggcgtgccgagaatcaggctctcggaaatcacggtggaatacccctcgctgcgggaggaacagaccagccagtccgccgccttcacgtagggatacggattttccagttgccccagcagggatatcctgccctgcaggttcccctccgcgatcatgcgttccagcgtcttcctttcaggcccctcccccagaatccagagatggaaggagaagccctcctgagccagatagcggcacgccgtcaccagccggtcaaatcccttctggcgcacgagacggccggaagcgcagaacaggacggccccttccggacgttccggaacggatttccccgccttttcccggacgcgcggaacgtccacggggttgtaaaccacccgcgcatcctgcaacggtccggccagggccagcagggagtcccggacattccgggagacgcaggccaccgtgtcaaaacggcggtaaacggccttttcctcttccgcgttccggtaggccggcagcgtccagtggttggcggccaggtcaatgtggacccaggccagtttccggcttccggcatggggggagccagcggctatccgcgtggcgtagccttcaatgaaggcggcctccacgtcataggttccgcgaatgaacaagcggtagaaaacggaaggagggaaatgcctgtaaaccagcaatttcaggccgttccggattttgacgagcaggcgcgcccaggggccgtcctcctcccggagggcgtcaaacagaaaacggacggacacattccgggggtagccggacgggatgtcctccttcctgatggaataaacgaccacctgccaccggtttccgttccagcggttcagcagggtttgcagaattttttccgcaccgccgccggacaggctgttgacaaaaaacgccaccttcttcatttcatttcctccagcaaatgctccaccttccgcacggcgctttcataagcaacctcatcgccgccccgggccgccctttccctccaatcttcacaggattccctgccggagaggaaatcctccatgccgccggccagcgccccatcatgattttccacaatgcgcccgaaccttcccatgccaagctgttcccgcacgccggaacactccacggccagaacaggcaggcccagcgccagcgcctccgtgaccacggtgctcattccctcgctgcgggagctgcatacgaatacatcggcagtggccatccacgggtagggattctcccggaagccgggcatcagcacggagtccgccactcccagagcggcggcctggccttccagctcccgcctccggctcccttcccccagaatcaccagttccgcctgccaaccgcgctccttcaagcgggccagcgcggcaatcagccggtcaaagcccttctgttcttccagacgccccacggaaacaaagcggaaacgcttcttttccggcacttcctccgcagcggaggctccggaacgcacggcatcccggtccaccggattgtgcaggacgacggatccggcatgcgctccaaagcgccgttcaaacgcttccctgacggtttgcgacacatgcgccacggtttgaaaacgggcgtaagccttcctttcctcctccagtgaccggaacaccggcccctgcgtccagggccgggcctccaggtccacatggacccacgccagcctccgggccttcccttccggagcggctgccagaaggcgcgtgggaaacccttccgtaaaagccgcctccacatcgtaatccccggcaatgcaccacttgtaaatccagcccgcaggcagaaaacggtacaccagagcgtacttgagccggtagagccagccccggccgcccacgatggtgcggtaatgcgcgtattttcctacttcctcccggtacggaccgcagtccaccaccgtgcacaccgtcacgtcaaaacgctcccggtccaggccgcgcaccagcccggagagaactttctccgcccctcccccggacagggattccaccaggaacaggactttcagacgggaacgcggcataagacgggcttctgaaacgaattattttcccgcgcacggggaggaggtgtccaggcttctgtacacggcatacccgcgggaagagcggccatggggctccacgtcgcacaggacgatgcccatgcgcttcagctctccgtttttccagatcttctgcaatccggccaaatcacgcttcttcacgcagccggcccgcatgacgtacagcgtgacgtcggccagccgggcgacgatgcgcgcatccgccagggaggagtagggaacgcagtccatgaagatgaaatcatactgctccttcacttcctccatcagcttcctgatgcggtcatgcagcaaaagccgggagggatggtccggcacggttcccgcaaacaggtaatccaggtggtcggaaacgggggattgttccaccagggaacgccagccgccttccccggcctgctccaggtctcccaggcccggctttccggctccgcccagcagggcgctgagcgccccttttcttaaatccatatccatcagcagcaccttctttccggccacggccagggaaagggccaggttcacggaaagataggttttcccctccccggaacaggtggacgtaatcaggacgctgagggggttccccccgttcccgtcggaaagggccaccatgcgttccgccagcagggggaagcattcggacagctcggaaggttcttccagattcaccacgatttcctggttcttcagcttccgcggcttgcgcggcagttccccgtacacgggaatggaggtcagggtttctatttccttccggcgcttcacgctggaatccagcatggccgcgaccacgcacaggaacacgggaatggccatcccggccagaaatcccaccatcagaatcttgggaacgttcggctccagcggaccgttgccgccccgcacgccgtccaccatccgcgcgttgtcttccgtggcggccagggccagggaattttcctccctcttgttcagcaggagaacgtacagggattcccggacgcgctgctcgcgttcaatgtggttgacggccctttccctgctggaaacattcctgatatgctcccgcgtctgctcatgctggtcctgcacgttcctcttcttgaccagcagggacgtatagtagttattcacggaacgcttcaacgcatccttcagggagttcaaattggcctccagttcgcggataatcggattgttgtccccggcattcaccttcaggctcgtccttttcagcagggtgtcattaaaaacgctgatctggtcccggatgcccatgtccgctatctttgaattgatggggaccagcctggcgtcatgctcggcctcctgctccaggtaatctttcaggtattctatggacttgatttcaagctccagctctctcaaatccttcttgtcattgaggctgttctcatattcctccgtaagggccgtggacaggtccgtcagaacgtccgtctcctttttcagatcttcaatggcgaggtcatttttcttcatctcctcactgatgacgtccaggcgatctccgatgaactcgttcgtcttcgtgccgcgcttgttcttttcctccagggacgcctcattgtaaaaatggacgatgctgtacagaatatcctccgccttcaccggattattgcagcgcatggaaatgttgatcaaatcattctttccgctcgcctttctgacggtcaggccgcttcccagccccatcgccgcattcttcacggaagttctcctgacaatcacgggaacgttcaggctgctttcgtcaaacttgggagttttctccacgatgaaggcctgggagtcaaaccggatttccttgccgaagacgcccgtctcatgcccgtgatgatccttctcatccttttccaggcggaattccgttccggaaacgggaatcaccaggaacctggcgtcagccgtttttccctcctgcgtgaactgcaccgcaataggggagtcctgataaatttccaccttccggaacccgttcttcttccagtaggtgacgtccagcttcaaattccggactaccgttttcagcagggaatgggaggaaagcaggaaaatctcattgtccagattggtggcgcccgtgttgactattccgttggtggaggccagcaccgtggcggccacggattccctggggtaatcatccttgatgaggatggtggtggcctttccgtacacctggggctgccgcgccgcgtacagataggccaggggcaggcaaatgcaaagggaaagcacgcaccagtaccatttccggacaatccggcccatgatggccctggggctgggaagcagggataccggcgcggcggcgccggcatccagggattccttcttgggggagaggtctttcatgggattaaatgcaaaaggccagaatgaccatggcaatggaggtgccggaaatcaggtagggataaatctggagctgttcgctacgcgtgttcaccttcctgtccgacggagtgacgtaaatgacgtcattctgctggatgtagtagtagggggaatggaacaggtcgctgttccgcaggtccaccttggacgcaatgcgctctccctgtgattcccggataacgtaaatgtcacggttgccgtccatgttcaggtctccggccttgctcagcgcttccagcagcgtcaggcgttcccccttgatttcataattgcccggcttggacacttccccgagcacggagaatttgaagttcatcaggcgcacgctgacggcggggtccttgatgtacccttccctgatgatttcactttcaatgtcgttcgccagctgggtgcaggttttgcccacggccttgattctccccagaacggggaacacgatgtcgccgtccgtgttcacgaagtacccgcgctcgtcatccctggggctggaaacgctgccgctgtccttgttgaacatctgcgcgagcgtggggttcttgctgctgacggaaatgaacaggcggtcatcctttttgatgactatcttatattccttcccgatggacgctttctggtccagcaccaggttctggacgtaattgacttcttcaggcttgacgcaggcgggaagcgcgcacgccagggcggcggccaccagcaggcggctccacagggagggatgacggaacagatgtaggtatttcattggatgattaagcagaggttagatggtaaggggtttcttcaagtccaggtagtcgtacttagcgtagggagagttgttgctcttgtattcgggtatcaattgcttcatggcgcggatggtatcctccagatggtgggcttccgcatgccgcaccagctcttcaaaggcttccttcagctcggacatgtcatatttccgggtctggaaaatgcggatgcgctggtgggaggtttccagcgtatgttcatagtccgccagaagttcttcataaagtttttcgccggggcgcagtccggtgaagacgatgcggatatccttcagcggagagagccctgccaggcgaatcatttttttagccagctccacgattctgacctgttcccccatgtcgaagacgaaaatctccccgccctgccccatggcgttcgcttgcagaatcaggcggcaggcttccgggatggtcatgaaatagcggatcatttcaggatgtgtgaccgtaacgggccctcccttcctgatctgctccttgaacaggggaataacggagcccgcgcttcccagcacattgccgaacctcgtggtaatgaatacggtggctccttttccgctctttttcagcagggcttctcccaggctctgcacgtacatttcagccagccgcttggtggcgcccatgacgctggtggggttcaccgccttgtccgtggagaccatgacgaaacgctgcaccccgtacttgacggccagggaggccagatgcatggcccccttcacgttattgaccacggccgtgcacgggttctcctccatcagcggaacatgcttgtaggcggccgcatggaaaatcacatccggccggtacagcttcatgctttcctccagctggcggcggtggcagacattggtgatggaagtggcaacgggaacgtggggatatgatttttccacctcctggcgcaccagccacagcggcgtttccgcatggtccagcagaacgatccggcgcggggaaaaccggcacagctgcctgaccagttcgcttcctatggagccggccgcgcccgtcaccatcaccaccttgcccttgatgccgccggagattttttccatgtcgatgctgatttcctcccgctccatcaggtcttcaatctgcacttcatccacggccacgccggaatattcgtgaaacgactggaacaggtcgtgggaaatcatcagttcaatccccttttccaggcagacgtccgccagcttcttatctcccagcaaatcgtccttccccacaaaaacgactcccgacgcctggaacacattcaaggccgtctccacctccgcggcctccttgatcaaccgtatcggaatctccttgatttccttgccgtccgcctccggagcggaagtcaggatgcccaccacttcatattcctcacttttcaggcttctgataagggaggctttcaggaggcaggcgtccagcttgcccaccagcgcaatcctcttgcgtccggtcgtcgtgagagaggaaacggattcgctggaattgaggtgttccagccatcttcttccgccgatgcacgccatgcggcacccgatcaggaccaggaaggtgatgacgaaattgaaaatggcgcaaacgacatgccccttgtaatacgcgggccagagaagaatgttaaagaggcacagcagcatgctggccagcaggatggccgccatcagcttctgcaagtccttcatggtcgtgaaccggaccagggtcttgtaaacgccggaccgccagagcatggtgcccgtgacagcgagatcgaagaggagggctacccccatgtgcttgtccacccagtcacccttgtaaatccattccccgtaatagcaggccagcagcgtgaccagggaggaaagccccaaatccagcaggaagatgaatttcccgctggcattcagcagataatgccgggcgtaatagaggaattttgaaatctggctatgagtctcggtcataagagcgaacattaaagattcaacaagacgtcaatgatgcggtccacgtcctccccggccagggaagcgcccgaaggcaggcacaggccctgttcaaacaggcggtccgatacgccggagccataaaacgggcaggagcggaacacgggctgcaaatgcatgggcttccagagagggcggctttccaccccggccttctggagcgccagccgcagcgtttcccggtcaaaccgggcctcctccggattgacctgaacgcaggtcagccagtggttggaatggtagcgggaatccggattttccagcagggacagccccggcacgccggaaagccggcggcggtattcttcatggatgccgcgccttttttccaggaaggaggggagggaaagcatctgcccgcggcctatgcccgcgcacacgttgctgaggcggtaattgtagcctatgcgcgtgtgttcataatgcggcgcctggtccctggcctgggtggcgtaaaacttgaccctgttccgggattcctcatccgggcagcacagggcgcccccgccggaggtggtgatgatcttgtttccgttaaaggaaaaggccccgtacgtgccgaacaccccgcacttccgcccccggtattcggaacccagcgcttccgcggcgtcttccagcacgggaatgccgtatttcccggcaatctccatgatctcccccatgctggcgggcatgccgtagaggtccaccggaatgatggctttgggggtgcggcccgtctgcctgatgcggtcccggatggcttcctccagcatctccggagacatgttccatgtcttttcctcactgtccacaaacaccggggaagccccctggtaaatgatgggattggcggaagcggcaaaggtcatggactggcagaggacttcatcccccggccccactcccagcatcaccagccccagatgaagggcggaagtgccggacgccagggccaccacatgcgtttcccccaggtattcctccagttcccgttcaaaagcgtccacgttcggccccaccgtcgtcacccactttgattcaaaggcttcatgcacgaacctttcctccgcctcccccgtgcaggccagggacagccagacggtggatttcttctccggcgcaggggacggcttctttttcagcacggcgggacagcccgcataagtgcctcccaccagcgcatcccggaccaaggtggaattggcgcccaggacgacgttttccttcaccgtgcggcacgggagcaccacggacgcggcccccaggaaattggcattacccagcgtcacgcctccggacaccttgcagccgttggccacgacgttccagtttcccagcgtcacgtcatggccgatcagggaaccgcagctgaacaggttgaaatctcccatgtccacatggcagctgaagatgtggccgaagctgatgacattccccttccccatggccacccggccgcggtcataaaacttcacatcaggggcgatgatattgggaaaatccagcaggggattatccaacaggccggaaatgcgttccaaaacccgtggcgaagcaatcgcgatcacgacggaaagaggctccttccaggcattcaggtcttccaccgtgcccagcacgcggccgtactcgttttccgttccggcggccaccccgtcatcaaagaaacctatcaaattccaggagggggactccccgttgattgcgcggaggcagcaggccgtttccctgccgaatcccccggcgccgatgattgctatatttttcttcattttccggaacccgtgaatttttccatggtggcgcagccttcaccgctgatgccctggcgctggaccaccttcgccagcgttaacagaatgatgcgcgcatccagcaacaagctcagatggtccacataccagacgtccagttcaaacttgcggtcccagccgatggagttgcgcccgttgacctgggcccagcccgtaatgccgggcctcacgtcatggcggcgcgcctgctccgcactgtacaggggcaggtattccggcagcagcgggcgcggaccgataaagctcatctgccccgccagcacattgaacagctggggcagttcatccagggacagggagcgcaccagccgccccgcgcgcgtcagccgccgttcgtccggcagcagttctccccggtcatccttttcatccgtcatcgtcttgaatttgacgatgcggaacaacttgccgtggcggccgggccgcgtctggcggaaaaacggcgttccgcggttggcggcggccagaagcgccgccagcgccaggaacggaaccagcagcaccgccagcacaatcagggcggcggaaaaatccagcaccctcttgacgcaattaccgtaaatcatgccgacgccctcccgtaaaaatggagcaatgcttcccacaccatccggcagctgaaacggcttttcacctgttccgccgcttccgcgcccatcctcccgcgccgttccgggtcgtcccgcagggccgccatggcctgccggagagcctcttcatcccgtgccggaaccagcaggccgttcacgccgtctttcacgatctcattgcacccgcatatatccgtggcaatggagggcagttccatggcacccgcctgcagcagcgaattgggaaatccctcccggtagctgggcagcacgaacgcgtccgcggcttccagccagggccggatatcctcctgaaaaccggggcggaacacgccgggcacgtccagcttgtctccggcgtaatcctccgtccatcccaccagagccagaaaaacgggaggacgcccggtctctgcgcgcagggcggaaaacgcggcaagcagctcacggatgcccttgtcttccgtaatgcgccccacaaaaacaaacagcacggcatcttccggcagttccagacgcttcctcacttcctcccggcagccggaacggcggaaataatcaggatcaacgccgttgacgttcccgtgggccaggatttccagaggcttgcccgtcaccttctccgccatcaagagctgccggacgccctccccctccggaataacgtgggtggcaaacaggcaggtcaggcggtccatctgcttgagcaggaacttgaaggcccccttccggtagggaaaaatcaggccggtgaaggtatggacgcggaccggaacgcgggcaagagccgccgccgccatgctcagcagtccggccttgggggtcacggaatgcactccccacgggcgttccctgcggaacagcaggaacaggcgccacaggcttttcaaatccttccacagggaaatggtccgttccatctccagctccacggtttccacgccttcgcggcggcggatgcgcgcatgctccgctccgggggaagccacggcaagaacgtcaaaaaacccgttcaggtaattcaactggcccttgagcagcaggtccagcgagataggggacgccgcaacccggataagcttccttttcatgcgttgtaaatattcatgtaaaaggtgaaggcgtaaaccaccgggataaagcaggccagcttcttttcctggtccgcccagaacctctgcttgaaaaagggatagatgaagacgaagcccatcaggaaccaggaaagctgggcgaacctgttgctgaacgccgcgtacatgcagagaatccagaacgcattggccgcaatgtagatgttcagcagccacgtatacatcacgtcccggtattcctcccggaacaggaagtaacagcccgtcataatggggagcgcgctgtaaatcaggaaatcccagcggaaacccacgctgctgaacaacgcggaggaagccttcaattcatccgcctggttgatgtaaagggtcaggcgcggatcatcgaaaaagccggaggaggcgatcatctccccgatggcgggaccggccagaatgacggccaggatgctccctacccacgccgccacgtaataccgcgtatccgtgataaaccaggcgcaggctcccgcggcggccagcagcatcatggacttgtgcaggctgacggcgagcacggtgcaaaggagcagcattttaaggttgctgcggaaggtgaggcccagaatcatcacggaggcggccatgccgttgcggacgccgttgaccccatatacccagaaggtgaacatggcgcacgtaatcaggaagggaatgaaccaccgggctccgaaaatcctgtagctggccagggccagcgctcccacgtataccgcggaacaggtcaggaaataatcgtgcacattgccgtgctgcacccacgcatgcagaatgacggcaaacagccattcccccttcatgcccgtcaactgggctttccagttgcccgcctccccctgctgaagcgtctggaattccgcggcgtaattgatggtatccccaaactctgcgctgacgggacgcgcgcccatgtacatgatcagggcgacgacgaataaaaagccggccagactgtccagcctggcggtggaagcggaaaagattcctcccgttcccgcctgataaaccgcaccaaggattaaaaaaagaatggtccagttaaacaatgcagtgtatgaggaaatgggaataaaatcgaaacacatgccaaggcaaaaacgggcgcggccggacattagcggattaccagtccgctgtcaattgaaaattctgacaatataaactttaaggagtttctggatttttatagcaggggagagaaaagccgtttttctgttggtataaaaatccagaaactccttaaagtttatattgtcagaatcttcgattttcagcggactggtaatccggtttaatatttggccctcaaaaaacgatttttctttccctttatcattatatattgaatatgaagaaaatagcaaatgactctaactatacgctaatgtagaaaacagcttttcggcattgtttgacgcgcccggatgccctatcgtttcctccggtccgggccatgtctcctgcttccgttccggcaggcagcctattcatggcggcggagcctttacgaccgcgcccatgcaccaccctgttcaaaccattccggaggctcccctcgtcagcatcatcgttcccgtgtacaacctggaaacgtgcgtttcctcctgcctggacagcctgctgcgccagacctggtcaccgctggaaatcatcctggtcaatgacggttccacggaccgcacggcgcacatcctgaacgcctatgcggcgcggcatcagaacatcagggtcatcacccgggagaacgcgggggtggacgccgcgcgctacgccggcatggacatggccgcgggagagtatgtgatgttcgtggacggggacgacgccatttttccggacagcgtggaagccatggctcaaatggccgtccgggaacgggcggacgtcgtcatcggagactacgtccgccatctggaccgcttcggcctcttccgcaggaaggacggccatatcccgcacagccgggtggtggaaagggaggaattcctgtcctcctaccattccggcttcttcggcatggacaggcacggcctgttctacacctacgggaaaatgtgcatcaagctttacagaagggaattccttctgtccagccgtccctcccccagcgggctcaggtacgcggaagaccagctgttcaaccttcaggtattccccagggcggaacgaatcgccgtgctggcaaaggaggtgtatatctataaattcggaggggtgaccgggaacctgtctctctccctgtttgacgacatgctccgccttcattccctcaagctgaccctgacggaccgggaagactggaaaaaaagcgaactgggggccttcctgaacaacgtgcgcagctttctggcaaccctggccgtctccggaaaactgaaggcggacggcatgccgcaggcgcttgaaaaattgaacgccagctccatctggcgccacgcgctggaagtccatcccgcccgtgacgacgccttcctttccgccatgcgccggaatgacgccgcggcggcctacgcggaactcagccgccataccttcctgaaaaaaatcgcctacaggctgcgccggatccttctgcggctggtccgctgaatccattcccgcaccgtgggaatgtccccacgctccacggcacagccgccgcagggccggaaaaagccggagccgggaagaaacagttttttattgcgttccgggcgggtaaatcatatatcccagcggttcagcctccaccgtttttttcctaccttccatgccctccatttccttcctgaaaaacctcggagtcctgctgacgggctggctcctcttatgctgcggcgcgggagcggcggaaaacggcagaatcctgatggtgacggaagcgaccttcccgccctacgaattccgggaggggaacgccatcatgggcattgacccggaaatcatgcgggaggtggcccggcgcaccggcagggagctggtcattgaagacatgagctttgactccgtgattacggcggtggtctccggaaaggcggacgtggccgcctccggcatcacggtcactccggaacgcaggggaaaagtggacttttccatcccctacgtggaagccgcgcaggtcatcatcgtccccaaaggctcccccatccggggccgggaagacatccgcggcaggagaatcggcgtgcagcacggagccacgggagacatctacgtcacccggaacatccagcagccggaacgcttccccaacggggcgctggccgtagccgccgtggcggcgggcaaggtggacgcggccgtaattgaccaggacccggccagaatgtacgtggcaggcaatgaccggctggaaatcctgccggaacccctcacctcagaatcctatgccattgccgtccgcaagggaaatccggaacttctccaggacatcaacagcgccattgcggacctgaaagcctccggcaggctggaggaaataaggaccgcgtacgcggccatgcaggtcaagtccgccgcgggagccggaaaacacgccgccggggggaactggctggaaaacatgtggctggacctgaaggactcctttgacgtcaacttcatgcaggaaggccgctggaaatacctggccaacggcttcctggtcacggtggaggtctccttcttctccgtcctgctgggcatcctgatgggctttgtggtagccgtcatccgcgccacgcatgacaagacgggcaatttccgcttcctgaacgccctctgcaaactgtacctgacggtgatccgcggcacgcccgtggtcgtgcaactgctcattatctactttgtgatcttcgggaccgtggacgtcagcaaggtgctggtggccgtggtggccttcggcttcaactccggcgcctacgtggcggaaatcatccgcggcggcatcatggccattgacaaggggcagtttgaagccggccgcagcctgggcctgggatacgcccagaccatgattttcatcatcctgccccaggcctttaaaaacgtgctgcccgcgctggggaacgaattcatcgtgctgctgaaggagaccagcgtctccggctacattgccctccaggatttgaccaagggcggcgacatcatccggagccagacttacaccgccttcatgcccctgacagccgtagccctgatttacctctccgtggtcatgctgttcagctggctgctcggcaaactggaaaggagactgaaaaataatgaatgaacagcccggaaatacccccatgttccagatcagccgcctggtgaaggaattcaactccgtgcctgcggtcaatgacgtcaccacgcagattaaccagggggaagtggtcttcatcgtagggccgtccggctccgggaaaagcaccttcctgcgctgcctgaacctgctggaggaacccacctccggggaaatcctcttcaagggagagctggtcacctccccccgcacggacgtcaaccaattccgccggcacgtgggcatggtcttccagcacttcaaccttttcccgcacctgaccatcctggaaaacatcacgatcgccccggtcaaaacgggacgctccaccaggaaggaggccgtggcccaggcggaaaccctgctccggcgcatcgggctgtacgacaagaggaactcctatcccctccagctttccgggggtcagaagcagcgcatcgccatcgtgcgcgccctggtcatgaatccggacgtcatcctgtttgacgaaccgacgtccgccctggacccggaaatggtgggggaagtgctctccctgatgaaggacctggcgcagggtgggctgaccatggtggtggtcacccatgaaatagggtttgcgcgggaggtggcctcccgcgtcctgttcatggacaagggaaaaattgtggaagaagggcctcccgcccaggtgatcgaccaccccgccaaccccaggctgaaggaattcttctccaaggtgctctgacgcggccagccccggaaacttctccgccggagacctgccccgcgccctcctgccgccgaagcaggaggcagcgaagaccgccttacttcttcttctccctgatctcccccctcatgcccagcttgacgtccacggggacggagaccggctccacaggaaccttgtaaatcatccggaacctgagtttttgcatattctccggctcttcaaactgcaggcgccttgtccattcacggtaggaggagttcatgctgctccccccgccacgggattcggtttccagaacttcgtccttctcattgagaatttcaaaacggtccaggtcgaaggagctttccacccccagccccagaatcattttcctcatcttttttccgttcctttcaaacgtactgcactctttcaggaaaagcctgcctgtaggcacgctttcagacaggacgatgtctccgcctcccgcttcctcccggtcattggcccccggcagcggcacatgctcttccgcctcttctgccaggggaagttcgtaaacagggctctccacggaacgggagacgggaacgcggaacacccctttcagccgtacccaggaagcgtccggagaaggcagttctccggcaactccattgacggttgcctgtactattccgccttcactccgcgggtacatgctgcccatcctaaactctgccggagccagcttcctgccggtggaatcggtcgcctccagatactggataccgtcatcgtatcgcgacccaaagcccaagggggacttgacgctgaaattcactccgaacttcagctgcagaggggattcctggggcgctccgttaatccacatgctgtttttttccatgccgacggaaacaaaaacgaccttcaccggatttttttcctccggcttgccgccgccccacgccgccgctcccaaagccgcagcggcgcacagcaaaaaccgggcaacaataatgctctgcctgttcatcctagttctccttgttcggggtatcctgttgttccacggcgccggacaggccgcaccggatacggacgggcaccatgattttccttaatccctccgcatattgaacggccaccttcagttcctcctgcttcttcccctgcatccggaagtaccggccccagtcataactcttcagggagcgtccggagctggaaccgtaattttccgtcaccagcggagcgccatccggggaatgcagttcaaaatccagaaagccaagcggagtggaagaatggacttccaccctcagcatataccccttcgtgtcgtctccgccctcatcataatggcctttcagtttgaccttcacgtccccgccgtccagtccggcgttcttgagcaccagcggaacggagaaatccttgaccgtcatcttgagcgtcacgctctccgaaacggcggggctgctatatatcaccaagggaacctcccctttgacttccacccacctggctttttccgaaggcagccaggccggcgtacttaaaaaaattgttccggctatgttgctctgctggtaggaacgggaatcactgtaacggcaattcgttttggcaggagaacttccttcggaatccgtcagggccagctcggaaccggactccccgccataagccaccttccatgaagaagacgtttccctgaccttcaaatccatggaaaacgaccggctggcttttgaaaacggcccggcctcctggaggttcgttctccaaccatccagggaaacggttacggcaggttcttcagggctttcctttccggcagcggggccggaaacagccgcgcagcagaacgcggccagccagggcaggcaatagtgaagcataggcagggggggtaagggtacttttccagcataacacgttcgcagaacggcacaagatgaaaagagaccgccgccaaggaagaagcgccggttccggcaaaacgctagcctgctttctttcctccccgcttttccgcctcctcccgtatttccccgcctatgccgaacctggcatctacaggaacggaaacatacttcagggcagttttataaaccagccggaccctgcatttgtctgcattcattttttccggaggggaaaacgtaaaatcggccgtccaggttgttgactcatcatcaatctccgaattgtcaagggactggtactccagcactttcccattctcgtcaagaagctggaatttttccggacggaacgcgttattcgcgtccagacaaatgctgagcatgagctgtttttttccatcttccgtcacccgctcgcattttttcacatacagattccccaccggcagctcgcacggttccaccacatcgttcacattcccgccgttctcttcctcaatgccaggaagcggaatgaaggcggcggcgccctgccttaaaggcagttcgtaaacagggctttccagcgtgcgcgccaccgggaccctcaggcatcccttcagccggatccaggcacagccggcagggggcagattggccgcagtgccttcaattaccgtgaaactcactccttttctactattttcattcagccatgccgtttgaaattccacaggggccagctccctgccatccgctgcccaccttcccaaagactggttttccaccacgctactctctccaaacccccagggttcgcggatgaaaagaacggcgctgcacttccattgcagtaccccttccccgccgtcattccccgtgtcccgcttcaaccccgcttccctaaagacgattcccactttttcctccattttcccatcttccgctccccggcacggctgccagcccggcaggcagaagacgatgccgcaccataaacaatgtatcgccttcatggtttccgctgccgtgaagtttcccggaccattccggacagaccgaatttcaggtcgacaggcacgtcaatccgtttcagctcagtcatgtaattcaccaagacctgtatctcccccttttcttccggttccagcctgtaatcccattcccaggagagggaaccgccggaaccggcagaatagccccagctccaattttttcccatcacgggagtaccgtccggtttcatgagcgtcactccgcaaatacccagcatgcgtgacgaaaccagctccacgttcaggtttatttttccggaatccttattgagcgaccttgttattttcaaagtagcctgcgcgtctccctgccggccgtcatccatcaggctcccgcctttcagaacaacatggcgttcttccttttccttgtccatggaaaaaagacagccctcggacgtcacctccttctccgctgtcaccagcagcatattcccctttacactcacccagcgggcgtccggagcgggaacccaatcttccgtttccatcctgaattcgggatcgcgggcatgcaggaaatcaacataatcggaaggaacgttccctccaccggtggaatcacgtatctccaggcggatgccctcctttctgctccctatgattttgccgggaccgggattggaaaaacccagcacgacctggaacgttctttccggtttttttattccgggttcccaagggattttacttgtagccgacagaagaatgacggaaaccgccttttccgccggcgcctcgtcacccggcgcggaaacgcccgcaaacaggcaaaaaacggggattgcgaaaaagattttcatcagggcagttgttacagtaattcacgctagcatttccctttcaaggatcaagggtaaaatgaaaacgtcaggaattcactccctctgccgccgcatgggaacggtggcagcacagcattccgttcccgcaaagccgccttccagccatgttgtaaaaccgggaagccgctgacggaaaacttctccgcccgggtgaaatgtccatcccgatcaatgcctgacgctatggaaagccgcaggcaggcatggcgccgcctctctccggaaaggcctcacacgagacctccgtttttacaacacgatatccacgttgtaggactcctcaatcaacagatagtcacacccatgctgcctgcatttctcaaggttgtccctgttttcacgcagcaggctctcccgtgtgcaggatgcctcatccatgcgctgctcaatcgcgtttgcatggtccatgatgtcatggtaatgcctttgaatataatcctctgaaaaaatcaggcaaacataccggatctgctcccggcaagccggtgtaaaatccttcttccagtcaaaggggatgtagcacccttccaccaccagattctgcccgttttccatggcggtttttacaatttccctgatgacgctccaaaggaagggggtgagctcttcatctgggctttcaggtgcaaggggacatattccgctgcgtatcaaccccatctttaaatggtcaatggataaatagggataggaatatttttcaagcgcccgctgcgccgcaagcgtttttccggtatgcgtgccgccgccaatcagcagaatcaccggaaatccctcccccggcgtccctgcaagggatgctcgattagcccgatgcgggcaacgcccggcattgttccatttccgttatccaggttcatgttgattaactgtggatatattttacaggatttcccgcaagccgcgtgttttgcccaaaaaaacgggccgggccgcacagagggggaacagggggcgcccctccctacaggctttttgccctgctttccagaggcacgttctgcggctagggaccctaaagttccagttgctccgccagcttgatttccgcaaacattccattcaagcctgccatatacgcatcctgtattgtctgggccgggatggaatgccccatgatcttcaaatccctggcagcgcaggcgtcatacaggagcgtgacgggaatgccgtaatccttcgccgcgcgcacggtggtatcaatgcacatatgggtcatcattccgcagacaaccagttcattcacttccctggcttgcaagagctccagaagattcgtccggaaaaagctgtttggagcatgtttcacgacaaccggctcatcccccgcgggagcaatgtccgggtggatttccgcgccgacggtatccgggaggaaaaacgaagcgtccggacgggtgttgatgtgctggacaaagataacgggaagccccttttcccggaaccggtccagtacggccctggtccgttcaagcgcttcaacggcgcccgccagttcaaaccggccgccgggaaaataatcattttgaacgtcaataataagcaatgcctgcatcagcttctccatccggccatttttccagttcttgcagaggcgggcaaggaaaattacaggagcgcgtgtactcctctcctccccgctaccgctgcttttgcggaatctggcagatgaagtaatacgtttgacggaagcatcccgggaaaagagcctcacagcggccataccgggaaggagaccgccgcggccgcttccggcccggggcagcccatccgcaggaaggccgtccatccagcaacaaagcctttgccgtctccggcaaaggctttgagaatggcgccccgtcgcgggcgcggaatggatcggaaccttaattgctgtaggaggattccacgcgcttggctacgtcgcggtagccgtattcggcgtcgtaaatctgctggaacgccgccagggattcctccttcttgcccagcttttcataaagcaggccgatcatgtaaaggatttccttcttggtgtcattcatttcaatcagttccttgttggcttcctccaactggcgcagggccatatcatgcatgttcttggcgtcatagcacttgccgagcaacagcatggcgcggatgcggatatgggggttgttgcgggcgcgctggagctccggaatggcttccgtgtagttgccgcagtcgaagagggcctgccccagttcaaagcgcgtctgcgggtccgtggggttgttttccacgcgctggcggcacacggccacctgctgttccgccgcttccttgctgaactgggcgagctgttcctgaagttccttgttgtccggctccgcggcggcgcggcggcggatttcctccacctgggccttgcggtagcgctcgttcatttcagaggccttgttttccagggaaatatcattgttgctgaggctgaacgcgtagttgtagaaggaataggcattcgcccagtcctccatctgttcatagacgccggcgatgtcgcgcacggcggccaggtcctgctggttctgggcataacgggcggaaaggagcccaaggcgttcttccagctccgcacgggtgaggcccttcttgtcgctcttgtccagggagttcgtttccgcggagttcttcatcacgtcccggaagctcttggcttcctcccacttctgctgctgcatcgtggcgcgggccatgcagtctttttcactcttcacggccacgctgtccgtggggtccagcttcacgaggtcatggtacacctcagcagcctgagcgggcatgtcccgtgaaacgtaatgggaggccagcatgtggagcatcttcttgttgccgggatggccctggcggacggtttccagcgcaaaggcggccaggtccgggaagcccacgtccatggcggccgtgtacagggcctcgttgaccggaatgctgtaaggatcattttccagttcgtcttccagcgcggaaagctgggtggccgcatccttcttggaggaggtgagcttgctggtgctgattttcatgccgctgaacaggccgcctttcttggcttccgggttcagcttgatttcacagccgcggagcgccctgcggccttccagaaagccgggaagctgcttcaccagggccttgagcaggctgacggcatagggataattgttcatgtccaccgcctggcgggcgcgcacccaaaattcggcctgctggggggtcaactgttcttctgtaatcgtttcaatcatggaactatataagcgtaaatggtgaacaacggcagcgctccaaacggggaggctccgcatgtaatagtttaatgctatcagccggggaggcatacttcaaccttgttttttgttcccgttaggaaaaaatacgccgtatgagactggatgctcttttatcccgctacgggtactgttccaggcgggaagcgccgggctggatcaaacgccactccatcacgttcaagggggaaccctgctccgcccccacggacaaggtgcaggcggaaggcatcctcctggacggggagccggtggagttcccggacggcctgtacgccgccctttacaagcccgcgggatatacgtgcagccatgacgacggggagggggacgtgatttacgacctgctgcccttccagtggcggcacaggaaccccgcggtttcttccgtaggacggctggacaaggaaacatccggcctgctcctcattacggacgacgggaaattcatccaccgcatgacgtcccccaggcatcacgtcgccaaggtttacgaagccgtcacggaagaggacattccggcggaggccgtggaactgttcgcctccggaactttcacgctgaacggggaggaccgcccctgcgcccccgccgtgctggaaatcctggaaccgcgccgcgcccggctgacgctgacggaggggaagtaccaccaggtgcgccgcatgctggccgccgtgggcgctcccgtggcctccctgtgccgcatttccatcggctccctgcatctggacagcctgaacctggagccgggggaatggatgcccatccgtccggatgcgctgtaatcctcctgttcgccatgtggattcccatttccgacgctcctattgcctgctttccgcactttgaggtggcggcggagtccggggactggattgtggtggacaagggcgctcccctcatcgtccacccgtccaacgggaagaaggagcccaacctgctggagggcgtggaagccctgctgagctatgaaatagccaacggagccgccctttccctggtcaacaggctggaccgggaaaccagcggcctgacgctgatcgccaagaacaaggcggcggcgcgcgagctggggagggccatgcagcggcgccggatgcacaaggaatacctggcaatcgtgcaaggccggccggagtgggcggaaacaacctgcgccgcccccatcctgagacagggggacgtcgcggaaagccccatctgggtcaagcaggccgttcaccccgccgggaaggcatgcgccaccgttttccggacggaacggacgtggaacacgccccgcggcccgctggccctggtccggtgcattccggaaaccggacgcatgcaccagatacgcgtgcatctggcgcacctcggccaccctattctgggagacaagatttacggcccctccgaagcctgctatctggaatacatccagcacggctggagccgggagctggaagaacggctgatcctgccgcgccatgcgctgcatgcctgccggctggagttcccgtttgatgaagaagttttcaccgcggaagccccgctgccggaagacatgcggcaactgcttgaagcgggggattaaagaaaattccgtcagacgaccggaatgacgtcatcccggtcaaagcgtactttcgccagacgggcgtatttgtccgcctcttcatcccggtagcccagggccagggcgcaaagcgcatagtacggggagccttccaggttcagaatgcggtcataggccgcagggtccattccttccagggcgcaggtatccacccggaggccagcggcgcagctcatcatgaacccgagggcgatgtacacctggcgttccagccatgccttcaggacttccggagacttggaatccaccagttcaaaaatgcgcgcgcggtactggtccagggattccatggtgacgccgcgcacttccacgatgcgttccagatagcgctgcacgtcctccggcttgaagtccctgcgggcgcagaagactaccagatgggaggcgtccgtaacctggggctgtccccaggaaacctcccggagccgtgagcgcacggacggatcctgcacgtcgaggaatttccacatctggaggccgagggaggaagggctcaaatgcagggattccagaagggcctcccaatcctccgccggaatttggcggtccgggttgaatatcttggtggcatagcgccattccagcgtcttgatcaattcctgagcgttcatattcgtataaaatgattgatgcgggagctttccgcggtagccggcgcgccgggcggcgttgccgccatggcatgcgccgcggtttgccccatgtcatggcatcttccccgtttcctccccggaatgcaagccaaggttccggcacaagcgcggcagcgggttcttgcggaaaaacttttcctacccggtacgccggaagccccagccctccctgaaaaaaagatgaacgtgaacggacgaattgtaaaaatgcggccttggaccgtgtccgggggggtccatgaacaaaagctgattcgttcatcttccagcttcactcaccttgagggcggcctgtctcgcattccgctccaaccagggaatcccggtttcccggctcctgtaaaatcatgcaaacccggagaaaaagcccccctccccggaaaaacgtcacacagcccgggcagcttccatccctaaaaacacggatgccgtaacaaggagaaacgcttccggcgcacccattacaagagaaccgcgcccttccccagacattagaggaacttgaccggcatgtagtccccggtctgctgaatggtgaagctgatgcccaggccgaattcgtttttattcccgttcttgcgcacgaacgctcccacgcccaaataccaggaacccatgttgtggtacacgttgtattcctgaatgtccagctttccgtccagcagggagaagcgccacttgccgctgaatgcccaggcttccgaaaaacgctgcaaaacgcgcaggtcaagctggctgctgtcctccagcagggagtgctggttcaggtaacggtgccccaccacgaattccgtggagcgccacggcatgaagcgcagggagttgttgtactcatggcagccggaaatcttgtccttccccaggatgggggcctgcatttccgaccggtattccatccacggaacgggattccagcgcatgaaggagaagaggttggagaagtcccgctggttgatcgggtcatacaggtacgcatccatgaacacatcccaggaaaaccagcggtgggaattggcgtcccggctggtcatcagcatgttgcgcaggccgtaccggaataccagccccgtggggagggagtcaatctccgtatacctgcccaggctcagggacggcggattggtagtgggggtgtctccgtcaatctggggataaagctcgctcaggcggttggtcttcacgtacgccagcgtaaaatggggctgcacgatgtggttcatgccgttcaggcccagggaatcactgtacacggaggaataacggcgggaaaatttgaagtccgcatccgttccggcataaaaaatcccctggttgagcggcttgtagtcctccacgccgtaatacccggtgtagcccccgcccagtttgggcgtcaggttcaggaaccccatgattttcttggaggcggaaatttcatggaaggaatggaaccggctgtagctgtccgtcatcagcatgcgggcccagtaatcataggaagtggttccgggctccatctcgtccagcatatcccggatttccgtccgcatgaagggggggacgtactgcttcaggaaggcgaagctggtgcggctttcatacatgacgggggaatggaaaatgggggacttgatgcgttcatagctgaactccgtccgctggtccgccatgtagaagttgttgggaacgaaacgctgcagcagtgaaaaatcattcgtgtcgtccgtgcgggagagaagcaccgtattatccggagaagaattgcgctgatagatttccggataaaagtcgcggagcatgtactcgtcgctcagcatgttgacgttggccttcagccgccagtccgtgcgggcgtttacccggtgggaccacatctgctggagcgccagccgccaccggtccgggtccaggtgctcgcggtattcatcatccccggcgttaattttcacccctttgtcatgggttttgtaaaaggacaggcccgtcatgtccggacagtccttttccagcagcacgtcacggatgtccagcccgtaggcgaagccgcgcctggtgcggtaatccacatggagggtgcccagatagtcggcggaaggcatgccgttgtccgaccatttttcccccagcaggaacccgtattcattcaggaggtaaggcccccagatggaccgcatgccgggaatgggaaggtagcccacctccggattcagggaatggctgagatagggaaagtaaaagaagggaacgcccccgtaatacagggtcaggttcttgaaggagaacctgtcttccggatacacgcgtatcctgtccgctgaaatccaggtgagaggttcgctgacgtcctccgccgtaacggaggcgttacgggcttccagataggtcttgccggcggcgtccttccgggattcaaacttcccgctgcgcaggatcagcccttccatcttcgcccggatggcgtccgtgaggagcacctcgttctcccagtcgaactccgcgctgttcgcgcgtatcaggctgttggtgcgcgtcttgctgtcgctctggtaaatggacaggttccctttcagaaaaaccctgctccggtccatatccgcctgcgcgtaatccgcaaacacctccaccccggtatccgtgaccatgtgcacgcgcgggccttcaaaaatgatcttcctggctttctccaccctgatgggcccgtcattggtgatggagatattggagggaatctgcggcatgagcgtgccggaaagcaggttccccgccatttctccctggggctcttgctgcccggaaccggaggacggggaggacggcggctgttccgcgggcgtctctgcaaacaggggagcgccggcaatcagcgccgcggcaccccatagctttgcattcatcccaatcatggctagtccacagaacactatgagaaaggacaaaagacaagcctaatgtcacatttctccgccagtggagcggaaatttaccgggtcagaatgccgttggcaatgatgccccaatcggcggcattgccgtctccggcgtcgtccacgcggatttccagcttcctgccgccctccaccgccgccttcaccggaacggaggagccgtccttgagcacgggggtttccacaagctttttgccgtccaggtacacgccgaatttgacgctgccgcgggaaccgaagggcagccccacatccgcgcggaactccttccagcgtccgtccaggtcataggaaaagacggccggggcatgcgccaggatgaagcgttccggcttcccgatcgtcctgaagaaaggcacgggccccaggtcagacggaaagaggacgtcccacaacggcacggcccaacccacctgagccacggagggcttgcagtcattcaggctgacgctggcggtttccgcaggaatctgggcaggggtagcctccagggaggggtcctggcgctccagggcgcgcttccagatggggagccattccttcacctccggacgggagccatgcttgcgctccacctccgcgagggccttccgggcttcctccgcgcgaccgcgtatccacaggttctgaacatcgccgaagtaaacggtctgggccagcgaaggagtctgggccccctgggcgtccatccacacgggcagcgtaatcatgctgcgggtgctgtcgcagttcagcacggccacccgcatttctataaagccgcccctgtagccgggccggcagatggtgaggtcaaactctccctttccattcagggaagctcccacggcattggaatcataatccgaaccgccgggagggtccaggtgggctacgattccataagcgggccgcgtcaggcgcacccggcctttcagccgcaggccgtccttgacgggaatggcctccagccgctcaaaggagcccggaacgtacttcccgatcatgcgcccgtaggaggcatccgcgggaagctccgtctccacgccgttgaagaggggaacgctggccagtttcagggcgtccgtaggcgccaggaaagcccccttcccctcgttgcgcagttcattgccgtacgtggaattgccgtggcccatcagggaatcccccgcgttggggtagtcccatccgttgcccgtgtgcggaaggccgaaggaatgccccagttcatgagccgtgccgcctatgtaaatggtggcgttcttccccttggtcaccttgaagcggccaccctgcatcatctccgtatccaggaagctggcgggatccaacccctcctggtcgcaggtccagcccgttccctggtggctgaagccgccgccgtaataaggccctacgccgtccggcagctggcacacgatcagcacgtgttccttttcaatgtcaatccccttggacgccagcaccttcttggccgcctcccgggagacggggccggagctctgcacgttcatctcgctcatgggcctgtccacataggcatcgtaaatgaccagcttcccccgttcgtccaggtccaattggaacgtaagcggagggaacccgttggcctgcatctggtccgcataataggcctggatgttcttcaggatatggtcataccgttcccggtatccttcaagggccggcctgtccttgaacgttacgtaaaccacgtgcagctttctggaagacttgggcttcccctggtgataggcgctcagggccttccatgcggcgcgcgcgttggcggcatccccgggattcaccgtccagctcacgggcaggcgggtgaactccgccccttcccgggccgcggtagccggagcccgggaggctgattccgcatccttccccatggcgggggcgttccacgccccggcgcccagggccagcaataagacaaaaaagcgtttcgacataaaatccatgaaccgatgtcaggatatacgggtaaaccggaggtgttttatcaccatatcattcaccagacggttcatattctcggaaaaagagtcgtacaccacttccacgcggcagggaccgggcgtcatcaccacctccaccgccgtggaataaatgaaatgctcccagttgccggagcgtgacgtatggggaaaagccagcgtgcccgcgcgccgcccgtccaggtacaggctgcgcagggcgcaggtgttcccgtctgaaacgtcaaaagtgccgttcgcgaaaaaggcgtccacccggtacacgccgggcttgtctatgttgacattatagcacagggcgtccggagactccgtaacgcgggaaaaccagacttcatccccgctcagcccgcaggggcgcgtctccatgcgggcatccgcggaaggatagtcattgggttcattcagataagactccctgccgtccagagcgaccgccatcacctggaaagacacgtccccccgactgggggcaggcatgtaatggcaatactccgtctgggacacaggaatgccgttccggtaaacacggtaataatccgctccggccacggcctcccaggcgattccatggcgggctgccttccactccggagcctccaggctgccgcccatgtgggccagattcacctgccccgccccttcttctgcggcaaccatctccagttccacgaacacgcggcccttcatgcccggagaaagcacggggggagcctcctgcccgttgaccaggcaccgcgctatccggcgcccgtggccgcgcaagcgcacatccaccgtcatgccgcggtattccagcccggccagttcatgaactccttcaaaagactccggaacacaggggcggaactccatggaatccggctgaaggcggatgccgaacaaccccttgtaaaaactgcccagcatcccggcaatgctccagagctggctgtccgaactgagcagcagcccttcatccaggcccgtttccagaagcacgttctctttgttcgtcccacacagcagggcggcgcgcaccatgcaggcgaacgccagagccagggcagactcattctccaccgcggcggcggcctgcgcgtaatagccctccaggaacggccacatggcacggttgtggtaaggcggcacgccgtccggcatctggggatggaaacagggaatgccgtacacgcaatgggggagaacggctaccattccggcggcatgcggaccgtgagcctgccccagaagcacgcaaagcagattgcccagggaatccaccttttccgacagcacggggtaaccccggccatacaggtactgcccgtacagggcatgctccggaatccggaaaaaccgctcgatgacggcggacagggagacgcttttttcctcccattcccgcgccttctcctccagccccagttcccggaacatccgtgccagaaccttgcgggcctccgcatgcagaaccatggtggaaaggctgcatgaatccccgatgtccgcggaagtcatccacgccgggtaactctgttcccgccagtccaggaaagatgactcccctttcaccaggccgccggtagccgcaagcacctgttcatcccgcatgcacgtcttttccagcacgcggcaggaacgggccagccagccggcgtcccccgtcaggcagtaaacctcccaggcggccattccccacaccacgcggtcggaggaaatgggccaggaaccgcccgtgccggtatcctgctccacctccccgttccgcacccgggcattcaggctcttcatgcaggcatggacattccacaaccccagccccagatgagtggcgtaggaaatatcccgggtccacacggtgggccagttggctcccgtccggaacgtcccttcttcattgagcagggagccggcctcgttaagcgccaggctgtaggccttattgagcacttcaaagcttccccggtaatgcggggcgttcccggcctccggcagaacgcgccattcggaataacggccgttcttcatggtcttcacctggccgtccggctgcacctccgcccaatgcgcggcatcctggcgcacggaatttccggtcagtgtaaaggcctcaccccggtataatatgcggtcttggtccataaataagcggatgctgcatccatctttctttttaacacgggggaaaacttctgtcccgcagaaaatgaggcttacggagctttcaaggcacaaaaaaaccgggctccccgaaaacgggaagcccggcgcaagagcaaatcaactttaatgcttcaacagagaggaaacggcgtcacgttcttccttcagttcattgacggtggcgtcaatcttttcctgggagaacgcgttgatcggcaggccctgcacgatttcccagccgccgtccttggtggtgcggatcgggaaggagcagatgaggcccttttcaatgccgtaggagccatcggagcacacggccacggaataccagtcgccttccggcgtctgggtagccaggctgcggacggtatccacggcggcggaggcggcggaggcggcggaagaagcgccgcgggccttgatgatggcggcgccgcgctgctgcacggtggtgatgaaatcacccttgagccattccgtatccttgatgacttccgtcacgggcttgccgccgatcttggcgttcgtgaagtccgggtactgggtggaggaatggttgccccagatggtcatgttggtcacttccgtcacatggacgccggccttttcagcaagctggctcttggcgcggttttcatccaggcgggtcatggcgaagaaacggtcggagggaacgccgctcgcattgtgcatggcgatcagggcattcgtattgcaggggttgccgacgactagcacgcgcacgtccttggcggcgctgcgggcgatggcctggccctggccgatgaacaccttgccgttgatgtccagcaggtccttgcgttccataccggccttgcggggcacggagcctaccagaaggcaccagttggcgccggcgaaggcttcatccggatcagaggtgggaacgatttcattgaccagcgggaacgcggcatcacgcagttccattaccaccccttccagagcattcatggccgggggaatttccagcaggcgcaggttgatcggctggtccggtcccagcatgctgccggaagcaatacggaacagcagggaataggcaatttggccggcggctcctgtaacggtaacggtgataggtgttttcataacgttcaaattaaaataaacagatcttttctgtctggtcccggttatagcacagggaagaacggcgctcaatcaggaactttttattttgacagaaaaaatcctcttccccattatgcttgaacatcagccctgcaggccttatcctttaaatcaaccaagtttttaccatatatttgcactgataccatgaatttaacgatcatcggcagtggctacgtggggcttaccacgggcacctgttttgcggaaatgggccaccacgtcatctgtgtggacaataacgcggaaaaaatacgcaccctccaatccgggtccattcccatttacgagcccaagctggaagaactcgtgaaaaaaaacgtggccgtgggacgcctggaattttccccctccattgctgattccattgcggaaagcgaagtcatcttcattgccgtgcccacgccgcccaatacggacggctccgtggacctgacctacattgaaaaagtggcccgggaaatcgcccaggtgctgaaaccagaaatgggttacaaggtcattgtggacaaatccaccgtacccgtcaaaaccggtgaaaaagtccgccagaccatcaagcgctatgcaggaacggacgtgcaattcgacatcgtttccaaccctgaattcctgagggagggatgcgcggtggacgacctgctgcatcccgaccgcatcgtcatcggcgccaactcggaacgcgccatggacgtcatcaagcgcgtctaccagcccatccacgcgcccattctggaaacggacgtcaactctgcggagctcatcaagcacgccgccaactccttcctggccctgaaaatttcctacatcaacgccgtcgccaaggtctgcgaaaaaacgggagcggacgtggaactggtggcggaaggcatcggcatggacaagcgcatctcccgccacttcctcaacgcgggactgggctacgggggctcctgcttcccgaaggacgtcaaagccttcatcaacatcagccgcacgctgggcattcccttcaccctgctggaggaagtggaacatatcaatgacacccagcacatccacttcctggaccagatcagggaccgtctgtgggtgctcaaggataaaaaaatagccgtctggggcctggccttcaagcagaacacggacgacatccgggaatccatcgccctcaagctgtgtgaaaagctccgcagggaaggagccatcgtcaccgccacggaccccaaggccatgcacaccgccgccccaatcctggaacccatgggtgtcacgctggaggaagacatgtacgaatgcgcccgggatgcggaagtgctgatcatcgccacggaatggagcgaatacgcgaatgcggacctgcaaaagctggcggacgtcatgcgcaaccgcatcatctttgacggaaggaacatcctctctccggccaacatccgggccgttggatttgagtaccattccgtgggcaggccctccattgaagaagcctgaccgctgccgggaataattccggctccaaacgccccatttgcagaaaagcccccggagcgctgaatgctccgggggcctttgttatgtattcgctaatcctgttggccgatcaaaactcaaactgcaatcccgcgcgcaggtagaaaccgggatcgtaatggtacttctccagctcatggctcccgttgctggtcttgatggtgccggagttcccaaaggaaaaaccgacgtccgccaccagcctgggacgaacgctgccccagtgtcccaggcctacgtcggcgcccacgccggcgacgccggaaatccactcgaactggcggacgcggcggtcatggtgaatcgtccaggtgccggacaccacggaaacgaaaggcccccacgtcaggccgtcgctgaccttgttgatataggaaagccgggctccttccagttgaagggtccaattattcgttgccttccactcaaactggataaggggaaggaggggaaaatctcccagctgcggataacagccgacgccgataccatagctgaaccggtcattcaagggacctgcgagaagggcatggccgccgaaaaacaaattatgggtcgtccaggtatcgaaatccgtggaaatctgcggcgttacgccgaaaaccaggctcgtcttccccctgagcttgtaagacgcggtcacattcagccaaatcgtgtacagctcatccacatccatctcgcgcgcgccttctccgttgaaccagctcaaacgaagggcggccgtggaggaaaagccccaggaaccgctggacatccggcacaaattcaggtccgtcatccaattctgtatgttcacgctcccatgtccgtttctggaatccatggggccaagcagctcaaaataggactgcgtgggaaaaacgggcttggaggcgttctcccccgtaggagccggagagctattgtagcctccggaataagcttccgcataatagccggtatcataaccgtctgaggaatcggaatccggataaggctgggcgttcgcctgggcgaccagagtcatgccagccatgagagagaaacttgataataatcgaaggaacatgatcggaaattatatatcagtgcacactcggtcaatcaaaacatatacaaatgactaattaatattttcacgcccgaacagcagcgcgatcataatcatcacgagtacaagaagtaagtaccagcgggccgctttgctgctccggatacacgcccccgcacaaacaagagacacgacaaaacaaaccgccgccgccaaaagcatggcccgcgccagcatgggaaaatccagcgcccctgcccccgccgcaaaaagcgtccctaccacatacccggcaaatgaccacctcaaccccaccagccaggaaaaagaggctgtcttctgttggctctgcttcatttcatcactctgcgtgccagtttccgaatctcaagttaaaaatccggccttctccatgatatgaacaaaaaggatctccctcaacacgggaatgcctcccaaaagcaacaaaaaaacacgttgaaaaatagaccgggcacaaaaaggcgaagacctcccatatctggttttatgaattaaaaaaactccggaatactgcgcctacaggatttcttctcaagataacattattcaggttccatatacggttcaacatttatttgtttttcctgactgcttcaagcctcttatcaatttgctctgctagggaaagaacagaacaagacggatccatggaaacaagggctactaccgtattaccgttcacgaaaaagagggacgactcgttgctcgacggaataattccgccaaaatcgcccaataccccctgccttcccaaactgtaatctcccagtttgaacggattgacgaccactgttgctatttcgtcatcccaagaccattgttcaggcctgtccggggttttctgaaaacgccgtgaatacagctcgttcatggccgcagactgagactggcaatagccgacaaaaagccaaatatcgctcttgtcatcgtctttcccttccgtatgaaggcgcgcaaccacgccgttttcctgttcatccaccacatccacgtctcccttcttccaaacagtcttcaaccatgcctgattgatagcaccctgatcgggattgggcaaaataaccttcttgtcgggagaaagcgaaagagatgagaaatatgtatcaaagtttttccactttaaaccttccgataaatcagattccccacgaacgctaaaaggaaactttccgggaatgccatagtcgggagcaagtttttttcgttcttcccgctgcttctcttctttttgccaacggagtttggatacttctctggccctacggtcccgctgtttgatagatcggttgaattccattaatttttcttgggctaaatcaaaatcataaacagccggcgctttcccatccagaacgagagacaatgctttaagtacaggcagcatttcacgcgtagaggcatatctcgtctttaccgtttcgggggtaacaaaagtagccggatcggtaaatcccttgaacgccaatccagcgtttttaaacgtaaaacaaagaatatcatcacctttggtcataacccagcaatcgtcgcttaacactatttccttataaatggaaggcatggaccaataattgaatgaagctccttcaaaaataatcatatcagtccgtatgccgaaaacactggtggagtatctgacatccatcgatccatttatatgtccatgttgattgcaatagagaataggattccatgaatcggaggtaacaaaaaaaataccgtttctcacttttaatccatggaggatttttttgagatcaggcgcctgatctgttaactttttacttccaaaatgaaaggaagtattttccaagtcttttagcccatgcaatcttatgctttgcatggaagatctatttttttccgcagctactgtcatcaaaggcatagactccgttgcaaataatgaaacggaagtacatgatattgtaaatagtataatcaatatatttttcatgagaactctgttttaaatattctactattaggcggaacaggtggattttctatcgtgcttttttgataggaattagaactatcaccaactactggtccggcacaggcatcataaataaatttaaacgaagaaccaaataaacttacatcgaatacaacatatgcatgattaccaaatccggtcctatactgataatagggatttgttttcagaatgactgggaccgcaagagctgcgggaaggcgaggatttttataaaaaggattattacaagaacccactcctattaaattgacagttaatatattcccaaaaggttcctgataatttccttcgacgttgattccaagcaatctaacgagagcagttagagaaaagcattggtcgtaacaattgactacattcccattgttcttctcaagataggaatccagattaatagtaccaagtgatggagtatactttggtgctcccctcaccgtatcataagtccaccccatcttgctaaaagtataattagtaatattttttatgattgaatctgatgaatttttatcaagccctatattccctgaaccttctattactacatctagcgctttaatccatggttttttcttattgtcattcatatcccacggcgatttgagtggttcactaaacaggacatacccattcctaactgttgtttcaaaaacaattgtctcgttagtaagagcagttccttgaatctctgttaatctccaagtccattgttgatttcctttattcaatttggaatcaatattatctttgaaaggaatttcaaattctgtgttgttatcaaattcctgttcatccagttctgggaggaaatttttcgaaacttttccctcaccctttgtctttaccttcgctttctttatgattccaggttttacttccgctttaatttttagatcaggttttttaccgccaatatagagaaaaggttccgatttcgttgctttgccattcttatcaaaagttgcttccgggacatctatgattttccctttataagtttttaataaatccatagcatccttgtcatgcttaccctgtacgtgattgaaacttatttgatggattaggaggcttggagttaacaatttgtgtgcggcttcaagatcagtcaaatgttttttctgtccgtttttagtctcataaaaactcatcttgcattttaccgtgatcacttttccccagtgttccttgttagacgaatggacagtacaagtgtcctgatctccatttttgacttccaacttttccgtaacggtccattcgtactttttctcttcgtccaattcgtatcctgcatgtggctgcggcggctccacgacaacaacagtgaattgccccttagctttatactccttgattttctctggttcaaaaatggcatatttattgctgttctcatcttctggatcctctccttctgcctcttctatagtacatatgggaagtgactgaggatccaccttgattttacctcccggctccccgctcgcccaactcgcttgcagaatcagaggacaggcaattagaacaatataataataccgcaatatactcatatgtcttttatcgattaaaatattcattcagccgtaatctcattttatttacatttgattcactgtattgctttgttccaatgataaattgtttccaatcaactttccatctatccatcattctgatttcctggggagtaaaatcaatgacattgggactgttggggaatttatagctggagcgataataagaatccttcatttgctccgttgaccatgtctcaagcatcttttgttcaaatttcttgatatcgccttcatcccagatctttagatgccacttccagttttctttcaatggaccgggaactgaagcctcattccatagtttcctgaacgtataaagcagtaatttttgggaaaggcgaagatgaaatggagaatcggcccgtttcacaaaacagttgctccaagctttcagtagattttccggaacatcagcattttttatggaagtaagttccggaggggaaggcatcctggcattctgatagccgctttccagacatgcattcagaaaaacaccaccaagagtcgcctctttagagccatttctggaaattcttaaaaaatagaatccggcccggtccgtataaaaatttttatatactccattattcccgaaatcccggcatctcgtacggaccataacaggaagcgacatgatacgggttagttcaaggtttacaatattttccgattttttcccattcctttgaatcagaacctcctgaggcaaacgagattcgacaaaacgagcttcgatcaggtaatcccgatcataacgtgaaatgtcattggataagggttggttgaagtagagggaaatttcatttttaccagcaggaacgcgtacacgaacccataagtctggaccatcaaaaaaggtaccgtgcatataaccctgatcactccattcggaacagggacgggtcgcatcgttgatgttgtacagacaaattcgggacgctgcattttcttcatagaatttccccgatatccaggcatctttgattttcttcctcggcccgagagttactctggcgtcatacaaatagcctcgggaatcctttcgttgatcaaaacgatgcatgatatttccccatgacttttttgccgaacgtcttaaggaaaaatggcgtccgtatctgttgcaccagtcgccctgtgtttcccaatcatcacaggcaaaacaaataccataaggcctttcgccaagcggcagagattgaaactggttcaaagaattatgccatgcctgatcatctggaatggaaaaaatttttggatgtttgatttcatctccaagacgacgtcttttctttttactggctgttgtttttccaacgacccgaaacccttctccaaaaactccagctaaaacagtcccatcaggaagatcaacaaaacaactgactgtgcctcccttttttttctctgccaatttagtgttcacagaactttcatattgcatatttgccggattaagcaagatgggaacttgattgcggaagcctatccacactccttcctttacgggataaaggctcgtcacataatcttcgggaagaggcctcaatttaccttgggaagatttcataattccctttgctttcagtttttccacggcatccattccccggataaaaatctctttgtcaccgcgttttattcccagtcctgacgttgtgcccacaaatacggaattaccattggcagccatggtattgcacaaatttgacggcagccctgcaccgaaaagaaccggaggttgcgaaagcttgcgtgcatcatccgaatgccattttgactgaaaaaactcacaggtcttgtattcatccttaagagtcatccgggccattcctgccgttaagaagcctacccacaaatctcccgacctatcaaaggctagtgctgaaacttgatcttcaggcaagccatcggcccgcgtgacatccttccatgaatccgtcaaaggggaataaatagcaatgcctcccgaggttgctacggcaacatcccctgttgcagaagagacgctaatgtcaaaaacacggccacccggcaatgtcgtcttacgggtgtatgttttccattgtttgccattccaaatacacactccccaacggtctgttcccacccatattcttccctgggcatcttcagccagggcatagaaattttcagtatctggaaaatctgccgctgttcctgcctttttccagacctttttatccagctccaagtagaataatccctcaccctgggttgaagcccataaaatacctgaagaatccactaaagcatccgttatcctgcttccgggacaaggaggaaggttggagaaattttccaccccaagagagaaggaacataatgcaagcaaagttgagaccattaatcccaatagcttcagaaatgccgtgaatctcatattcatcggatgaaattctactaatttctacaacaaaaaactaaaataggacttatcaacaacagtagttcttctggcatttgtcattatgttgaaatcaaattaaaaagtcaaaaattatttccctccttattttggaatattcaagactctccctggtttttcccattactgggagtaaaaaatggtcgggaagacaggattgtagatattaataattagataattataagaaagtgtacccctaaaatgtacccctgatattcaaggtcatctttctttgtcatacaaggatatctactgaaccaatgatcacaaagtgatatataccagctctcaagaaacgcacaagcattctcttctgacctccatactcgccccttggcaaaaaagaccttctccgacctttacgaacattcacagagatacttttccaaatcgcccatattatatctgctaaatccctgacgccccaaataatctttcggttgcattttccgaattttttcccaacctcactccttcacaaacatacgttctcatacgatcccgtttcatcccgaaataagaagctgctgttttcaaatcacaccattccgggtgcacggagggatttgaatattcttgtcgaattgccatcttggacaattctctcgtcagccaatcagaccagtccttcaatagctcaatgcttacaggagcttttccctctcccctagccactaggagattcaaaggattttcttcagattgatggcgtatttccctcatggtcgtgattgtgagaaaggaacaggacaacacatgacgttgccttgatgtacttgattcctgctcttttatcatgaataagccaaacatggctatatctcataacatgaatcccccccacaattatctgaaaccatcctgttttttgtacatcacattattcggtagagaagggcagtctttgccacattgggcaaacatcatgtgcattcggctcatttcatccgaaattgatagtcccccatacttgggtcactattcccgacaacggtgatacatcacgacgatatagagataaaatgctccactctcatacaaactaggaaagaagaaacagaccttcctcgataaaagcccggaaaagggaatctgcccgttgattccttgatgataacaggaagtcaacaaaaggatttgttgactttgaaccatactttcaagattaacaaaattctaatgaagatgtcttttctgccaaactctcttcctgttcagtgacttgatgcaaacgtgtttgttgaagttcttggagaagccaacagggagctgtaccgttacgatggaatggtaagaaccctgattaaccctgatatgttgctctcccctttcatgacccaggaagccgtcctttcttttaaaatagaaggctcccaggcaaccattgatgaagcatatgaacaggatgcgagagtatctttcagcgaacacaaggaagaagacatctatgaaattaccgttcagctttgcgtttcgattcccacagtcagtaacatatattttctttataaagaactgacaattagttgtgttttttaacaaggttcactatagtaccatttttaggaaaaaggctgtttgtatggcacaatagccattttgggaaacgggtagaaacattacccaaaatgcttttttcataaaaaatccctttcctgccattagcagaaaaagggattttcatttctctgggtagaggcttgcaatactgttgcgacgcttatcaggaactgctggagaaaaaccagattacgccgagcatgacagaaagctatgatctgtacaccaacgctatagctgaacgagttaatggaatcctcaaggactttcttctggatcgatataaaacaaaccggcaaggaatgaagtatttggtcaaagaaatcatctacatctacaacacacaaagacctcacctatctccggtttctctgtcttccgcctcgtttccggtagaagcagccgtcagggagaaatccacggcatcggtagaacgaatgagctccagcgaagctgttctaccagtttaaatgaaccttctgatttgttcaacaggaatagcgcccttcggctgatcaggcaaatgatgtatccaattttgaataacattttttgtcaagatatccagaacaagatccttgatagcccctttatagaaagtaacttgatctcctctcatcttgtgataggttaacaacttcatcaaacaaatgggagggtatttgtttttataaagcggttctatcaggaggacattcattggaacggtaaactctgtgcagaaaaatattgaatatgaggccagtcaatagtttataaaactactttgtccattcttcccgatttcccaacaaccgagctacttcctcctgtgtgggtaaatagagctgatatttggaagcaaaaagctgtttactctccttcaacatgctgtactccatcacagttttgtcgttgtcagagcatagaatcagtcccacagtcggattatctccttcctgtttcttgaatttctcgtacaggcgcacatacatatccatctgtccgatgtcctggtgtgacaacttaccgcgtttcaaatcgatcaggacgaagcagcgtaacaggtaattgtagaacacgaggtcaatatagtagtggtcgccggattctgtggtaatgcgttgctggcgttccacgaaagcgaatccgcgccccagttccagcaaaaagtctgccaactttaccgtcaacccctcttccaaatccctttcaagataatccttgttctccttgaggtcgagaaactccagaataaacggatctttgagaatttgctcgggcgtattgacaagctgcattcctgtagactgagcttcctccttcaccagatttttatggggactggcaagcaacctctcgaaataaaacgactgcatctggcgttctagttggcgtacgctccattgggccgccgcagtctccttgaggtagaaatctctggcttcctgattttcaagacgcagaagcagacgataatgagaccagctcaattgcgaacacagtgtgttcgcaattggaaaggtcaaataaaacttccggatcatttgaagattgcgaacatgaaatcctttgccgaattcctttgtcaaaacatgggacaactcttgaaggaggtaagttccgtattcagcccgagcctgtccctgctgctcttcctcgacaatccttcgtccgatcgcccagtaagtggaaaccatcgcaatattgactgccgtgacgacttgagttcgaccggacaggatcaaatgtcgaatatcgtcaaccagagctggggaaatcagttcgcgtgccataaaggtaagcacataatcgcatataaatcattctccggcaagtttcattcaatcagaagacaagatattaatctaacgaaatgttatgattttctgtacttcattccgtcttctcttaaaattttactttccatcaccacaactcctccgccctcctccttccatccgccacacctgaccacacggctcttgccaggcagcagccttgatttgctccaaacagacgtggacgcctacctactcttcatcacccccttcggcggctgaaaaccgcccagtccgcccatttcccaacccggaacacagcacttacccgcagggagaggaaaattacccttatttggcaggacggcccgcctgatccgcttcccgcagcgcttcggacgccagtattctgaccgtctgaccattgcgggaaataatcacatactgtcccagcttgctcttcctttccacctctttcctgacagcacggtgcagggcgtccagaccgcgccgcgccgtttctgatatgcggggattattcttcataagcgtgctcgttgctgaatatgagtccctcttggaatataaggaacagactaaagatagtcatagtcccatttttcttcagggaagcgatcgtatcgttcttgcttgtggggcatcgcaactaccaatattttccttggtcttgtcatggcaacataagcaattctcataagttcactatctaaagccccttttgtaagtcctgccggagtaatggtatttccttgtacgccagacaccatgagcatgagggcatcatatgtttctcctttaacaccatgaacggatgataatgtgtagtcttctttatttgttctttcaaaaaagttcctcaatggaatgtctttgaaattcgaatgatacttatctctggattttatttttatgacttgttccaaagttcgggaatcatggagaatccatccgatatcacagaacttttcatttaacatcacaatcatattgttgatccaagtaccgataggttggtttacattgggaagatgcgtcagaatgtcaatgacatggattcgccacacatgataagacatctttttttcaatttcgcaactaagagaaccttttatttgtccataattttctatgacaaggcaaaataaagccttttcacataattcataagcccttttttcgtccaccggaaaaccattcataggaggattgggcaaataactccacctcattgcttttccataaatcgtgaatatctgcatcagaatatattttaccacgagtgactatagctatattttcactacacctccttatctcgttttttaaacacaaggccataaaatactcaacgagttttttcttacaatcatcaaatactccatgatacaataataatatcggcttttgctcatgttctgaataaataccttgagcaattgaaggtaacttattttccagggatttcgaaaatgcatgtgtggcattgcaaatcaactgggagcttcggaaatttttcagtaagggttattacattccattgactatctgccatcttattacgaaagcattccggagccgcatctctccactcataaatcgcttggtctggatcacccactaaaaacatggattcgcttcctgccttattaagaagattaagaatttccatttgacttacagaagtatcttgggcctcatccaaaatcaaaatgggaaatcgggatactagtgcttttgctatatcgggatgtttttttagtaattcaatagctaaaatgactgtatcttcttgaaaaataaaacctttctttaaaatatcatttttatatttcctgcaaaatatgccttcgcatttatttgatttccggccagaaaatatcgacttgccttctatttttttcacacacctattttgataacaagccccaggccaggagaagggtaacgaaaccaaatctgtcctgatgatcgtgggcctcacttgattggggacaaataaatagccgaatctcaagacgatataatgattgatgaaactatccaaagtccctatataatgaggatacccgatttgaaattgatctgaggctaacgtttcaattctttttttgatttcctcactggcaacattggtaaaagaaagaattgccactcctcggtgcgtcctcttccacttcttcatgtaatgaagcaatttatgtgcaacgacatacgttttaccgctgcctggacaagcatggagaacaacatttccttcagcggcaatgaactctttctgtgcttctgaaagatggttcattggaaattcttgggttctgttacggcataaatggcatcctcaatataggcgggaaccttgaatagaggaatatatccttccccttcattcttcttttgatattcctcacgcaatctcctgctcaactcttgcgctatttcgcccttgagggaatttctgtattgtataaacagccatattctgagagcttttttgtttatatcagtttccaaatcaacaagagcttttaacttctttcctgaagtggaatgcaatatgataatggtttccaaaatataatttatattctctgacaacagcgccagttcatattcaaatgttttctttgccggacaaagtttgatcgctgacgaagagcatagttgttgtatttttctaaacctgtctgacggctggccggattctatccgtgctattaaatcatcaagaggttgatttagagtcgatttagaattacggtcacagttataatccagttctttggaaatgtaagtctctttatcctctggattggtacacctgtcatcatcagtaataatggcggatttcgcaaaacaaacggaatctatagaagtcggaactgttaatattttagcaaatggagcaaaagcagttccgtctatattcactacttcaacagcatatttatcgaaaggtcggtctaaaagctttgccatttcaggaatgagcatagcctcgctgataccttctacgaataaaacgcctttggcaaaaaacatctgcgatttagtaacatccagatacttttccaaatgggctttttctgaggtagtaaggtccgcttgctctaaggggaaacagtatatggaatgattattttcaaagagaagattaatggaacttagacctattcttgagacaagtgttggagaatgcgtggtataaatcacttgcatcgatcccgcttccagatacttccgttcaaagaaattgtgaattaattcttgcaattgaggatgaagatgagcctctggttcctctacagtaaaaagattgagataaatatcatcctttgcctgagacatatcccccagaactgtagacatgaataataaattattataacccaatccattttgactcaattcaaataaatgttcaattttattaagaagacgttcctgcatttgttcatccagggaatttttcattatttaaaataccggcaatattgacataaagcccatcatccgaagagtggataaattgaggtagagcatcctggagtgaaaacagaaattcataatcttccatttcttgggtgaaataataccatttcggaataatccaggatcgcagggcaccggaaatggattcaaacttgggatcaaccaaacctatgtcaatctgttgctgtaataaatcctgttctatatctgcaagattcttattgataatttctttggccttctgaataggcttttttgataatatctcacggttggctctgcgcaattcaccgacgacgctctctctttcatcatcgtctcttgttacagcattcaacagattggctaacttgctgaaccgcgatggtctcatttcattttctgcattcctcaaagctccaagaaaggcaacattaatggcatcaaaggtatctgaagaaagagaatttccctcagcttctccaccccatgccttgtacctgattttctccgcaccggaaggagatgtatccacataaaattttaaatgaaattctccggaatcgtcacttcccggattccagatttcaataagattcttgggtacatccttcagataaatatcgaataaagcggcatcggcttttcttcctcgtttatcaacatgaaaatcatttttagtaaaataaatgtccttattgtaacttattgtcgaaaaagaaattctgatggcatcaatcagagttgattttccactgttgttttctccgataatggcattgactccttgattaaaaaaaacatctattcctttttcatcaaaaatcctgaaatttctgatagtaattcttttgaggtacatatttcaagcgttccaataaaattatttatttatctcgttgttgtcatattctgaaacactgaaaggaaaaataagagaaccacttgattctttcatggctatttactatacagattcaaaaacattcatcaagaatgaaataaattccctaaatttttgaacaatctacgtctcaactatttactgttaccattatcgtcctccatcggtcaaaaactgcaaaaagccacaaactgggaaaaactctccgccattgcggaagaatgacatcaaagccgctcccatgatctcagcctcctccttgacctgcaccggggctggccgcccccacgtcgcccgcgtcgccatttggctaaaggacttcctgtccgccatccggcaccaggaactgggcctcatgtttgatgaggcggccaccgtaaacaaagccgtcaccaccctccctccggctaaaaaggccctgttcgccaacattgggaacatgctgacagaactcaagcgggaggatagttaagctctatttttaaatcggctgagagcaggctaacggtcaaattcagagaaagaacctaatttccatttactattcttaagcttatagtaatagagaactcctccctcttcagttggattgttcgcctcaattttggctcctgccatagaaaagacgataacaagagtggatattttgccttgccccttttccagtgttttcctaatagaaagggtgagtgttttgataaagtcatccttgacttcataataacagctccctaaaacacttttcagatgatcactatacttggtaatagtcatctttttgtcctttatcccgatctcatacctcgtcccatattcattgtagaaatttaaaacattattttttcctgtttcaatgctgaactgacataatatgaaactgctttcatccttttcttctaggcaatccaatgctctttccacgacagaccaagattttttataaatttccggaatttgcgcgacaatttcttgggctgcttgccctgttggaattctttcatcaccttgacaagtagtagcaatgagagctggaataaggacaatagaataaacgaatgaatgagttctcatataatgaatgatttttaatgaatttctattagttattcaacaggtaaagagcccgaaacaggattgtaaggtactgctagttcgggttgtctagaactgtccccgttgggatttttacctggcgcactatgttgatcttctcgtcttcttttttttgccaacttcttactaatatctgatttcgtatatttagttcttcctttgcaattgtttagatttggaaaagattgattttttaaatctttctctaattccttaacatattctttcattttcctgttccggaattggatatgtaattgttcgtgtccatagataccggtcaaggtaacaggtctgccatatacaattctttttggttttgcttgcgctttatccaatataatttttggagtatattcaatcgagcaaaccatctttatttcctgttgctttccttctcctttacattcgcattcacattcaattttcaactcaaatgatgatttacttcctagtccatttttagtcgttataatttcaggcgttatatcttcaggttttacctcttcaaacttaatttccacccccttcaaccccagcaggtcaatctgtcggtccgggcggttggagacgaaagcatacagattgtctcctccgtcttcttccatggagtcacgccccatccatcgtccgctggagggatcgtaatagcggtaattgtagtagagtaatccggtcagggaatcgctgggctttgtgctgaattgatagccgtagtcccgggttcccgttttgcggcttacgtgcccaaaggcgtcatattcataatgggcggctatcgtcccggctccttcttccgtcagatattcggtaatgttgccgttgtcgtcgtagcaggggtaactggtcagcggcagttgccgatcatgttccgttacggaaagcagcccacccacacctccggcgtcctgagctgtaccggacaaatcatgtccccaggcatacgtcgtcttgagcgtccgggtattgctcttgtactccgcaatggcattgtatccatcgtataaagtaacggtatctcccttgcggattctgcgccccatgtggtcgtaggagtaggattcccggacttcgccgttctgcgccacattgacggggcggttctctgcgttgtaggtaaaagagagagtattcctgtcgggaacagtagtggtgggagtcaacccggtgagctggttcccgtcagcgtcatacgcgggcacggtggttccgatccgggaatactggttgagcgcattggccgtgtaaacggtatccgcagagtctcccttccggctcgttttccggttgcctatttggtcataggcgtagctatccccgttcgcactgttaatctgccccagtacatcatacccccaggcccaattcgcaggggcagagccaaacgcttctccctccgtggatacggaagtccgttgaccaaagctgttcactatgtaagtgtatgcggaaataatggggtagtccaccttattttcccatcggttggttttgctggtgagcatatcacggttggcctcgtaagtatgggtgacggtatgaaggggcgctgtcacttggctaatgagatgcggtgcattcggcagataggaataagagaattccttgccgtccgccgtcactcccgccagttgtcccgttggagtataggtataaataagggtcttatatacttaagttaggaaacttgaaatcaattaagccaatcattaccgaatgatatttttgataacagctctttcccctgaaatgttatcatcattaaacccataggtagttgggatttctcatcttgatattgggatacatatatgctctctccattttcggtaagtaccctttctgggtaaacgcgcctatataacaatcctaaagattccagatgttcaatataaaaatgaacgtctaagtttttatcattagttttgcaggaaaataaggtagaatttttatcttcaaattctctacgcttatcaggattagactctagaaaatatctaagcacaataatttcagcatcatttacttgtcgcaataaattgagaaaataattctcattctgaatttccaattgcgatttcgagattccttgagcaacaagagaagctaggtaagcacgacgttcaaaggaagatgaatttgcggcctgttgaatggactcttccattaagcggcttttagcctcatcttctaacataaatttatctatcgtagtttctaatcttatcagttttttatttagctggttaaggaattctgcaatcctgtctatcctttgcctaggaataatatctgtaacgaattccgcgataattggtcctaaacaaggaatgacagaaataccacatttcacagaacgagcaacgtaatctcttactgtgttttcaaactgactttcgtcaagggaaatttctttatcagtcatccatcaaattatagttaggtacaggtattctttttaagataaatttaatccgtggatttgtctagataatagagaattccattctcaataatatcattaagggtaaccgtgtaggtttgtgttatctcatcgatatcttttataagttttgagttttgaacaattatacatctcaatggagcagttcttattcgagtctcatttagtcctttcgttaaagatagcaatttatttacatgttcgcattgatgttcattacaatttctagaacaaaagtcttctaaaagatgaattgtatgagagtaggcatctaatttttctaatttatagcactgtgttaactcaggatgagaatcaggaagatatgcattatgatgagggtcaattagaacaatatatataatgtagccatacgtaaaaaatatgagtcttccttgaatgtctgaaactttaatttgatgtagttcaatttggcctgagtttaaaatgtgtgctaaatgaggaaaatcatttctacctaaagttgatttaggattatcttccttgtaaattaaagcatgacaatttaataaattgctatttttctcaatttcggataccttcctagaagaataatctttaagagattcaagaaagttgataaaccactttatattaacttcgcttaaaccataaaaatctctttggaaaaagtattcaaacgaaaaagatatttctccgttcccaattctatgctgagtaggtacttgttgaaagattgccttttttgaaggaaagcgatgagacatttcactttggtttatttatataccttctctttcttgttctaaaattttagaatagtacactaacatttcaactttagaaataatattttcacatttatctaaaggttttaatccatttcttgctttaatccaaggaacatcgttatgagacatcacttctaaatcagttcccgataaatgtccaaaagaatttaggaaatcgtctatatattctctatcctcattagaaagaatttcttcgtcgaatcccattctaaggtctttacatgttgcgatagaatataaagaatgcgtctctttaaacctatcaaatatttcacggttaacaggcccatgaacccaagcttgaaactcttcattgaaaagaggcttcttataattagctaaataataagcctgagcataatataatagtttttgaagctttaacattgatatatcagaacaaccataatcattctttttaataatataatccgctatatcatgtatagagttcataataatttatgaagagattaacttttatatttgtatgtaaatgaaataagatatgtcaccctatatactttagacatgcattatagacaatacgttgaaaacgtccagttttatctttttacactcattatcgttagaataatcagcaatctaacttgttaagtaattctttagcggctctctccaccgcccacacaacgaattcctcaacgctcatatccttctgaaccgccgctcgaacggccaaattgagaattttgttagggataggaacgctcaattgagaaacaaaatcgttgttggaagctggttcccggccctgcatgtagcgggaaatcagaatctggacgtgtttcggaatactgcccttggaaaaatagttatcaatggtgcttctggctagacctagggaggaagcaagttcagtgcgagaaactttgttctcttctaaccaccttcccaacgtctgaatatccagcgggcgtttctcgtccatgcgggcaattttctcctatcaggagggcaaatggaagaattcgggctatttatgattgacaaaatcctattaggataataatagctcttttattggacaatattatatctcattaggataattctttgtcctctctaaggaatccaaaacctaaaaacatcatgaactcgaaaaccatcattgccagtttggggcttatgggcctctcatataccgcacaagccgcctctagtgacccttgggagtattacagaatcggagggaattatagttccgcatattctacacggtatgattccaattttggaatgagtatcaaaggtatgtatggattccactcaggaaatgattatggaatagacttgccagacttgtacggtgcccaattaggacttcacgctaacattccatcgggttctgttttccatgaactatccttcaatctcggcgcgcttacaggttctaaaacctacggaggggagttaaaatggaaacaacaagtattccccttcaccgctggatattctttcaatatccccttgtctgattccgccactttctatttaggcggcaaaattggttttcactattataaacaggaaatttccggtggaggagaaaaagcatctgaatctgattcgagtggaacttattcggcattaatcggttttaaatttgctgttgcagaaaaaacagacctcgttattggatatgaaataacgaaatactggtcagatgttgacccataccactttatcacagttggctttagctggtcattctaactttcggcggtgaattaactggcctccttcctttcggggaagggggcgattctttgatttgcattgactggccgtcgccttgctcgcagggtggcggtcaattcttcaattcggcgtaagtaattctcgtcgaaaatgctttcgccacaagagaatccaatctcatccacgtatggattttcacatttccctcattcaaccgatacgcaaattcatctacatatctctgtaaatgttttgtgctgaatgaatggtagattccatagaatcctctcttcaaaaccgcccatacgctctcaatgccgttagtatgggccattccgtcaacatactgtttggcactatgattcaccacctgatgattgaactgtgattctttgtaggaagcatgttcatcagtaacaagaacggaatcccggctcaaatacttattcaaaacttggtgaactgtatctcttgaagtgtcgggaataactcttgccaaaacctttcccgctctggctctcattcctaaaaccgccgtctttccaacaattccgcgcccagccttcaatttctgcgattcgtgcttattggattccttgcctccaatatacaccccatcggcttcaacgattccagacagaaagccgttattgtcatcgtcatcatggttggaattgcaagcttccctaatcctttgaagcataaaccacgccgttttttgcgtaaccccaatttctttagagagttgcatggagctaataccctttctggaagttactaccaaatagaaggcaaaaatccacttatgaagtggaacatggcttctttcaaagatagttccagttctaacagtataaactttcccacattccccacattcaaaatacccttcaaccccgttcctctttacccgatactgctttccactttttccgcaaaacgggcaaactaccttatcgccccaccgtttttcctccaaatactttttggctgattgctcgttggggaattttttcgaaaagctcaaagattgaaatggttaagcggtcgttcatgggtgcctccttagtatggctaattaatagcatacggagaaaccgaagtcaagtatataaggcccataaataagggtttgttctacggtatcgccgttcttgagttgatagccgctcagcctgccatgggaatcataggcgcgtacaacgctctgttccagattgccgttgacggtcgggatcgtgatctgttcctctgtcacctgatcctgatcattgtagatgtattgataggaagccacgccttccgttgctgcggaaatctgtctgtcaaactggtcgtagctgaaagtcttcgtaggcgtcagcccgttgtcattaacctgggcggccatttgtcttcctgcggcatcataggaatacgtagtgacatttccgcgtgcattggtctgtgtattgatttttccccccggcgtgtacgtatagcttacacctttcccgtcggcataggtcttctgtaagaggttcccggtagcggcatcgtaggtccatagcgttttatccccctccgttccttccggccaagcggcggcatcccccacaggaacccggtaggtagtcatccccgtcttttgcccgtaggcgtcatactcataactgacagggtattgctggcttccccagcgacgagtgattcttccatttacgtcgtaggtcagatgttctccacagctcgacgctctcgcgcaaaaagggttccgctttcctgccttctcccctgttgatccatgagaggcccagattctccaaggcattcgccaatccccactttgcctcgggatcgtcccggtcaaatgttctccacaactcgacgctttccgtacaaacagtctccgcttcggaatcttttccaagatcaatgagggacgctccaagatgacgaagagaactcgccaaggcctgatgcgcttctttgctttcgggcaaggcctctttcaacaaggggatgatccggttcattgccttaactaggcgggaggttttgatggtactctgaaagcaaagaatcagggtattgaatgttttgccaaaatcgcctgtgaacgagacatttccttcctgccgaataatccgccgccagattcgcaatgactccttcagaaagggaagagccgcttgatcctgcgaacaggcatgaagcatggccccctgcgcgtacaaggcccgggccagtggaatttcagaattcacatcgccgggaatgacgctatctctcgccatgctcaccttcatggcatggatgtcacggacgatgtcctccattgccttgcaacaccaatacccggaacagcagacagacagaacaccatcccatttttccggggaatcacacaagtctttcaacttctccttccacaaacggtttcccgtcctagccagcgtttcggacagttcgggaatttttccgagccaaattgttccaattttcccatgttttggttcctcccatcctgaaacagacttccagcagatcatcgttcacatccccttcatctccaatcaaatgcagggagtccgccacaaaatagaatccaatagggttcagctccatgccctgcttgatggaaatggaatttttaatgaaattggcggtaagacttttatatcttttcacctcatttcccgaacgtttttccatatcctgtagctggaagatttccccaatcaatttctgtgagtcatttccggccagcatttgacaggcgaccagctcctgtaaaattgcatccattttatttcttatttcttcctctgaaatcatggttttcaactttttccggtcgcgctccacaaagtatgccagcaggtcttttttacagttttgctgcgggttgaatgtataaaccatccctcgaccgacggaatccatgagcaaatcatatcggaaaatggcctccatgatgatgtaaaaggatcgttttctccattcgtcatccgtcgtgccgtttattttccggtattcctgaagcattccctccttgcacagcttcatggcctcctcaatcctgccacagtaagaagtttctcctttttgttcctgatggcagaggtccatgcaggaattgaacaacagtcccgcctcttcagccttcagggaagaaagcggacaagtcgaacgtacaagcctccggcagaccggatgatcatctccatatccgggtttgttgataagctgctcaatccagtccctgtcccggtcaatcagcaccagaacaagtttgtttttccatttgttccgcctgttttccaaaagagtcagccattccaataatcccggtaacaggaaagaaacttcatcaatgacaatcaggtttttcctgacgttccaccattttttcaaattatcgcgttctaaaaaatccctattatccaaggaattgattttcagaaaacccgtattccaggcaggccttttacatctatttttttcctttgccaactcaaggcataattcggcagccaggcgggttttgcctgcccctccctctccgagcaggacaatatactcaatttgcgagcttcccgattcacggcactttttcagaagagaatccttcagatcttccctggctacgaagggaaggcgtcccgacctgggattaagcaatgatttaatgagcccggcatcttcctctcctgatgaaatctccctattgtcaaagggaacttcggcaatacccttgcgtttccacttcaggtaaacagggattacgaaaggcatagcacccaagacaactgctataataccagtaatttctgttgtatccatgcaaaatatttcttttaattttaaattaaatcttctttaggatcaaaaactccagttctttagtcaagtaaaatgccatgacacgcggcttcgaaaaaggcgagtccaggaggagtatctactgttccccaagatgtaccgttatccgaataatacaaaataacatcttttgccttttatgaaaccaaaaaaacggaagggaagcgtatggctggctttttctccgggacagcggaatgtttggcccatcatttttcttccctgccggtttttttgtgtccctgtcctgccgcgaccgggatgaacatctcccgaaccggcaaggatctgctctccgctcttttccgggacgaggaggagaagcggaaaaagaaggagaaaaagaaatctgaaagggaataaaaaattatcatcaaattatttacctgatcctacgcctcccagcagcaatcccacaaggtccatgatataatatcccagcaaattcgtccaattcttgtatgagcgcaccggagcctcacatgctacctccattcgtgacggtcaaagagaagtagtcctcggctccgccacgaaatcgccatgcattggacagaacaaaaagccccagaacaaccccgtcttgacctttttatccctcctgatcccctattatgcccgatgaaaaataccaccctttgcggagattgctttcagttcatgaaatacctttccggatcattcctttgactttccttatcatatcacaaaaacaaatgggacactcctttgtctctaccggatctctggacgcaataatatcgtatcgttaaaacgactggctacgtcattctgacgacacagtggaaactaatcgctgtcaattatcgcatacgattgtatgtgataaaataaaggcaagaggatttctcaaagcaggagaaagataatagccgccaccattcttttatttgctatcaaatatccacatgaggcaacaggcataaatattgcttaataatcatcttacaaaagtctatagaatacataccactactcataatgatgaccgatcgtgagaattgcttaatcgatcacatctttcttcaaataagttgtatcctgattctaaattggtgatattacccaagggtttttaatggaaattcttgtatatcatttatatctaatcgattgcttattttctcgcaagatgtattctttgcgcataaatctctgattaactcacgcaaagtgaaagagtcaatatcttggctttgaatcgaaattggagagaattttacttttatagcgattatatcatattcgggacacatttcagaaatagttcctggctttgaaaagatggagtttaatctaagtttgtcatactctgaagatgagccaatccaaatacggtttgtatatgaaacaagattatcatcaaaggctacctgaagaaaatgtttagatttaatttcctctaacattgttttccctcgatccgcctttacgaagaggacggcagtatcaaaataataggtggggctaggttcagcaatagaatttggctgagagtttgatgatgtgttgcaacaatgagcttgatgttcgaggcctttctgaaagcattctttacgcatctgtttctcgtgatctttgctcataatgaccacccccccaaattcaaatcgttttataaaattaaaaaaattggtcacttagagatagtttctatttggttaatcttgttctcaatgttttccaaaagagcaaagtctttttcttggttcttttgaagctcagacagacgagtctctagtagagtatcaatcataaccattacttcgatagaagcagatttaatctgactcatgtataatgacacctgctctttgagccaatcattgattattttccagaaagttgaggttgcatcttcaatgccttttacccaacgattgtaacaccctatttcgttgtcgtatctatagatatagacatcttcatagacatcctcatagattgggtcaggacaacaacctccggtatctcccatatatgccctcccggtatgttttttataagaagtattgtatgcgcttggtgtactgaacataaaaagactttcaggcaactgaattggagctttcgaaatacctaaggtattacgtagtaagtcagaaacgtcaccgctctgaatgttagttcgagattgaagagttgaagctattaattcaaactcggtatcaagataattttcaatggaactaacaagagaattcgtttccaactggaattgacggttagtcaatttagataatacatcgcggacacgaagattagctgatttgagaatgttttcattcccctgcttccatgaaggatcgtaaggagatgacactttctgctcatagtaatcagagatttttgagaaattcaaaagtctctgataaaagaattcatagaggttcttatatggaagaccaaattctacggcaagggaagttgccattttttcgcccattgtctcaacaaattccccaggagaaactttctttgccattaatgatctaaacgcgtcaagatacgaggtaactaaagatttacgaatctctttaggaacatccgagataccattaaaaatggatatcgccctgttgttcgaattagagcgcaagaatttaacaatatcctcttctttacttaatgttgataaaggaattgcaattttgtctatgctttcttgtatgtcttttacctgagcgtcaataaaacccaattcacgattatttgctatcgccgcgattttttttaaatctttctccattctcgagataataaatgcactatcttcgtcattaatgttttctttgatcgaaaacaacatatcagtaatgcgttctatctcttttaagacagctttaaacgcttcatcggatgccgttccttcaataaatagttttgatttaagcgtccctattttttcactgagaaggtctaaaatagatgtatttttactgacgttaacaaagattcggatatcaccaagaaattttgctaaaatcttatcgaaatcatccaaagttgggcgtataataatatgctcgaacgattcagctattctgcgtttcagttctatatagagatagtccgcatgagaaagttttttgcacaaagcatagaattgaataactacatttaagtcgatatcccttcttcgttcaattgcatctcgaacttttgtgaatatatcatattcctcgtcaagaagaacgtcactattttgataaaaaatactactacactctttaatgattgtagctaagtgatttttatcgaatgatactatttctccattctcattcttttgaactgccatttgtatcaaaaacaaaagatgcccaacaaatggataaatttctttctccgtttcaagattaagtgtgttttttatgaagccttttaattcttcaattctttctgctacagatatttgtccagacttagcatcgtcaattttattaagtaaaaataacaaaaaatcagtattattattgaggctttttacaatacttttaatctcatccagcagccgttgaatgcgaagtttatcaatatcattaaaatccatagctactatacagaaagcttttgaaagcatctcttgtataacgctaagattttttgggtcttgtatggtctttagaccaggaaggtcaataaattccacactcaaattgtccggtaaatcaagaattgatttattcgactgccattcaagaggcccagttacactaatttttggggctgcaattttagattcatgtccctgatacttctcgaagatggctttaatctttgagtatatagcctcgtctgaaagattattttcaacacctatttcccaagaagccttggaggttttgtgaacattgattgaacggtcattcgaatgactgagagtaagtacacctgcactcatttctttttgttccatgggagcaactttacgcccaataaacccgttcacaagcgttgacttacctgcactagtggtgccaaccattgcgattgagagtacgggatactccaatcgttcaatagttttatctacaattgctttgaataatttaaagtctttcgaaaaagttttattcccttcaaaagcatccttattcagagaataaatctctgaaataagttggtctattgattttacgcgagcaattgctcgttgtaatttatcctgattatttaccataaggattgcatttttacgcggttgaatacgtcgttagcacgtatcactaatgaagaatttttgtattttggttccgacttaatgatatgtctaatcatagacaatttttcaagatttcgaacatcttcttcgctatcatggatttgaatatatagacccagtgcctttttagcaaatggttctatgatttcctctctgattgggaatgaaaagttaagcttagagaaagactcagctacttccatatatacattagctatcatttccttattgcaatcaagttcttccatacgttgaagcatatcgtaataatatgcttttagagagggaagcatatatttcacaccaggaatctgatggagaagctgtggtaattttggggccgtattatactcgaaaaggtgatatgcatctgcatacatacctgcaatacaactaaatattccagataagttagattccattttagcttttacagcttcggtaatctcatgagcatctttaagaaaggcatgaagacgagtcttggcttcatctgaaaagtctttctcatgaagttccttgatgatagaaagattatgttgcagcgcgggagaatatatctttgcagaaatacccatttctttagcaagtttccacatagctagagactcctcaaatatggctttttggtataacggacgaagttcaagtcttccaaattcaaatccagcagggtaattcagctcttctcctaatccccaagaccaagctttaaaaatgatagtcttaccatcattgattaaagttggagaaagaactaagacaggctgttttttgagacctgcatatagatagttaatagaggcatcattagaaggagcatcttccttccatgctccaatttctgatactacagcgtgtaatccatttgttggaaaataattcacaacaaaggatgaaagattgccattaatagttcttgcgtaaggatggtcgctgtccttaagtgcagaaattaaacggcacggaactataatgtttgttaaatattctgtatcatttgatatgggttcgcatatttgcatttcaaagggattgcgaagcggccaacaacgctcataatacgtcttttgcgcccattgctgcattgctaacgcatgagaggctttagcttcctcgagccgttgtttgtgactgatacgctggtattccaatttttgattgacttcatcattatggtcagcttgtcgtctttcagcttctttttcttcggctttagtaatttttcgccacccaccctttattacaggggcaaaaagacgagtaatcattaccgttgtaaaaattgttactggttccatatttaatgtttattgtaaaaatgtccacagttctcacagatattaccgtatccagcccatttcccgcaatcacagacgctacatcgtccatggccagtaaatgaaatggaagcttcttgcttgtgaacgtgagaatattcgctaagttcagcgctatcgtcggaactgaaagaaggagaaaaaatatatatatcatcacctattgtaaaatcctcaaaggttgctgatgaggcatcccaatcatcgacatcatgaatctcgtgggtatcttcactatcgctgccccattcgttatcttctgaaggcgcatttaagtcgtgcggatcgaaaccatctagattattcaatggatcaatatcaaacataaaattaaattattgttagcatcaaattactgagagctttccaatgcgttctgtatttgagaaaaggcgaacctcctttctcaatgcaacatggaactgagcttctgtcgatttattcctaattttgtaatagtaccgtcgttataccaaaaggtcaagcgtttttctctggtttcacatcttcctccatatctcacctaggctaaaatcacagagccgacaagacaggtagcagaaaagaatgtatgggcgcaacaatcatatcacattgagatttacatccaattctttaatttaccaaacgtaatttcaactttgtaccgttacctgtaaagttccctatcatgttgcacaggaaggtacacttccttttggaagagatgctggaagtcattcctcaagcaatcaatgtctggcgaaaccacttgacgtcatgactgcggtcagtcaaaagagccttgccaaacggggaatccggtctaaactgaaaaggtattttatcatttttcccttatgtcctttcctgatgactttgataatggttggccggaaccggaagaactggaagcggcaatgcgcagtatggagacgctggacagggctttttcctggctggtgtacgggcaggagtagaataaaccggatgacgagcaactgcgctctctggacaggggggatctgcggcgctttttacagacggccccctcttcttttgaagatgcggagttcccggtacagcgcggcgtgacggaccagtttcccgtgcggctggaagagctgcggaagcgcgtggacgcgctggggtgaaaagttacttgtcccgtctgggcaaggctcctgtgacgtgtccctttgacaaggcggattataccgcattccgggaacggatgggcctggaagactcccggcaggcaagggctctctgggcgtccggcggggaagcgcaggcaaaagaacgtgattaacgtctttccccgcgcggtctttcctgataccgtaggggatgatgtacaaaattctcatcgtcagtctgcccggctctccgaaacgcgaggtcatggccgggcgtctctctgcccaggggctggcctgggaatgggtggacggggtgcgtgtgctctccatggatgacatcccctgggaggaacgcaacgatctggaggcctacggcgtgccccggctgaaggaggccccggagtatgtgtgccgggctaccggctgcaagcgggccatgcgccgggccatcgaccgggcggctgcctgcgcggaggactgggtgatcatcctacaggatgacgcggtactggcggcggacttcccccacaagctaagtgaactgctggggcgcgtgcccgatgaagcggggtgcgtgatgctgcgctgcgcaggcggcggggtgaaggaggtggacggctggatgcgggtaacgggcaatgtgcgcagtatggcggcctttgccctgcgcccccccttcgccccggtgatgtccgaggcgctgcggcactggggcggtgaggatgaccgcatctgggaacacctggcccggcagggggaagtgatactctctgcctcgccccagctcgtctcatgcagccagcggggaagcgacatcatcagcggcatcccggaactgcggggatactggaagtagtaccgaaagcagcaccggcgaaggtgcgggcgaaggcagacggaggcagacggaggcagacggaggcagacggaggcagacggaggcagacacagacaaacgcccgtcccggtcctgaaaaatatcttgtcatttcttgcagatttttggaatatactttccatcccatccgcaaggcatgctctctactttcaatcactacacgatcaacacgggccataacgccgtacagccccttggcacagtaagcccggaaatagtgaacgtggcacgcaacagcatcagatacaatctgggggatacggaaccctgcgccctcttccccggactggacccggatacccgcttcctgatgaaagaactccctggcggcaacctgcaatgcctggtgtactacaaggagaatctgcaactgggctttctgatagcccgcaaggacgggaaagaactgcacgatcagcttatcaatctgatgaaggaaacgggcctaccccaaaacaagacccgcctcaccaaaatacccccggcccctctctgtgccgtcaccctctctccgaaggcagtgtactgtcccagcctgtcatggatggcggactttgaacggtgcgcggctgtcgcgtggctccgcgagggagaggccgcgtaaatatcctattacgggtgggtgaaatcataataacgatcctcgaaccattctacggtttcaccatagcgttcgtgaatccattgaatcataggagaagaatacatgggttgatccggtttgatcctattcattttctcgtcgatgaggttcttattttcccgtatgaatctacccatttttttcgacaattctttatcctcaaaagtagccgtcgggagctttatacgatttgtataacaaaatctcctatcgttattgataattttatccaaattaaaagtatgttctttactatcgccacgataatttatttccaggagataaggttcgttttgtatgataatgaccagataataatccattaaaatcgcctgtcctgaaccgaaactgaaagaattgtcgagaaaacggctaaaatcaaaatcctccataatggttttgatctcatttcttttttcttcatccagccctatgctgctgtaacgctcgtcttctttattatcgtctcttgtggtattgtaacctaccatttccacaaaatcataataatccaattctgttttatccccacggcataaagcaaaggaaataaacagtcctatggcaatgacataaatgactatataaaaagaacgaaatttcatgcggttttttattgcaggttatgatcctacgccgcctctttctgtgcaactccggggggtcttaccttcacccacacacggtacaggtttctgtgacttacctccgtgtcggctgggtcccgtgccttggatttgataatccgaatgtgtgttttaaaaatcttgaacatcctctcctgcgtctcccgatatgcttacgaatgaaacaacgatggaactacagcacttttcgttcgagttacacaagtttgtcttagccgcctctatctctacctccatggcggtaatagtgggatctcctttcggcaattcctgatccgtcctctggtcattaggaaattgctgacggggggggatttcccctgccgtctgtttctgaaagcaacaggccacgcccaccctgtcatatttattaccacttttacattccctttttaatctcctggtcatacggtttttcttctgcttattggaatgtcctacagctatcattaccgtacattctttggggtcttttacttttccattaacgcagcattgactctcactcattggactccatgtcgattcacattttttatgatccgtcttaacacagcagcagtttcctccgcttgcctctcccgatccgctccctccgcctgatgccgccagtcccagaacatctaccaggaataccgggttattctctacaaacatgtacaaggacaggctttctccttctcctaccggatcacgactgatccacctgccatcaagcggggcatagtgcctgtaattgtaataggaaagcgcctgttccggttcaaagacttcactactccattgcagcgggttcacctgcgccagctctccgtctgatgtcacggagccataaggagcatagtcatagacagcaacactctgtccctgctcattcatcagctccgagacattcttcccgaagtcaatcccgtacaggtacaggctccccccggtggtcagggccagcggctccgtcgcctgcccgctggcagggtcccacagaagagtgtgcctgacagcggcgctctgcaacatgtccagcgcggcaatttgcaaggcaccccggtacaggtagcgttcatgctgcgtcaccgtgccgtcctgcgtcaccttcctgtaccatctgcggcccatgtagtcgtacccgcattctacttccgtgccgtcctgcgtgaacgtcacggggcggttttccgcattatacgctacattccaaatacccgtacttgttttaattttagtctggttgccgtccgttgccgcgtgtgatctttgtctggcggcgctgctcgtcatattcataatcggctgtagcaatgaggctccaatcctctctccttcctttcgctgtattgtgccagaaaaattctaactcgtatttttcagaaatatatcaataagatatatatcgtttttgtttatttccattccaagttttttttcaattaataaaattgattccacatcgctaagatctaaaaaaggattaaataaaatatctgataatttatcattcgggtatagatgtgcgtttgggagtcgcattattattgcaatatcacgcactaattcgtgatcgatgtttaaattatgagaattccaatgttttatgtattcattatttgttcttgccttaagagaattttctccattttttattttgccgaatagcccgtcttcttaatctccaacaggtaaaaaaattcatatcatacctccagagctgaacgctgaatcaatttcattttttattttttcccagatattgtctttttccttatcgtagcaatcattccagagacaatgccatgcacaatagcttgcaattatcgcgtccaaagttgtcatcaatatggctattggtgccattacacgtccaattattcgcaaactacttctaccaccaagtctcagtaccattgagacactactaggtagagtagtaaattgactggcacctgcacgcataccagatcgaattaaacccgcttcatgttttttcccaaaaagttcacataccatcgctacccaagatttcggaagcattgtccccgataaatatgtaaccaatcttgccactattaaatcaatcggatcattatcctcaaaacaatccgaaaaacaactttgcccaagtacgtctgataatatcatagggttattacggcacattacatataagttaaaaaaatcctcttccaatgaatctctttgtatccatcttccatctaacgtattcagataccgataattataatacaccattcccagctcttcatcccgtacttcactgctccattgcaagggattcaaaactgcctgctctccactgactgaaacagccccatacggagaataatcataggaagcgacacattgcccctggccgttcaacagttcggtcacgttcttgttaaaatcaaatccgtacatgtacatgctccctcccgccagcaaggccagcggacgggtagccactgattccgacgggtcccacagaaccgcgtgcctgacagcggcattctgcaacatgtccagtgcggcgatttgcagatagccccggtagaggtaacattcatgtgacatcacgactccgttctgcgtgaccttcttgaaccatctgcggcccatgtagtcgtacccgcattcaatttccgtccgatctccccgcgtgaacttcacgggacggttcgccgcattgtacgtcacctcccagacgcctgtttccgtgtggatcaaggtctgattcccgtccgcgtcggattcgggcgggaatggttcgccgctcccttccgtgatggccgtgtactggttcaggttattggcagcataagtgatgtccatagtgacttcctgcgccgtcttccggttgcctatgttgtcatagtcataggcgtagtcccgcactccgagactggccgccgtcagctcgttccggtcattgtaggtgaaggcgtcattccggacggcttccatcccccgctgctggctgcgggtgacaggcctgcccagggcgtcataggtctgcgtcctggccgctatgttggtgccatcttttttgtaagaaatatgcgtcggcaaatccctgtggttttcataggtcagctcccggctgatgtcgcccggcatggccagcatgcccggaaggtgggtaccggacaaataggagtaagcgaatgtttgcattcctgccgctgtctgcatccctgcggtagcgaggcgtccgtccgttccgtaaccctgtaccgcatgaagaagggacgtgtcgcttcctctggtcagctcatatccggagcttcgtccgtaggagtcgtaatttgccttcaggctgtactctatcccgccaatagtcaccttttcggtatccggtttgccgtaggaatcataagtgatctccctggtgccggagccgtcttccacttccaccagacttcccaaatggttgtaggtatagaagatgtccggcgtcccctcatcagagaacagttgggattttaacaacccggtagcggagtcgtaggtataggtgatcacctgtcccttcgcatccgtcacggaggcctcccggttcatgtccccgtactgtgtcgttactgtactgccgtccgcgtaggtcttcttgagtatcttcttttcctgccaggcatattcccattcagtgacatccccatccgtgcgggaagagggatcggtcgtgatggtctgcccgtcactgcggaaggtcgtcaggcggatcaaattgctggtctcatcataggcgaagcaggcaggctgaatggccgtgccgtattccgctgtcttgcgcccacatgtgtcgtacttgtagcaggtcgtcttgcccaaggcatccgtgaggacggcaacctgcccggtaggctggtcgtaggctatggatgtagtatgccctgcggcgtccgtcacctgaagggtgcgctctgcaatgtccttcttctccgtcacggcattgtcgcgcccatccgtctgaatgactgtgctgcccgtggccgtgtaggcacggctccaggtggtggtgactccggcatgatccttctgtgaaacggtgaagccgtccgtcaccagtgtctccgccgtgagggcggaggtgggaagggtgcgctgtacctttctcccggtcgcgccgttgtattccgtccacgaggtcgtgacatggccgtgaatgtccgtggcaatcgtcttgttttccaatgtggggcttagcctggaaaccagttcctccctcatgctcgtgagggggtagccctgtgcgttgtagtcggtcacggttgtcttccggtacactccgtccgtctttgcctcatattcataggcgtattccctgtagggggagttgtagggagtgggggatgtggacaggggccggatttccgtacatagttcgcccatgaggtcgtatgcgtaggtcgtcactactccgtaggccgtatgagaggcctgctggcctttggcgttgtaggtcatctcctcttttgcgatggcatcgcaaccttctatggttgccacactgcgattgagcggacggttcatcatgtcgtaccagtcataatggagtctacagtccgttcccgtgatggaggcctcgacatctaccccgtgaggaatgagaagatagtcgtaggtcagcgggtattctcccggcagggcctgggcgcgcagggagccgtcatagtggcgctgcgtgacctgctgcgctccggtgggcagtgtgaccgtttccgtcagtccccggtccgtataggcccaggtggtcacgcggcccagttcgtccgtcttccggatgatccggcccaggcggtcataggcggtggatgtctgccgatgcatggaaccgatgtaggtgccctgcgtgagcacgcggcctgccgcgtcccgcgtgaagctggtaatagtctccggcgtggtctccgtcgcggagcggatggtctctaccagttgccgggcggtattatacccgtaggaggtcagtacgccgtcctcgtccacctcgcgcaggggaccgcagcacatccattccgtagtgctgatacgtccgttgccgcgtgtggtctttgtcaggcggcgctgctcgtcatattcgtaggcggctgtggcaatgaggctccaatcctccccggtatgcacatatttttcttcccgcgtcactgtcccgtccagagcaatgtactggattgttctttcacttctgccgggcacgatgacgccgttcacgcgggtttccctcacggacttgttggcggctccgtagagggctgtttcctcataggtccagacctgctgcacgccgtccacggcctgtctcattttcacacggccccgagcataggagggggtggctccgtctccgtagagttccatgacttccgtctgcggggctatgtcgtccggtgtacgcacgatggtagtccgctgcacctggggcgtgtcttcatacgtgtatgtcgtggtgattttaatgtcttccgaaccgttggagtagaggtagatttctttctcccgggcaggtctgtagtcgttgaagcgtgaatccgcataggtagtccgctttcctgcttccgtcgtgctgtccgtccagggggaggcctccagaatcacgcggccctgtgcgtcgtactcgtagcgggtatagccgccattgggcttgatctccagggaaacgcggtactggtcgttataggtgtaggtggtcgtctcggcctccgggctgccgtagccgtccgttttactcaagacgagccagccgcctgatgtgtttttcttgatggtgcgggtgcaggaagcgggcgtttcttcattgaacccccggacggttttgatttcctcccacttgtctccgggcaggtagtttctcacgtaggtggtgacaatccggtcgtctccatcgccctcggtaatggtgatgttgttcccctcaatccggcgctggatgcggagggtggtctggccgttctgctcattgaggatgtccatgaccttgacttcgccttctttccggcagtcgtaggaatatgttttcagcggggtgccctgggtggtccagccgctctgcgcgctgccggatacctggtccgggccgtaccattcaatgccgaggtggttggtcgcgcgggtgagctggaataggccctgggtggcgctccaaatggaggtgatctctccggcgctgtcgcgcgtgacctgaagggtggaggcgtaggtctctgccgagacggtggctccggtcttggtcgtcacttcctccactttgcccgtcgccacggaaaaccgctgggcggagccgtccggctgaacgagtctgacataggcgggtgtgctcgtcatgcagggggtgaggtctgaattcaggtactgggccagggctccgtccttctgggtaatgccctggcgctctcccgtggcggaaccggaagcggcctggtaatactggatacggcctgacgggcgtgtgaagacggcctgccgggtggtatcatgataggccatggtccattccatggggctctcatagcggaagccgatgccgcagtgtaccggctcattacctgccgcccgcaggcgggaacgcctggcggggggcggggggtccggattgggatctccgtccaccacgccgttgcctgcacagcctcccgatgtctgtccgccctcaatggggatgccctggccgtcttccgcattgccctggtcgcagtccttgtcacagtctccgcaggacgggcacgcgggctggtcggtgggcggatcgctggaggtggggtcactgctggagtcgctgctctcgccggagggctccgagccggagggctgggaactaagggaggagctggaggaggactcgctggcgctggactcggaagatgaggggggcgcgctggactcgctggcactggactcggaggatgaggggggagcactggactcgctggagctgacggggggaggcggaatcggctccgatgaggaggactcggaagaagactcactggactcggaagaggactcgctggctgatgagacggatggctctgatgaggagctggaggaggaactgctgctggatgaactggatgagctgctgctggatgagggaggcgcggaggaggacgctccgggccaccagccggaggaactgccgggggtgccgctgctgctggatgaatcatgctcgtccgggtcttcctttttggcagaggaggaggaagaggagttgtcaaagccccattccgggtcttctctttcatcggacgaggaggagctgctgtcgcctgggtcgagtgtctggatgtagagccgcttcaaaatcatgccggtgcccggcgcgaggcgggaggccgccgtattccccgtgacgtatatccccgccgcaggagagccggaggtggacatcagggctacgcagccctcatacgggtagcccagggaggcatagtgggtgtgggaaatctcgcagtagtagtatcctttctggtcgaggtagaccgagttcagcgcggtattcagggtgcctgccggtttggtaatggtaaagtttttcgccgggagggaaagggtgattacggtgtccgcgtccaagcggaagtagtgcgtccccggtacggtgactttgatatagcctgcccagatatgggtagtgtcctgcggctggcgtatgatctcctggcgtgccggagcattgtccgctccttcaaagatgtcggaggcggcgggtacgttgccctcgcccatggcgataaaggggacattgaggggggtagtggggttttcttgttcagttttcatataacagaaggttttcagggtatcggttttcaggtggtagttattgagcaggagggcagtaccctcccgagtcatttttcatcttcttctcatcctttttgcagtcaagataaaaaagggaaagtttactgattttcccttttttctcctgttggaaatcggcgttattgttttatggctaatggggtgtgttttggttttcaaggcccgttgcgggtgatctgcggcagttctgcctctgtccgggcggggggggctgttacagccgtatccagccggggcggtagatgtcttcgtagtcgctgatctcgccgacgaaccattttttatgcacgatgattttttcatgactgcccagccatgcgccccaccaggagaaggtggagcaggagatgatcagctcctgcatgctgctcatggcgcgcagggcgggcaggatgccgtcttcattcaggacgagctcgaagcgggaggcggcggggacggaggccaccaggtcgagggcctggcggggggagtctgaaaagatgtggagggtttttatgttgtcggagaatctgccgagggctttttccagaaagtcggcatcgtatatctggtatttgtgtttaaagttgaggtagtctcccatgcgcaggtggacgcctgcctcgccctcgcggcggggggcggccaggggggagaagagggttcttatttccttttcatggtcggcaaagtatttctcggtctggaagtagccggagaggcgtccgtgggtgatggaggcgggaatgggggtatgtctgaagctgcgctcatggtaggtgacggggccgtcatagccgccattggggcacacggaggcggtgggacccagcatctcgtaaaggcggctggtgatctcctcataccgccacggaatgcggcactccaggccgtgccggagggcgtgggcgtagacggcggcgatctggaagaggcggttgcctgtgcgggggcccgggtagaagtggggggcgacgcaggggcctgcctgctcttccatgcgggcggggaggatggcgggggtgcgggtggaaaggaagggggcggctggccgcgcgggtgaggtccgggaatcgggggaagcgggggcggcttttctgccgggggaagggggacagggctgcgggggggcggcctggggcttttgcgcctccaggcagcgccgtcccagcagttcaaaggggtattccgggcgttcttccgcccgttccagtccgcagagctccgccgtgggggagtgtcccggctggcagggggtgacggtgaagcctgccagggtcaggactccggtcagggagtccgccgaccagaaggagcgctggccctcccggctcatcagggcctccagcccccagcccggaagggggaaaggccggagcgctgctgcatgaggcgacgccacgcggcgggggcctctgcggcaagacggcctgtatctgtaaaagcgaggcgcaggatgccgccgggcgtcaggacgcgccaggcttccttgaggaagtcggcgagttgttccggtgtcaggctctccgccacttgttccaggaagagggctttcacggtgccgtctgtccacgggagggggcgggtcaggtcgtagtgaggcaggtccacattcagccagccttccagaaagcggtctccgcacccggcatggatgtaggccgtgttggcattcgctgttttggctgtccggtgccctgcggggccgtctgttgcctttccctgccctgccggggctggtttttccggggtcaggtcccgcagggtgggaaggccgtccagggggtccagccggaggggggaaccgacgaaggcgtctccgctcccggcgagttgttccggcttccacattttccagcgcagcaccagcacgtcgtcctctccgaggctccaccagccgtagcaggaggtgcgccgtctgcggaagatgccgccggggtaaaagagaagctcgtcctgccagtaggcgtgggtaccccggtagagggtggcgggggtgccgtggcgcagggtgtgaagggtgcgcatcagctccgggccgcaccagtgggcggaaatggtgtcgttgtccggcgcggggtagcgggtattggacatgaagaggcggggggtggcgcaggggacggctccggcggccagggcgagctggccgatgatcaggtcctctgctccggaggcggggacgcgctctgcgaaggagggggtgaccagccgctccacggtctggcgggagagcatgtagcccgcgccgccgctgggggcgcggcgggtggccagcagcgtgtctccggtgatgccgtagcggtcatcggccagatccggcaggcgggagaggtccaggtaggtgtcatcgtcgcacttgaacagccagtcaaagtcatggtggtccagggcgtagcggaggaaggcgaggattttctgcgggagggcgttataggtgtccggggcgtccagtcccacggtgtcggcgcgctcgcgctccgggacctctccgcccaggaagaagaggcattccacgtccgggtgggggcgggaaagccaggtctggcgcacggcgtcacgacggcccgagtagccctgggaggagcagatgccgaccaggattttgtgtcccggcgttccgggtgtgtgtgtgccgtttttgggctttgggtcagtggtctgcggggtggaagtgatggcctcccggtagggaaactcttccagggtgcggagcagaacggtgctgttacggtctccggcggctctgtcccggatggaagagtcgtacacggcggccagtttcccataggtgttgtccagcatccaggtttccttgtccagcagccgggcgcagatcgcgccgtgaaggcggtctgtgaggatgatgtctgcctggtcgagcccggccagaaagagggtggagaggaagagggtacgctggggattatgagtgggttcattggagtagccggagaggtcgaaggtcttatgcctgcggcggatgtctgccccctcctgccgggattccgcatcctgccgcagcatgagcaggattttcctgccgtcctctgtggtgtacaggctctgccggagccggtggagtgtgtcgcggaatgcggggtcggcggtgatggtgtccggggcgcgctccagcagtgcgcgggcgtccagcgtgaaggccatgtcgtctgccagcaggaggcgcgccggggtgccgaggccggtcaggtagaggtagctgctctcctcccggcagaagacggtgaagcgctcgtcaaaggtctgcgcgacctctgcgcattggtggaaggagctgggcaggatgacggcccggcggacgaggggatggcccagcaggcgcatgatctccggcaccatgccgtagtagggaacgaaggggccgccgccgccgtacacgagggtgaagggggtgcccctgtccagaaggcccgtgtcaaagggctggtatgggagggagtgccgggtgaaccattctctggtggcctgggtgattacctggtcgccgaggttgccggggttgggctggtagtagaagggaccaaggtcccggagggtctgtagaagaagctggtcgtcggtggtggtcatggaggcaggaggatagatgggttttcggtgggttttcggtggatggcggggggggggatttttttattccggcgggtttattcgggaagctggctgatggtctcaaagatttcttcccaactggcgcgggaggcctgctctccgcccagttccaggccgcgctggcgggcggcctccgccatgtcgtctcgcaggtggggctcgtaggccattttggaggcgtagtagatgaaatcccgctcgtggtcgcagagccagccggtcttgccatggtctaccatttgccgccagccgccgcggttgtccacgatgaggacgctgccggaggccatggcctcgaagccgatgcggggccagttctcggtggtgtcggtgggctggaggatgatcttgcagtggcggtagaagtcctgctgggagacttccgtctggtcgcgggctgtcctgatccaggcgtagggggtgccgattttatcccggctcttgtcgctgaagccgaggaagagggcgcgcttgaagacgggggccacaaagtattcatagatatggagggtgttcctggcgaatttatcggcgtcctgccgggagatgcgtccgcagccgaaccactcatccgtgcggtcggtgatgtaggggaaggagtcgttatggaagtagggcttaaaggtcatgaagcggatggcggggtctccgttgagggcccgcagcaggggcatgtttttctgccggacttcttcgttctggtagaggaagagggcgatctgtccgtctttcatgagttctttttctctggggaagagccaggtcatgcagttgatgaagacggtttttttggtccgcttgcgtatctggggcaggttttccaggaattcggcgttgcagaagcccaggatggcgtcatccggctccagcacggtccagtcgccggaggcgtggatgatgacgcccagcttgaccatttccaggtagaggcgttcgttgcggtagccatcgccggtggggatgaggtggacttccactcccatttttctccaaaggaggatttgatggtggagttccgttccggctccgccgtacagggaggggaagccgttgacaaagaggcgtttcagggaggagttcatggtgtgtcaggatataaaactgattttttctttataccatacgcttttgtttggacaatgggaaagatataagagggatagttggacgggggaagttgtgccactggcgtttctctttgtctgtgaggtgttttgtgttttgccgttcccagataaccggaattgtttcccggtggcgtgccgggtgtttttgtgccggggggggggagcgttttgtccgggatggtgacgggggcttccggctggaacggggatgaagaggaaaaggatggtctgcctgtacgcctgctctcccccagccgtgacagacgtatgaacatgttgtcataatgtattgacaaaggcctgcggcatggtacattgatgtcacgttacgtcccctcccgcttagttcccccgtggaaatgcgcatctggaggggacatctgtttatatcccgatggactatttaaagacgccgctcttactggattttttctacatttcccagtatgcgggagagttcctgttctgtcggcaggtagagctggtattgtgaggcgaagagttgtttgttttccgccatgacggagtattccatgacggttttatctgtctgggcgcaaaggaggttgatcaatgctcaagcccggtattataccggaactttatattctttgccgtgcctatttctgcaaggcaaacataaatattaaaagacggcatcagggaaagcgcctgatgccgtcatgaaaaacacgaatccatttgcgaaaacctgtttttactttcgcgtcagagaacgtgtatcgtccgtggtggaaacgggcctggcttttacttcttttgccgccgtgagagaggcctcataagtgagttgcccacttactggcttagtttcctttttgtcgggatagggcaccatggcgactcctttttcatcaattgcgattcctccgacaacacaggaaatctgcccttccatcttccattcctttgtgcttttcggtgttaacgggaaattaacacctataccgattgctccgtaggcattggaaattaagggtgggatgtctttctgtgctgtgacgaaaaccagtttctctgcttccttaatgtctgttccggctgcattccaggcggcttgaagcgctggcactatcgctattgccagcaaaccaagatacatgggatttagtatttgtcttctcatcgttatgttctgggttaattgttgttactgctagtctccagatgtttctgaaggatttttttcatctcgctgacgggtatctggggccgtggggaagcattgtccctgtactctttccaattgatacccagtttatccattgccatgatctcttgtgtgctgaacggaatggtgtcaggagaatagggggtaaaagcgcgtgaacgcagtcccacacagttttcctgcgctgtctcccacaacttcagcatgtgattgtcaaattgttccctgtcttcctgatcccacaggttcagcgcccagcgggcatgtgtacgcagaggctttgtctcttctttggattgtgccagaaaacggtttccctgaagcaggagtgatcttctacgggaaaacaccgccccattatggataaaatcgttttccggcattcgcatggcctgtagaaaagctttttccgctgccgtcaatttttcttcctgaacagccggaagatgaattggcatcttgtaatagctggggtccagatgttcgtctccttcccgttccatgaaagagcgattctgtcccaggaatactccgctgatgattgtgttgaatgaattgttccggcaaatacgtacacagtaggtcgcggggccttccagtacaaaggttttataaacgggtgtggatatgaagtccctcacccggcaacgtgccagaaccggagccttgatcatattgtcgagatccttttcatagcagttttctccttctactcgttttgccttatacatgtcctgggccaatttataggtcatgggcagtaatttaagatctgtccccggtttgtatttttttacttcaatcaggtagtccctgcgggagtcccctggaagagcgaacccttccttattgtaaaaatacaaactcgcggtggatatcccctggggaaccaccaataccagccagatgtcagggccgtccacggagggagaataggcctccccgtgatcgtcccaatccgattttgtccttacggcatacttataatggtagagaatgttccggttatagggttcattgatggccataacccaggaacgaatggcatcatccggcgtcctcaaggggcctatggtgcggctgatatcgtagagggagtcctggatatattctatgccttcattattgggaggcgcttttctcaaccgaaaataggaggggtccacggcatatccatcactgaccggagcattggcggcgcacagcacggcaagcctgtttccgtagcggaaacaccagtctcccaatgtggaccagtcctcatccgcaaaaaagaccggagaacgggttgccttgccctgattttcttcaaactcctgcaagttccgaaccaggttttcttcgcggggaatgcacctcatggacggtaaaggcaaggaatcaggccggatttccgtccccgccacactcgccgcttcaggtctcggaaaaagtacagacagacctttcccgtatgttgctcccagtaccgctccattaggaagtacgataatagaccgaatccatttgcacggcagaggatttttcttgtctccctgtattttggcaatgacattcaaagctttcttgcccagcaggacagctccccccgttctcgtccctacccagtatccccgttccgtttccgccatgcaggtgacataatcctccggaagcagggcatctgcatccactttctgcgacggagtttttttctttttaccgggagaataaatgttccggtttttggcggagtagtcttttcctctcacataacgccaggtgtttttaccttccagacaggccaggcccgcacaggttcctaccaataccttgccatcctgtacgggaagaatggagttgcagagattggacggcagctcttctccccggtgccggacgggttgacgcaaggtttgtccggaatcccagtaccattttgcctgttttacgttccagtcacggtagtttttttgtggagaactgcttgccacccctccgcatgagtaggccagccagagctgttccttgccgtcgaaggcgaccgattccacctgatcttccaaaagtccctccgcacgggtcaggtctcgccactgatccttttccggatcatacagggaaaccccctcccgatgtggcaatggctaccaggccgctccggggggcgactgccagggaatagacatgatccccggccagaacgttggtgcggtcatacacttgccattttcctccgtcaaacactgctactccccggttgtcagtccccgcccaaatgcggtgctgccgatcctcggcaatagaggtaaaggccagcgtatccggcgcacctgggaaatatctcatatcttcccagaattcattgtaggtttctttcaacggcaggcggtgaatacctgcctgctcccccgctactcagatggtaccgtcatgcgcggtgatcgcctgccggataaattgaaccgggcaaacaggcaaatttccgggaatggtcaccgtcctgtcaagtaccgctttccctataccggaatccgtaaaaacggcggacaggaaaactaacagaatcaattgaataaaggacgttttcatcttgatacaaataactttgtacgaccttttttcaattaaagtcaatatttttataaaaaagaatggaagtctatacgtatactgttgcttcaaagaggtttttcctgttcatttgaaaaaatttccccctgctgcatttcatccctgcaaggccaggaggtggaatggccgggcttaaaggtgtatctggacggtgtgacgcagaagtacggaaaggaacgtgtgtggattcgcctgtggaggccacagcctctccagggccgtgatctggcggccatgctggaagacggaatgtggcgggaggatgaggggctggaggaatgtgtctttctggaacgggcaggacaggcaggaaaaaagagaagtgaaagtccatttccgctctttcatagaggttggaaacttcgttgacgaaaaggcgttccagaaaagaaggcatggacagacaggataaatttgatcttttcttcaccaagttgcaccaaaagtctgacttctctgcggaagacctagctccctttctcaaacccaagcttcttttttcatgatgaaagagagattgcaatcctggcagagtcggtcatatgatacacatgtagttatgtatcataaggaatatactcacgaagcctatacagaacatcagctcattaacaacacaagcacgatcaccagtgcccagcttgttcaaaaagactttggaaaatatgaaatcattctcaaattagccagtaacggtttagtgaacaattacgagaaaccattcaaggtatcatgttgttactataattctccatgtaccgcagaatgttatttacgatcttcttatcatattagatcaggaaaaagctgggaaagtcgtttccaatgccacatagaaggagtggaacgccattctttatccggttattgggaatttttttcttccatatgcccattttggtgaaggggatacagagtattattcctttgacaggatttcttttacgttgagtgaagtcgaatgggagttgcgatatttatacgaatccaacggagcttatgatctttttgaagaaatcaaggacctcaagggcgaaaatggaaaattgaagaaatcggatcatgccgtcctgcgtgtttccacgcaaagcatgggaaaagaacaggccgaagagacggcaaccatcatttgtcatttgttgcagcttgcattgggaaaccatatcggatgggccgtcctgaactgggttgacgatgacgaaaaacacttcgttaaaaacggcgacatggttcttcctgaatgcaaaacctttgccccccttcggcagcgaccatataagcaccgtagcattaagaattttttggaaggcgcctatccgcaatacttgaaagaggaatcatggtggtggcttactttggactggtatgcccagcattgtctttccggaatgggtatacaaacccagatgatgattgtgagcatgttgctggacagagtttctacctttctgctgaaaaatcaccaattcccctgtcagattagcgaaaaattgaaagagaaaaaagttcgagatgaactgaaaaatattcttcacaaggacattatatcattatgcccggaatggaaccaagggagaaccaacagtctgatgcaaacgattggggaatggaacgcacggccttcttataaagggaaaatagctgaagcatataaaatagcaggagtggttcctccttcagatgaattgttaaagaaaaggcatcaacttttacatgaaggaaaattgaagttggactctgaaaacgacactgatgaactgttttcctattggagggagatgtctgacagtgttacggaacttttgctaagaatgctcggttacaaaagcgattttgatcgttggaaagatcacccactgcataaaatataggaaggtctcaatcgagagttatactcctccctgttttcggaacccgttatcagggcttttcgctttacggcggctctccgtccatttgctgcaaatgttctatgaaataccttctcacccttgcaaggccagaagatgcagcggtctgtctccgtgcacgcgcagtccgatgacggtttcaaagtcccagtggccggaggtgatgagggtgtgtcagccgggggagggggaggtcgttgcggtcgagcttgtcccagcgcacgccgtcgcaggagatttccacgccctccacaagggtttcttccacgagatagatttgcacggctgctatggggggctgcgctttgatctctacggtgggcaaggcgttggtgacgaggcgggattcatagtcgcagtgatcatgggcacgtggacttcttattcgtcttcaacatcatcaaatgagacgccgcctttaaaatccttcggccctgtatgcgactgaaccagaggagtgctcttcagcccctttagcaacgcgccaaagctcaactcacttgatatcttcacctcttccggcgcataaccgccatccatcttgttgagctcctggatggctttcagcttgtccggcatccggcacctggttccaaactcgtttgtcacaaactcctgacacaaatccgagttttcatccacctttccgagaggtgtcgtcacgactcgggaaaggtaaatcatccgcttcctccgcttcaggatagcttcggactctgccttctcgttcagctccttcaggtactcctgaaccttagggttttttaggagtttggatgactccgttgcgcaggaggcatccttcagctccttatctttcccatagctttcgcgataggcttttgtcccattcctgcactcaaaataacatctggtgaactccttggccttctctgtcagtttttgttctctcataattgtgtattactgaaagctgtaaattccattcacgtccggtttttccagaacaaagaaatgatccataccggaactggatatgatatttggggggaggggcatggaaacaggcatcactacccggatgttccccagtctctgctgattgttgctcatcgttcggtacgacaacctccccaatgctacatactcatccatgttctgttcgttcatacggtgtaatttccttccttgattctcttcaattcattgtttgttaatgtatctttatcatatttcagtcggagggcgttcagttccgcaatcagttcctccggcgtatgctggtatcgtacggccaatcttcgtacggtcatttcctcacttttcaattttgcttgcaccacattccggcgagcctcctccctctcggcaggcgtcttccttcccgtccgccgaaaccacgctagagccttttgtaatacttcttgaaaaatcgtcagaaacaactcgcgatcaggaggataatcaaatttttttgaaatttccggttcgtgagccaggtattccgctatggctatttgctccagcttgttaacggggcgctgcatattccgaaatgccttctcggcggcctgccgctcccgctgcgacagtcgccccgtatcccagccaggccgcagcctcttcacccaggcaacgaacgacacaaactccggcaaaagcttcccatccgcattcctcacacaatccgaatccagacagggggaagggggagaataatactcctcaaacggcatttttctcatacactgtggaatttcccctccaccccctttattatctatttcttcttctttttctggtaacgggttaggtaacggaaaatgtaacgcgtctgacgttacatcggtaacacttccgccgttacaaaaattctttgttcctgcggaattggcaacacctctcctgttacatccagccttattatcttccattttcgtaactttcggaacgttgcccttgttgcgaaacctgctcactctccggttggtgcctattctctccttcgtcgtttccccattatgccgggcaaaattcggaaataccagagcgccttcttctccttccagccatccgactaaacgtaaagcgcttgcaaaccccttacaaaaaacggttctgtcgatgaaggtatccgtgcactgcacgcaattgccgtctaccgtctgcatatccgcccacgcccacagccgaattaacttacctactaccgtatcggtatccttcaacttgagcaattttgccagaataatgatctctggcttgtccggaagaatcacttcaatcttgatccaggaaatcatcatgaattctccttctattctttttcttgttcatgaaaaaatcttcaaaactccttcatatactcacagaaaaaaacttcaaaccagagccggtactctgcccttgtttcccgaggaaaacgacgatacttgccattgcgatacttgttgccatcatacgaactatttctttgatcattgaatgtaacactggaaattttcttctcatttcgtcgtagcacaaaatgaaatttccacgtcacaagatcattctctctcatttttttcaaaaagggaatatctcatggaatgagtaatttcatgagcacttgacaaatccgttcccatcaattccttccccacattacctttaccgaaaaaatagacaaaaaaggcagggagcctatactctttcaactctacaggaatcgacacttccccactccctcccccaaaaaccttctcagcaaaaactttcttgctacggaaaaaagaataaaaaagtaaggagaaaacccgcagtaacaaaaagaagaaaattgactcgtacattctctgatcctcctttaacaaacgggcttctccccacaaaataaacactatctatgccaaacggacagatatggagcggagggcttcatcatttttttgccgatactcgcttctttcgttcccatggagagatggtaatacaggaatttgagaccactcagattttttacttcaacttcgcattcatgtccaaaaacgatcatattacattcgacgagtatgatttggttcaagttgacaatttgtgacctgcttattcttacgaaatgatcaggtaatttttcttcaaaaaacttcattgtcttcatttcagaaaacgtgtgaacacttcccgcatataggcaggtaatatcgacatattgcttcgatgattccagaatgagaatatcatctacacgaatcatttttacgcttccgtcgtaaatggtaaggaatgttttcatcccgacaaaataaaatatttcatacggtgtctgtacggttttatgcgtcgcagacgaatcttcatgttgtgcaggattgattttatacacaaatatctaattatgaattgtttataactttaattcgtgataactgtatctaaacggattcgtatggacatcgaaaaagaacgggaaaaagctgtagcttatgtgagaatgtcgacagatcatcagaagtactcgatcggaaatcaactggatgtcatagaagactatgcggacagaaatcatttcgagataacggaaatattttcagatgaaggtaaaagcggagtccagctaaaaggaagaaacgcagctatccgcttattcgacagaatcaaaaacggcaaagccgcgttcaaacatctccttgtctatgatgtaagcaggttgggaagatttcaaaatgccgatgaggccgcttttcacgaatacgagtgcaatcgggccggaatacttgtgcactattgtgcagaagggttttccaacgacggaacgatggcctcctgttttaccaaaacggcaaaaagaatcatggcgggggagtactctcgagaactctcctccaaagtattcagaggtcagtgcaatttgatacggagaggatttcggcaaggggggactgttggctatggattgagaagaatgcttatcaacgaaaaaggagagcataaggaaatactgaccagaggcacttataaatccatacagaccgaccgtgttatccaggtattgggaccggacgaggaagtcgaaactgtacgatggatttacaattcatttgtcaacgaatttaaaaatgaacgtgaaatagcgcgcctcttaaatcaaaagggaataaaaacggattttgaccgggattggagtgccgccgctgttcttcaaatactgacgaacgaaaaatatatggggaacaatgtctttaataaaacttcaggaaagctgaccgattttcttccttttgaacctcgcaggataatcaggaacgacaaagaaaagtggatacgggcagaaagagtatttcccgcgattatcgattccatgacattccagatcgttcaggaaatgatcaacgaacgcacgaaaagattctccaacgaaactttgctggaaaaactgaaacaattatatctctccacggggagagtcagcggcattctcattgacgaaagtaacgaaatgccttccagctgtttattcacatcgatttggcggattgctgagagcttatgaactaattggttatactccccagatagactactcttacattcaaatcaataaatatcttcgcagattgcatgcagatacattgcaggaaatggaatccggttttgaaaaagaaggcatccttgtcgaaagaacgacaacggaaaatgatggaatcagattgattaaccgggaaatcaaggtggctttggacatatccagatgccgacgcatggaaacgggaagaagcagatggcatttgcggatgggacaaggcatggacattgatttttccattattgcaagaatggaaacaaacaatatgactatcaaggattattatctgatttcccgatttgataaaaatttcattaattcaagaatccatgaagaaaacggatttttcatggaaacgtttagatacgatacccttgaatggctatatgaaatattttccagaacaaacattaccaaattagcacgatgaataatcaagaatgcatcatacggacaattcccgtccaaaatatccgaatcgtcaattcacgaaaacgggacaaaaggaaatacggagaaattgtagaaagtattcagacactgggtctcaaaacacctattgtcgttacgccgagaaggtcgcaggaagatgatatggaatatgatcttatctgtggagaaggacggctgaatgctttcaaaaatgcaggcgaacaggaaattcctgcaagagttgtatcgacatccagggaggatgcattgttaatgggcctggttgaaaacatagcgaggagacaggcgaacaaaatttccctgatcaaagaagtaaatcggctttcggaagaaggttataatggaagagaaatagcccgcaaagtaggaaaaacggaattctacatcagccaactcaatgctttgatgaaaaaagggcgtccggaaatcgtcaatgccgtgctcacggagaaaatgaatttttcaactgccttcagaatcgtttcctgttccgatgatcaggaaattcaaaaggaaatcaacgacgcttatgaatcaggtgaaatcaaagccaaagacttgaaacttattcagaatttttttgtcaacacaaaagcaaaatgcacgaaaaaaaacaaaagcaggatccgttatttctgaatttaacaaacgagtgaaatacagcaaaaatattatacggaaagtagattcgtgcgagatgacactggctttcctgaaaggagcattcacggtaatgtttcaggacgaaggtttcattgccttgcttgaatgccagggcatcgtcgatatcccctcacagcttcaataagatgaaaatattaaaaccggcttttgacctgaattcgatcagaatcaatattgaaaatcttgaagaaacggcgcacaggaaaaattatagaaatttgatttcgtacgcttccatattgtcttccattcgggaagtcggcattattcaacctctggtagtttgcccttccagcaagaacggtcggtacagaattcttgacggacatattcgattctatgccttgaaagaacttaaccaacaatatgtttattgtattattgccaatgatgacgagagatatacgttcgatgctcaaataaataatctcagcacatttcagaaggccgctatgattgccaaggcagtcaaaagcaatgttcccttggaaagaatagcggcagctttggcaatgagtgaaaaacaaattttatctgacatgaatgtcacggaaggattggatgcaaaagtcgtaggaattttaaggacggcaaatgtaacggcaaaagccttgaaagaattgagaaaagtaaaaaatgtcagacaaatacaaattgctcaacacatgaaagctgttcacaatttcggttttacatttgtttcctctctggtggcttcatcgctcccatgtcattttgtcgatccaaaccagcaaacaaagaacaacagagtggactttaccgaaataacggctttggaacatgaaagtaattcattggaagagcaggctcaggaatcattagaaaagtacaatcatcaaatatttgaattgaatattattatagggtttttgaagcgtctgattactaatgaaaggatcaatggatacatgatgagaaattttttccagccattatggtaagttggaaaaactttcacaaataaaaggccttattgaatgatatgtgtgagaaaagcattgaaaactaaggaacgtatagacttcttcataaatgtttctaaaaaatatcatgatcctggcatactcgattttcttaaagtaatcggaaagattgccactatgacaccgatgcgaggattggagaagtacttgcctccgatccactcagagccacccaattctttgacgaacgactaccagtactgtacggaatactcaataattaaggccattgacgataacaccaataatcaacgaaaaacgtgtagagatgaactggacaaacgagaatggaaacccatctgacaagatccattctgactaaccttttttgaggtttgagaaatagactttgccttgatttcgtacctgggatgagagatacttgttcaaggtattttatacgcggcacagcttgcctgtataacaagactcaagagcagaaaggtataaaatgagatttgtggacatcctcgaaaaatatcgtacgcattctttttccgagcgcgataaaggaaatcgttttgaacgattaatgaaatcttatttgatggttgaaccgaaatataaaaccattattgaaactgtttggctctggaacgaattttccttttcggaaagattttggtagtggaaaggatgtagggattgatcttgtagccaaaacgtttgatggtcgatattgggctgttcaatgtaaatgctatgataaggatacccagattacaaaggcaaatgtggatacatttctggcgacatcagacaaacgctttcagaatgaatatttacaagcgacctctttctcccatcgtctttggatctcgacaaatgataattggacctccgaggcaacattgtctttgcgtaatttaaacattccggtaagcagaattaatctctatgatcttgaaaaattcctgtatcgattgggaaaaattggaacacggagtccatggaagtggagtaattctcaaagaacgaaccctgagaaaacaccaacaaaaagcagttgaattattccacgaacactttctgcaatcggatcgtggacgtctcattatggcctgtggcacaggaaagacttttactgcactcaagatagcggaaaaggaaacaaacaataatggtgtggttttgtttcttattccttccatagctctgctgggacaaaccctgaatgaatggactacatttgcagaaaaaccgattaagcctgtttgcatctgctctgatgctgaaattacgaaaaaaaggcgtgatacggatgatggtggttttaccattgaagatctggctctcccagcatcgaccgatgtcaggaatatcgttaatcaacttttgatggcacggcaaaatcccaatgaagggatgattgttgtattttcaacttatcagtccatagatcgggtttctgaagcgcaaaaagcattgaacgccgaaatagcggaaccctgcctctttgatcttatcatttgtgatgaggcgcatcgaactacgggcgtggccctcaaaagccagaaaaatgatagaggatatgatgaaaccgccttcatacgtattcacgataatggttttatccagggacgaaagcgcgtatatatgacagcaacaccgcgcttgtacaaagatgatgtaaaggaaaaagcaaaagaggcggatgcttatctttgttcgatggacgacacctccatttatggagacgaagtattccgcattggttttggggaagcagtggaaaacgatttgctgtcggattacaaggtactcgtactcacagttcaagaaagtgaagtccccaaggaatttcaggaagccattgccaattccaatggagaaataactgccgatgatatttccaaattgatgggatgcatcaatgccctttccaaacggatgatttgcgacgaagagcttgtcaaaaattccgatccgagtttgatgcatacagccgttgctttttgtcagagcatcaaggcttcaaaacatatcacccatatctttaatgagcacaaatccacctattacgaaacgctccccagtgcgatccgtgacattatggtgacagtttcttcccgacatatcgatggaaccatgggggcaacagagcggcaaagtaagttgaattggctgaaatccacaccaatctcaggacaagactgtcgtattttgaccaatgtacgttgcctatccgaaggagtggatgtgccttccttggattcggtcatgtttctttcgtcaagaaactcgcaagttgatgttgtgcaatctgttggtcgggtaatgcgtaaggcgcctggtaaaaagtatggatacatcattattcccgtaattattccggaatcaatgagcccggaggaagctctggataaaagtgattgttttggcgttgtatggacggtattgaatgctctccgtgctcatgacgatcggtttaatgctgaaatcaataaaattgaccttaacaggaaaaaatcggaaagaattcttgtgagctccattggttcttcaccaaagccatctcatgacgataatggcgataggggagcaaaaggcgaaagtgattcaggctttagtaaatcggtccagcaagaactcgccttaaaattcgaatcattgcaaagtgttattttcgccaaaatggtgaaaaaagtcggaactcgccgatattgggaattatgggcaaaagatgtggcctctgttgctgaacagcatattaaacgaatccatgaattaattgctacagatcaggaacataaaatagcatttggacactttttgacagggctgaagagaaatctgaatccttcagtgacatctgaagaagcagtggaaatgctggctcaacacatcattaccaaacctgtttttgaagcattgtttgaaaattattcatttgttcagcataatcctgtttcgatcgccatgcaacagatgattaatctcttgcatgaagaaataccggcgagagaagctgagattatggctcaattctataaatcgattgtggaacgttgtgctggaattgacaatgcagaagggaagcagaaagtaattgtggagttatatgataaatttttcaaatcagcattccctcaaacggttgaaaaattaggcattgtatatactcctgttgaggttgtggatttcatcattaattctgtagcagaagtattggaaaaagaattcgaccgccatatatcagatgaaaatgtccacatacttgatcccttttccggcacgggtacattcattaccagattactgcaaagggggctgatccgttccgaggatttggaacgaaaatatctgcatgaactgcatgccaacgaaatcgttttgctggcgtattacatcgcctcaatcaatatagaaaacgtataccatgaccttcatggacaaaagcaaggatacaaggcttttgatggtatttgtttgaccgataccttccagctcggagaaacggaagatagcgataagctcttctccgaaatattttcacagaattcagaacgagtcattgctcaaaagaaagcccccattcgtatcatcataggcaatccaccttattctgtggggcaaaaatcggccaacgacaacgcgcaaaatcaacggtatcctaaattggaatctcgaatagcggagacctatgctgctggtagtaaatcaacaaataaaaactctttgtatgattcgtatatcaaagccttccgttgggcgtctgatcgtctggatacacaaaacggaggtatcatcgcctttgtttctaatggcgcatggattgacgggaatgccacgtcaggatttcgcaaatgcctccaagaagaatttttctgttatctatgtgttccatttgaggggtaattgccgaacttcaggagaacagcgccgaaaagaaagtggaaatgtgtttggagaaggaagccggactcccatcagcatcacccttttagtcaaaaaaccggataaacagaccgcagagagagcccggattttctatcacgacataggcgactatctgaaccgggaagaaaaactgaagattgtccgggactttggaagcatcctgaacccagacatgaagctatcctcaattacgcccaatgaggcgtacgactggatcaatcagcgggataatctgtttgagagttttatccctatcggcgataaaaataacaaagaaaatacgaagacattttttctgcctttctattccaacggtcttaagacgcaacgcgatgcatggtgttacaatttctcgagagacgctttggcgcgcaatatgcaaaagaccatggctttttacaatgaaagcattggccgtcctgaagtttatgatccaacatgcattaactggactcgagcaacgttacaaaatgcccgccaacggaaacaggttcttttctgttcggataacattcgtacagccatgtatcgacctttttgcaagtcgaacctttattttgacaggatgtggaatgaaatggtctatcaaattcccaaactctttccgactcctcaaagtaaaaatttggtgatttgttgtgcaggcattggttcgaataagggatttgtgcctcttatggtaaatactatacctgatgtacagctacaatttaacggacaatgttttcccttatactattatgaaaaggttgataaagggcagcttggcctttttgattcaacggaagacgaatacatccgccgggatgccatcagcgatttcattctcgaacgggccagacaggaatatgggcctaaaacaatgaaggaagatatcttttactacgtttatgccttacttcacagcacatgttatagagaacgtttttgttccgatttaaagaagatgttaccgcgcattcctattatcaatagtaccaatcattttaaagcattctccagaattggacgatctttgtcgaaccttcatgttgaatatgagacagtatctccatatcatgatgttatcatcactggcgaggaatggggcgattatacaatttcacaaatgcgttttggaaaaaaaggaaaagaagaagatcgaagaaaaattatttataatcataagataacgatagaaaatattcccttgcgtgcctatgattatgtcattaatggaaaatctgctatcgaatggataatggaacgttattccttaacggttcataaagaatctcgcattgaaaataatccaaatacttggtgtgaggaacataaaaatcctcgctacattatagaattgttactcagtataattacattaagtatggaaacgatgaaacttgtttcagaactcccggaactttccttcgaagaatcattcgaataagagtcttggcatggaacgaataatccgtaaagattccaggctcaattggattattttattcattaaattcagtatatatttcggatcctcactccatgaattgggatcatttaaaatttggctttccggatgtattgagacttgatatttttccatcaaccattctatcgcagattttccgttaatggtatattcgtacgcaagttgtggaatattttctattcgaatattggcattgtaaagaatactacgtttgtcattttttatgagaaatctcatcttttctacacgataatttccatgttccattcctttaataagaatgtcaggacagaatggaccgtcttcataattaaggtgcagcgatgccagcttttcgcctgatttcacaaaactctggaagtcttttatatttgcaacaagaggaatgcgaggaagcatttttttcaggtctgaggagaatttcttcttatagtcttcacaattcaaaatcccatacacataatagaagatatcctctttcgtcgttttgggcccgtattcctgtctggcccgttcgagaatgaaatcgctgatggcatcccggcggatgtattcgtcttccgttgaatcaaaaaggccaagctgtcctttatcaaccttttcataatagtataaaggaaaacattgtgtatctccattaaaatgcaaatctacaattccgttcgatattaaagccgaaagtccattttttgagatggctccaacgcaaatcaccaaatttttactttgaggagtcggaaaaaaattatcaaattggcctctcctgtgaatcattttttcaccaaaatagagatgttgtttaaaaaatggtctatacaaacctactctaaatttttgttcaaacatggcatgattaccgtttcggacatgcggcattaaactgctcgtccagctaatttttgtagagtcgtacgaaatataattatttacactaatgcctttgtctttgatattttgataatcagcaacttgtttgttgaaaaattcaattgatgattgaatatttcgttccactaccatttttgatgaattataaatccacgaatctctcgatgtttccagacctctcgaattgacaacaaaaatcgaacgagaagatgcattaaattttcttttctggttctatagggataaaactctcaaacagattatcccgctgattgatccagtcgtacgcctcattgggcgtaattgaggatagcttcatgtctgggttcaggatgcttccaaagtcccggacaatcttcagtttttcttcccggttcagatagtcgcctatatcatggtaaaaaatccgggctctctctgcggtctgtttatccggttttttgactaaaagagtgatgctgataggcgttctgcttcctgatccgaaaatcttgcccccctctttccgcgataattcgccactcgttctctgattacccctcaaatggaacacattaatgatatttccttgacggaatatctgctgtatatactcaccacctattaaccataggaaacacgaaccaatgcaacagaaaaaatatagtgaatgggtaagagaatggctgagtcgaaaagagcgatttgtaaaaaaatcaacctatgcggcttattccaatattgttgtgaatcatttattgcctcgttttggtaatatgtacctaagtgatttctcagagagcttaatacaaaactacgctcttgaacttttgcaacatggtcgtcttgacggaacaggaggactctgtgacagaagttcccgagatatcattgtcgttttaaaaaatatattacgagatgcgatgaaagcaaaactcttatcaacagtctcctatgagatagttttccctcccgttttttccaaatccaaagttgtaattttggaaaaaacaatgcagcagacgctgattcagtccattcttcttaatttgactcctcgcagcgcggcaatcctcctgagcctttatactgggctgcgcatcggagaaatttgtgcattgaaatggagcgatatcgattgtgaaaataaactcattcgcgtcaatagaacactgcaacgcgtctatcagaaagaattgaatggaaaaggaaagtctgaaatcgttatttcagagcctaaaacacgatcctcaaagcgagaagtacctatttctgcttttttataccctatcattaaacgcgtgaatccgatgaacgcaaatgctttttttgtgagtggaacagaaaaatgtgttgaagtaagaaccttccgtacgttttttgagaatttccttacccgtcatcatatggaaaaagtcaattttcatacattaagacatacatttgcgacacgatgtatcgaatttggtgctgattgtaaaactgtttcagaaattttaggccactcttcagtcaatatgactctgaatctttatgtccatccgcagatagaacaaaaaagaagatgcgtagaaatgctttctgaagtattttgaaaaataagaactaacatcaaatgtgatgacaagattgttttgcatcagaacaatcatttacaatattccgcgatcggaggtaagaaacaccatctcttatgaagaaaggactaaaacataaaaacaattggtgaaatatagggtattgttctatccagccatcctaaatgaactaactacctaatgcgagttgattccggtcctcatagcaaaaggacttggatcaactatttggtattcaagttgaatcaagcattatgtccttgaaagcttatcacgccagaagattatggcagtaaattcagagaaaccagagatgctgcatgtttgctttctccttcgaataatacctatcctgaaacggcgaggtacgtccaatccatcttcaccaaccttagcaaaatttagcatttttcatatcatctccaccatgtccagcaatttgaaatatacttcgacatggctccctacgcctgttttgtacaaaaacacatcattgattctcctccccctcagtgataaatagatcctttaaaaggcacttctattccctttcaagtctatttgcagctttctatcctgttttagccatattgattatattggaggaatgtaaatagatggaggaaatactatgccttcaggcactggtatctttgctaatatgcatgcgagatagtcatttcagaatgcccatggttcatgagttctacaagattttccaaggcagttttggattttggagccatgtcctatctcttgtacagggcatggatgaatacacctatgataccgaaaccgggccaagaaacgttcataaaagggggcatatcattccatccggactcggacttgatacggttgatcgctctctgcgtctacatcctgaagtcgcttttttcaatttcatcagccacaatgaaaacattcataatccttgataagaatattagaaaatcgacgtcttgttaaaataaccccttcgcataattttcatgcggggaaggaataacatttcgatttctgtcttcatttaagtctgaaataacctaaacagtgcttgaatcaacgcaggaatgggaacttttttgctctagtgtgtgaaaacaaatttgatgcaagagcatggtatcttttcctatattaccttggaaacttcggaggtgcaggggactgcccccgcgtacaatcttacgatgtccatgacgtgatcagattctacaaaaacgagcacactatctatgtcaagcagacagatagagaggtaacaagcaacaatcttactctgaaaaaattctcctttcgtacaatatccgacggaaaagaacgcatgcaaaagcccatgagacggaagttttcgatattttgtaataaattaaatattaatatattactcatacttcattcatctttccgtgagattcggcattcagatcaaaagcttgggaaagataaacaagacctcgttccttatcatcctggctggccgtgaaatatgcttgttcaatcgcctccgaatcatgtccgacaatagcgcggcaaaggtcgggagaaaccacgccactggaacgtagaagggaaacaaccgtatgcctcaaggaatgaaaagacttggaagacacccttcgccgatctccctctcctcctctgcaagacaaccttcctgtaataccatgggcgcgaagcaatgcagaaaaattcagcggaaacggccccttggctgcgctggtaggaatccccctgtatcgggaaaacaaacccatcgtcttgacggttttcataccttttacacatgacctgcatcaaagcgggaaacaaaggaatattgagtgtggctccggtcttgcccgtattaatgcgaatgactttctcttcaaaatccacctgctcccacagcatactgacaacatcccccatacgctgacctcccgtcatgattgtaactctgataatatccggccattctccggtaaatcgggtaaccatgcaagcgacatcggcagccgtaaacggttctttctgcaacttgtcgcgtgatgcctccctagggagtctggcatattgcattgggtttttatcaagaaaatcactggcgacagcccgattgaaagccgttaccagagaaccccggtacaatccgaccgtaccggaagaaacccgtttcagttcactatccaggaagtcctgacacaacgccgtcgtcacacaatccaggcgcatgcttttcttctttcccagaaactccagaaacactttaaacgccctcttctgaccgtccgaatatttttgttttcccgtactccggtaatgatccagatactctttcacggagggcactttatccgccacggaaaaagcgctgcggactgcttgcaatgcctgtgccttcccaacattgcctttggctgcacgctccatattgtccgccgtcaactgggccagctttttagcatccgaagatttcattccatccgcaggcttcagcttcactttggtggatttgacgatttccttgccatcggcatcgcgccatttggcaaaccacgttccttttctttctttcaaccaggccataacattgaaatttttcttaggggtacaccaggggtacatcgaggggtacattttgtaccccaaagtgtacccctagccataatgcgctattcggcacaattcaaactaaaactgcgtaaaccgttgctatctaagcacaattcgacacccttaaaaagaagaatttggtcgggaagacaggattcgaacctgcgacatcctgctcccaaagcaggcgctccaccaggctgagctacttcccgtataaaaaagggattaaaaaattgggagaaaaaaatggtggctcgggacgggatcgaaccgccgacacggggattttcaatcccctgctctaccgactgagctaccgagccacttgcttgcacgcagaacgtgtttgcggggcagaatctagcaccgcatctccggtattgcaaccacaaaatatcatttttccaattttcctgcgttttgccgtgtccggcccaaggaagttcttccctgtcaatcaggaggaggcctgagccagaataccgctcagcaacagcggaaagatcagcgccacccaggagagggtgtacagcaggagagggggcatgttctttttcaacctgtccagcacgaacatgaatacccccgccatggccagcccgtaatagatccacgcgtcaccggtgtattcccgggcggcggcggccaggcagaagacgacgtagatcacaatcacccccatccagaccagggaaaccatgtcccgggcggcggagtcctgcccgtcttcctcctcttcttcattccaccgtttgcggctgaacatgctgaggatgaccagggcgacgagataccaggtgggcgtggacagctggccgccccagcctccgcccatcgttccatagaagtaggcagggattcccgctcccgtagaaaaggagacggcggcaaagaatgatgccatgacgaatccggaggacaggctcccctttttgtgcggattggaggaaaagtagaggaagagcaggctgcaaatacccggaagcagggcaaactggaagatgaccacgcccagttggaagaacatgatccatagccccgtcacggccgccaccacaatgagcagggagatgacgaagcagtgctttttggcaaacagcaggcattcatccgagtatgccgcagggcctccccggaatattttaagcacccggtccagcatgttgacgcaccagacggccacaaagaggaattggtacagccagggggtggagactaccaccagatgggactggctgacggcaaaagcccatgcaatggctgcagaaggaatctccagtcccatcagggaaaaccacgcccaccaggggggtctcttcagcacctgctccattttccgttacatcatccccataaccgttcctcccgcaagctcccgaaccgtcattcacaaacttccgcatttttatgcggggatgcttgacatgcaataaaacactcctatactggtgctccccttgcgtcggaaacgcaatacatcaccatgaagaaagatattcatccccagtacaatccggtcgtttttgtcgacatcaccaccggacgccgcttcatcacccattccaccgttcgctcccccaagacggaagttattgacggggttgaacatttcgtggtttcctgcggcatcacctccgactcccacccgttcttcaccggcaagaaccagttcgtggacacggaaggccgcatcgacaagttccagaagcgtttcggcgctgtccgccgcagcggcggcaagcccaagctcaacaagtaaggcttgttcccaacagttttccaaccccgtttcctttccggaaagcggggttttttatttgcaggcttctctttgcccctttttcctgcttcactggcggcagcatgacgttgacaccggaccattttgacaagcagtctgcggagcttctccgctccggccgtcccgtccttgccggaatcagcggcggacgggattccatggcgctgctttccctgctctcccaaatgccggggtgccacctcattgcctgccacgtgaatcacgggctacgcccggaggcggtggaggaggcacagttcgtatgccagtacgccgcctgcctgggggttccctgtgtccgggaacgggcagacgtccgcggcatggcccgttcccgtggaatttccattgaagaggcggcgcgggatgcccggcaggccttgttcctgaaatgggctgccggctatccgggggctttcgtggccctggcccaccaccggaacgaccagcaggagacagcccttctccacctgtgccgcggggcttccggcattcacggcatgtcacccgtttccacctgggccaacggattgactgtcgtacgccccctgctggatttttcccggaaggatattaccgcctacctggagcatctccatattccatggcgggaggattccagcaaccagtctaccgagtataccaggaacgccctgcgccatgaggtcattcccaggctggacacgctgttccagcgagacaccagcctttccttttcacgcgcctgccgcattgagaaccaaatccgcacggcgctttcccaggcgctggattccatgaatctggcagacccccaggggcgcctgttcctgcccaaggtcaaccagcttcccgcggagctgaggcaatgcgccgtgcatgattacctgcgccggcagcatattccggacctgacggaggacgccgtgctccgggtgatgagcattctggatacggacggtccttcccggacttccctgcccggcggcaagctggccgtacgcaaggagaagcgcctgatggtcacggatgcgccgcgcccaatcaataaaggggagcaaccccctgcgggtacagcaggtggaatttaatggcttcattccccaccaccagagcggtgccgaacatcctgtcttcatccgtcagccgcgggagctgggcaatcgggaagagcagccctcccagaatgaggccgtagttgtatacggacggcatcatgcagagcagctttttggagatgtccgcggcgtccagggtcgggaagacccacacgtcactgggctgaagcatggagttgcggtgaacgcgcacgctgtaggagtccggggacagggcggcgtcaatctggatttccccttccacggagatttcattgttcaggcagtccttctgcaccatgctccgggccagcgcggtagcggccctggtgcggtccgcagccagttccggcacggacccggcggtggaggcgctcaacatggcgacgcgaacgcttttgccgagcatgtggcgggccattttggccgtttccacggcaaagtaggccatgttttccacagtgggatcaggggtcaccccggtatccgccaggaagtagatgccgcggccgccagattttttggcaaattcgggaacgagaacgatcgagatggcaaagaggggcttggtaggaacgggttcctgccggtatttgttcacggcgcggaagacggaggccacccttttcatgttcccggccacaatggcgtccgcctggccgtaaagcaccatcatggcggcaaagtggaccggctcggagacgatttcacgggtgttcatgggcaatccgttgccgaacatttgttccgcccgttcatagcgatcgcagaacatttgaaggtccgagcttttttccggctcaatgatgcggacgaatttcagggaaattccgttcatttccgccatcctcctgatgacttccttcctgcccagaaggatgggcacgcctgcctgttccgccacgaagcgttcggacacgcgcagcacgcgaacatcctccccttccgggaaaacgatgcgcttgggatgacgcttcaggttgtccaggagcggtcctgtaaaatcattcagcggggaaaagccttgccaatcactcatatgtcacgtgtcctatttaacgcgactctaaaaaatcctgtccataaaatcaacccataatgtcaaagacggcaaataatcggcaaatacgtcctccgggttgaaccgcccgcgccgccgtgctaacatgggcattcctccatgtactgcgattaccatacccatacccccctgtgcctgcacgcctccggcactccgcaggaatatgtgcaggcagccgtccgcgccggcctccgggaatacggcatttcagatcacgccccaatgcccggggagccttttgacgactggcgcatgaagcaggcggacatgccggcctatctggactggctcacggaggcccgggaatgcgccgcaccgcacgggctgacggtccgcgccgcgctggaatgcgactggtttcccggcattgggccatggatagagcacttgcagagcctgcacgcatgggattacctgatcgggtccgtccattatctgggggagaaggaggagtttgacaatccctacaagatggatttctggaaccggacggatgtggaggacgcatggaggcagtattgggaacgcttccgggacatggcggcttcaggcctgttccacatcatgggccatgcagacctgatcaagaagttcggcttccgcccttccggagatttgcgtccttattacgaaccgtctctggaagccatgaaggggtccggcgcctgtctggagcttaataccgccggctggcgcaacaagtgcgccgaacagtatccggacgcgcagtttttaaagatggcggcggagatgaacattcccctcaccatcagctcagacgcccacaagccggaggacgtgggccgggattttgagcgcgccgcggaactggcccgccagacgggcttcacgcatctggcctccttccaggagggccgcatggagctgtatcccctccccggaatctgaccttcccctttcctctgcgggaagggaatgcttcccggggccgcggcgtctgccgcctgggcagcccgtgccttgagttttctgttccggcagcccgtttgctgcggaggctggcgcacgctttccggaagaagaggaggaacccgcgaacgcactttcaaccaccgtacaagccaggcttcacaggcaaaggcattggacgcggtggaacggggcggggagggacgggatgcggccttggcggcaggggggaaggccggataatgacgggcggcggcggatagttccacgtcctgataatcggagggacaatgatgcgctccgttctcggctggctggccacctcccttacttccccctgcaactgggagacctgcttgttcaagtccgcaattttcttctgggttccgtccttcagagccaggtatttcttttccaaatcctgccagtactgttcggcggtctccctttttttacggatggcgttcacctgttcctgataggttcccatcctcgcacggaaggtacgggcatcctccggcagtcccacgcggtccgcttccagggcattccattgcagggccatgacttccgcctccacctgggagagttcccccagcagcagaaacatgcgggagatatccgctccttccagataacggggatgccgctccgcttcagacagggattccctgattttcctggcttcttcatcagccgcctttctggcctcttccgcctttttcctgcgcgccgcgtcctccaggcgccgctggtccagcctggctttcacgtcctccggcgtcatcctgtaatccttctgctgggcatccgtgagctccttgtaggagaccttggccaccccgtccgtgtactggacgctgacaaagtcgtctccggaagacaccacgctggcgtcttccagcaccctgccggaccgcagggtcatattttccgccagggccgcaggcagcagggcgcacaacatcaaaaaacaggttccaggcttcatatgattctcctcttctacgttggtaagaggcgtggggaaagaaatttattcaaaaaaaatagaaccagaggttaatactggcgccgcggcccggttttcgctagcatcacgcgagtcatttacacatgttatgagtctctattcttcatcctggtcccctttaccctctcttcccgatccggaaggtttcgccggcatgtatgccggaacatgcggagaaacaatgatttgtgccggcggcaccaatttcccggacaaacccatgcttgaaggcggcgccaaaacgtggacggaccgcattttcacgctgtctccgggggagaatgggtggacggaggcaggaacgctccctgcgccttacgcgtacggagcctccgccagcaccagggaaggcctgctgtgcatcggcggctgcggcaaggaaggccaccggaaggacgtttacctgctgagcactgcggacggagccgtcactgtgactcccttccctccccttcccatagccctggcttacacggccgccgccgttctggacggcaaggtttatcttacgggaggctgtgagcgccccggggagcaggactgcaccaaccgaatgttcatgctggatgcgcgccagccggaccggggctggcaggagctggcacccctgccgggccgcggacgcttcctgcaccagatggccgcggcggacggcgtcctttacgtgctcggcggcatcggcctccgggagagggacggcaaacaggcccgggaattgctgacggaagcctggagcttcacgccggaatgcggatggacgcgcctgccggagatgccttacgccatcgccgcggcccccactccggccccggtttcccggaacggcgtgatttatttgctgggcggggacgacggctccggaaagaagtattccccgcagaccaaccccggcttcaacaaccagtccctgtgcctggatacagccgccatggaatggcacgacgcagggcccatcgcggcgcccagggcggtccttccgtgctgcgcgtggcagggccgttttgcagccgtgaacggagaacttcaacccggcaggcgctcccctgaagtgtggagcatcaccctttcctgatttttcacccacatcccatccctatcttccagcatatgcacatttcacgtcaccttacccggttttccagggcatgcggctccgctttcgccgccctgctgctgatggcggcccccgctgccaacgcctctttttccgtggatgtacacccggccggagccattccagacctgccggacccggcgggccgcgctggaatggcggctggaaccgttacggaaagtgacggcacccagtccatcatcgccgcaggcggcgccaatttcccccaggccgctccgggagcctcaacgccggaagaacgcgggcctaaggcgtaccaccaggatattttcaaactccgcaacggccaatggagcaaggcggggacgctgcccgctccgctgggttacgcggcttttgcaagcgtaggcaaggggctggcggtagccggaggccataatgcggaaggcatcctgaaagacgccctgctgatcaaggcggacggctccgtggaaaagcttcctcccctccccgtccccgttacggaagccgccttcgccgctcacggaaacaagctgttcgtcatcggcggacgggacagcgaccagccggaagccgccctcaataccatctacatgctggacaccactccggatacggccaaaatgaaatgggcgtccctcccgcccttccccggtgcgggccgcatcctctctaccgccgccgtctgtgacagcaccctgttcatcgcaggcggctgcaccctgtccagggatgccgccggagaaaccgccagaacgtacctttccgacatgatcggctacgacatgacgtccaacgaccccgccgaatggggagccgcaggcaaacagcagcctgccggaccgggaacgcccgtagctgccgccgcaggccccgccccggtacgtgaaaattccatcatcctcatcggcggggacaagcgcggcaatgcgccggacccgtccaagcccgtggtgcagtcccgcgacatcctggtttatgacgtcatcggaaacaaatggacgcaccagggggagtggcccgtcggcatcgccaccgcgcccgccgtcgtgaagggttccgagatcatgaccatcagcggggaaaccgccccgggcgtccggacccccgtgaacgcctccgcctccgcagggtaccattttgaaatgagcacggttgattacgccgttctcatcctgaccgtcatcgtcatggcgatcatcatcgtttccgccgtgcgcaacggcgttaaaaatgtttccgccgtcacggacccgaacaccaggccgggcctgtgggcctgggtggccgtcatcgtcctgtggttcgtggtcatgctgaactattttgaccgccagctcctttccgcgctgcatgaacccatcgtccgggacatcccgcagacggaagcccagttcggcatggtcacctccgtcttcctgctgatttacgccctgctcagcccggtgggcggcttcctggcggaccgctacagccgccgcctgatgattctctgctccctcgtcgtctggtccgtggtcacctggtggaccggccatgcggaggattacacgtccctgctcatcgcgcgcggcgccatgggcatcagtgaggccttttacatccccgccgccctggccctgattacggactaccaccggggcagcacgcgctccatcgccacggggctgcacatgagcggcatttacgtgggcatggccgtggccggcttcggggccaccatggcttcatggacgggctggcgcatgacgttcgccctgttcggcctgatcggcgtggcgtatgccatcgtcctcatcctgttcctgaaagacccggccaaggcccctgcggatacggcgcaggccaaaaagccgtccgaacccaaggaaaaaacggtcctgatcaatgtggacaatgacgaacgggccatcaaggaacccgcgtccaatctttccaccggcgccgtgctttccagcctgctgagcggccgccccatgtggatgctgctggccgtggtcgcctttgcaggcgccgggaactggttcctgctcacctggtaccccaccctgcttcaggataaatatcagctttcctccgcggaggcaggccccgccgccaccctgtggagctccgtagccaagtacgtggccgtgctgggcggcgccattctggcggacatgtggtaccggcgcaacgcccgcgcccgcgccctggtgcccggcatcaccttcaccatatccggcccgctggtggtcctggctctgctgcccggcatcttcggctgggacattgcggttcccctcgtgctcatgctgggcctcgtcgccacgcaggggctggcgcagggatcgctggacgccaccctcatgcctgtgctacgctcccatatcgacgagcgttattccgccaccggctatggcctcctcaacctcacgtccgcgggcgtgggcgcccttatctccttcttcgggggatggttcaaggaccagggcgttccgctgaccaccaccctggcggcggcaggatgcctgatgctgctctgcggactgctgctcctgatgctgccgcgtcccaaacattaacagcaaccttctttcatatccccaaccccagccttatgaagaatcccgcatgcctgtacctggtgacgggagccctgtgctccctctccttccttcccctcgcgcaggggcgcacctggaccagcgtccaggggaaaagcctggaagccgaattcgtcaggctggacggccagaaagccgtgctgaaacgctccggcggccaaaccgtctccatcccgctcgcccagctttcccgggaagacagggatttcatcgcggcccggggaaagggaggggctgcctcctccaatcccgcggacaattaccacctgccatggcccaggaccgtcaaatgccaggacaatttcaaggtggaaaccatcaaggaggaacaaggggagtatatttatgaaacgccccatttccgcttcatctgcgacgccaagctgggcgccggcatgatcaagcgcctgggccttctcttcgaggccacccacctggcgaacaaaacgcttcccatcggcaacatcccccctcacgacgattccgccaaattccccgcctacctgtacgaaaagttcagcacgtacctggaaaacggaggccgtgaaggcacggcaggcattttcctggggacgacgcgcagcggagaccgcggcaaaatcctggttccgtttgattccctgggcgtcaagaccatggggagcacgtacatcattgaccgcgacaaggattcctccaccctcatccatgaactgacgcaccagctcatgtccccggaggccaagcaggcaagctggttctgtgaaggctccgcggaatacatggggatgaccccgtattccggaggccgcttcaacttcggggccaaccgttcccacattgtctcccgcgtgacggaatacggcaagaaaaatacggggggccgcgctctgggggacgactttgaggcgcccagcctggagtcctacatgaacatgccctattcccagttcacgggagagaacgccaacctgaattacggcctggccgccctgatggcctactatttctaccacatggacggcaagggggacgcccagcgcgtgaagaactacatgaaggccatccagtccggcagcagtgaaaaagaagcgcaaaagctcctccttgatggccggagctatgaggagctggccaaggagattgaacagaaatggcgcaaggccggcgttaaaatccgcttccgctcctcctcctgacctgcgccgcgcatgcggaaagacgcttccgtcaatggccggaggacagtctgtgccctgaaaaaccgttgacatggcagggaaaggcggcacactttccaccagcaggggctatcagacacgcatggcagaagacgcttccataaccgccctgatggacagggtggcccgcaccgcaccctttcaccgggaactcgcgaaactgggcacggaggaacaggcggttttcgaccatacctccctgcccggggttccgttcgtggcggccctgtgcatcaggaccattccggacaccgcccgggcctgggtgatcgcgccccatctgcgcgcgcaggaatcccttgccgcgcaactggaaacatggggagtgcgcaacatcctcttcgtcccggaaaaagaggtggccctgggggaggaagtgggagacccggagcttgccgcggaacggctgaacgtccttcaccgcatcgcttccggccatgtgggcaggcaaaccgtcgttctgacggaaggcagcctgaatgacgaggttccctcccccgacggcatgcagaaccagggaatgaccctgaaaacgggagaaacgcacgcccctgacgatttgatacggctgtttgaggaggcggggttcgagggcgttcctcaggtcatttcccgcgggcagtggtcccgccgcggcggcattctggacgttttcccgctccagtcctctcaccccgtgcgcctggagttttttgacgacgagattgaatccatccgggaatttgacgtggactcccagatttccttccagaagacggagcacgtcaacctcgtcctgacggaagcggcgggcgtggaaaccctgcgggcctggatcaagccgggcgacctggtcattacggcccctttctgcaaggaacgggggaacgtgtgcatcctcaccgcaccgccggagaacgcggagggggaggaggacttctccctggccatccatgagaatcccctgggaagctttgacgccggggactttgtgatgcaggagatgcgccgggagctggcggaacgccagatccgcgaatggctggaccgtaaatggaacgtcagcatgttctttcccaatgaaggggaggaggagcgcttccgggacatctgcgccggaacgcccgcgctgctgtccatcaccgccctgcgcggggacctgcccggcggcttcagcattccgggggcaaaaacggccgttctctcctcctcggagctgttcggcaggtaccagtccgccacggcgcgccgccgcgccagccgggaggacaaggcgcgcaaggcccgcgcgcaggcctccctgaaggacatcaaccccggagacctggtggtgcacaccagctacggcatcggcaaattcatcaacatttccacctctccggactccggagacgaggaaatgaacatcctttaccgggacaatacgatcctgcacgtccccctcagccaggcgcacctggtttcacggtacatagggctgggcagcaagacgccggaactcaacaagctgggggattccaaatggcagcgcgccaaaaagtccgcggaacgctccgtggcggactacgccgcccagctcctcaacgtgcaggcggaacgccagacaggaaaaggctacagccaccctccggacagcaaatggatgtgggagtttgaaagctccttccccttccgggagacccaggaccagctccgcgccatcgcccagacgaaggcggacatggaagccacccgccccatggaccgcctgatctgcggggacgtgggcttcggcaagacggaggtggccatccgcgccgccttcaaatgcgtgacgggcgggcggcaggtggccgtgctggtgcccaccaccgtgctggcggaacaacatttccggacgttcaagtcacgcatgagcgaatatcccgtgcggattgaaatgctcagccgcttcagcagcgcggcggacgtccgctccacgctggaagggctgaggacgggtgtcgtggacatcgtcatcggcacgcaccgcctcatctcggacgacgtctccatcaagaacctgggcctggtggtgattgacgaggaacagcgcttcggcgtccggcacaaggaaaagttcaaggaacgcttcaagggcatcgacgtgctcacgctgtccgccacgcccattccacgcacgctgtacattgccctgatgggtgcgcgggacatgagctccattgagacgccgcccgtcaaccgccagcccgtgcagacaagcgtatgtccctatgacgagcgcatcatgaagaaggccatagagcgtgaactggaacgcggcggccagattttcctgctgcacaaccgggtcaaaaccatcgagctgttccgggaccgcatccaggccctggttcccaaggcccgcatcgtcatcggccacggacagatgcccaaggacgagctggagaaggtcatgcgcaccttcgtgcaggggaaggcggacatcctgctggcaaccaccatcatcgaatccggcatcgacatcccgaacgccaacaccatcatcattgaccgcgcggaccgcttcggcttggcggacctctaccagctccgcggccgcgtgggccgcgcggggcaccgggcctacgcctacctcatgctccccaggtccgccgccaccacgggagacgcccgcaagcgcgtctccgccatcaagcagtacacggagctgggttccggcttcaagatagccatgagggacctggaaatacgcggcgcgggcaacctgctgggcacccagcagagcggccacattgccgccatcggctttgacctgtactgccagcttctccagcagtccatcgcccacatgcagggcaggcacacggccccccggccggacgcggccctgagaacggatttcatcgtgagcagcgagacgcagttcgccgccaaatcccgcaaggattatctgggcgccttcctgccccgggattacatcagcgacgcagccctgcgcatttcggcgtacaaggacctggcggcagtccgcaccctgaaggaggcggacgccttgctccgcgcgtgggaagaccgcttcggccctgcaccggaaacggtgcatcacctgctggattcccacaaaatcaagatactggcctccaaagcaaacatctccatggtggaaatcagcggacagcgcctgatgctcaccaggaacggggattttatcctgctgtccaacaaatttccccggctggcaggcgtctctcccgcagacaagctacgggaagcgctggaaatgctgaagaacatttaaccggaacccgggccatttcctgcaaaaccttcccccctgcccctgacccggcggatgcggggcaatggctttcaagcgcatgcttttcctcccggaagccgcaggacagagaggtgcgcttttcctgccggatttattccctgtaatagaatggcgttccggagcgtattccatcaaaaggatatgtgatgaagaacctgattattctcagcagcatcgccgggctggccatggccggaaccgtcctggcgggagaaccctccgccgccctgccgtccccggacggcctggtcacatggagtctggacgtccgggacggaaaagccgcacactccctgaagaggaaggacaagacggttctggagccctccggcctgggcatcgtggtgaacggcaaggaccttgccggaggcattacgggatggagcgtgaaaaaagtgaaggacaacgtccacgacacctttgaaacgcgcggcaaatacccctccgcttccgtccattttaacgaatacgtggtttccggggataattccggcctccgcctccgcgcccgcgttttcaacaacggagtcgccttccgctacgagtggacggaagacgtgcagaaagcgcccgtgctgaacatcggggaagaaaaaacgtcgttcgccttcccggaaaaagccgtcctgtggacccaggacgccgcttccgcactgggtccctgcgagggagtctggtctccttccagaatagccgatttcaagaaagaccccggcaatccccgcagccatgtccgcaccatgccggttgcggcggaactgccgggcggaggcttcgccctcatccaggaagccgccaatttcaacaggcagtggagcggcattaaattctcccttcaggacggcgcatgcaggacggtatatttccaggacccggaaggcttttccgccccctcttccgcagagatgccctggcgggtcatcctggtgaacgacgacctgaacggcctggtccggaacgacgtcatcccttccctggctccggaaccggataggaacctttttccggaaggagccaaaacgccctggatcaagccgggccgctccacctggacctggtgggaccgcggaaacgtccgtgaagaggaccagtacgcctttgtcgacatggcctccgaattcggctgggaataccacctcgttgacgaaggatggaagaaatggggcaaaaccgcgccggaaagcatggacaaggtggctcaactggccagctacgccgccggcaaacaagtaggcatctgggtatgggtgcgctggtcagacgtcaacaaccccgccaacgactgggaaagcatgcgcagctttttcagcagccttgccaaaacgggcatcaagggaatcaagatagatttcatggattccgcctcccgggaacgcctggccttttatgacgccgtcgcggaaaacctggcgaaaaacaagctcatggtcaactttcacggcgccaatacccccacgggggaagaacgctcctggccgcatgaaatgagccgggaaggcatctacggcggggaacagaacatctgggccgccatcggcggacagcactactgcgcattgcccttcacccggctggtctccggccacgctgatttcactggcggttacttcggccacgggcccaagctgcgcggctcttcctggcccctccagatggcggccaatatcatctatacgtcccccgtcctccactgggtatccaaccccgcagacatggaagccgccttcccgaaaggctccccggaacgggaagccgtccagaacattccctccgtatgggatgagaccatcgtcctgccgccgtccgccatcggggaatgcgccgcctttgcccggcgttccggggaccagtggtacattgccctgatgaacggggacggacgggaacgcaccgtttccattcccttggacttcctgaacaggaacaccgcgtaccgggccaccatcctccgcgacctgccggaaaagaacgacggctggaaggtggaaaaccgggaactccattccgggagcaccctttccttcaccatgcgcgtcaagggcggcggcattgcctgcctggtccccgccggaaagtagcgttcccttccgtctgctcaacgggagttcatcaggaaaggggaagaggctattttcctcttctccctttccatttgaagcggcctttccggaaagggagaattcccatcatttacggcctccggcagtcaccaacttcattacccacggaaagaccggaaaagacggcaaaagggtcagtcctggccagccttctccatggtgctccacgccgggagccactgcacgtcccggaggcggtagccgcgttccagaagagctccgtgcaggccgggaagatgggccgcgccataaaaaatgcctatcctgcgcacgcccttgccgcgccattggtcaaacacttccatgcacttggaattccggccttccagaatcacggtatcctccaaatcattcggagcatgggcaaaaatgcgcatcagttcattcttcagtcccgccttgttcccggcaagcaaatccaccatcatgccgaattcattcggctggtacgccccgggcttctccaccagggaggacagcatggatttaagcatcaggctggcgaagttttctcccttactggcctgcgcctgccggaattccgccagcgtcatgtccgcatggataaaatggggcgcggaataatcaatgccctgatgctgggtttgaaggcccagcgcggcgctcaattcccggtacgcgcttcccagcagccccagcaaaaaagacttttcctcaagggcggctctcttcctccactccaccatccggttccattcccgcgcctcctccagcgtcagccctcccataggcttattgcggtctattttacggcggagctcctcctccctccggagcccctccccgccgatcatttcaaacagcagcacgtcataactgccgaacagcttgttcagccgggcataataatcagcctccgccacatgaatggccccgataagcgccacttccgcgccttcgtcattcacatacgcggccacgggcgtagacaggctctggctgttgcgggacgaggattccagaagcatgtaccgggccggataccccccatgctccttcttccccgcaacggaggcgtccgccgcaagcgcgggagagcacaacaggaacacggccaggaagctgcgcagcattttcatacatgtccagcctagcgcgggccacacgcagagcaagcccaaaaaaggactgtgccgcctttccctgcatccccctctccggaaccggcagccaccggagcacgaacgggttttccttaaaccgcgggaaccggcaaacttccgcagtttccgccgcgtcagcagggagcaaaaaaatccccgcacccggaaacgggcacggggaatgaaaaggttcattcaaggcaccatgcggaaaacgatccgccggccatgaacggttacttctggcagcagcagccacacttgtcggtcagggctcccacgccgggaagcaccttgccttccagcagttccagggaagcgccgccgcccgtagagcagaaggaaagcttgtcctggaccttgaacttcttggccgccgtcacggaatcgccgccgcccacgatggagatggcggaggaatccgccagggcttccgcaatttccttggtgcccttggcaaagcagtccatttcaaacacacccatcgggccgttccacagaacggtcttggcgtccttgatgatggcggagaattcttcaatagccttgtcgccgatgtcgatggccatgccgccttccggcaccttgccgccttccgcgaagggagccgtgcagaaggtttcagcgccgtcttcaaacttcatggctacgcgcacgtccgcaggaagcaggaacttcacacccttggccttggcttccgccaggatttcacgggccaggtccagcttgtcgccttcaatcttggaagcgcccaggtcatacccttcagccgccaggaacgtgttggccatggcgcccccgatcaggaacgtatcagccttttccatcagcttggaaagcacttcaatcttgtcggacaccttggcgccgcccatgattaccacgaagggcttttccgggttttccagcttgccttccaggtattccagttcgcgttcgatcaggaagcccatggcgctcttttccgcaaaatgcgtcaccccctccgtggaagcgtgggcgcggtgggcggtgccgaacgcgtcgttcacgaacagcgtggcattgcccagaagagccttggcaaattccggatcgttcttcttttcgccgggatagaagcggacgttttccagcaggaccacgtcgccgtccttcatggcggcgcgggcggcttccgcttccgggccgatggcggcgggaacgaatttcacttccttaccgagcagttcggaaaggcgggcggcaacgggcttcagggaaaaagcgggatcgggttcgttcttgggacggcccagatgggaggtgaggacaaggcgggcgccctggtccagcaggaacttgatggtggggagggcggccacgatgcgggcgtcattggtgatttccccatccttgagggggacgttgaaatccacgcgcatcaggacttcctttcccttggcatcaaggtcacgtacagtaagtttagccatatcggtttatattgtttggttcaatggaataaaaaagggagggcatttctgccctcccggataaatccccggccgcctggacaaacccggttcaggaaccggaaggttgaagcaggcaaccggcaagacttgtcgtgcaactgaagagcaagcgttgttcagaagaacttacttgccgcaggagcagccgcagctcacgctgtcgcccagcttcttcatggcttcagcggcgcggttggagtagccccattcgttgtcgtaccagccgcagaccttcaccaggttgccgccgaccacatacgtgaagccggagtcaaagatgcaggagtgggggtcggaaacgatgtcctggagaacgagggcttcttcagagtaatccagaatgcccttcagcgggccttcagcggcttccttcatggcggcgttcacttcttccacggtcacgttcttcttgagaacggccacgaagtcggtcagggaaccggtcggggtcggcacgcggaaggaagcgccgttcagggagcccttcaggttcggcatcacttcgccgatggccttggcggcgccggtggtcgtcgggatgatgttgatcgcggcggcgcgggcgcggcggggatcggagtggggaaggtccaggatgcgctggtcgttcgtgtaggagtgaatcgtgctcatcatgcccttttcaatgccgaacttgtcgtccagcaccttcaccatgggagcgaggcagttggtggtgcaggaagcgttggaaacgatgtcgtgcttggcgggatcgtattcgctgtcgttgatgcccagaacgaaggtcaggtcaggatccggggagggagcggaaatgagcaccttcttggcgccggcttcaaggtgcttcttggcggcgtcacgcttggtgaacaggccggtggattccagaacgacgtctacgcccagcttcttccagggaaggttggcggggtcgcgttccacggtgatgaggatcttgtgaccgtcaacgaccagatattctccatcaatggaaatttcaccgtcaaacttgccctgcgtggagtcatacttgagcaggtgggcgatcatttcaatgggggtcaggtcattgatggcaacaaccttgttgcgttcttccttggacatggcgcgcagtacgttgcgaccaatacgtccaaaaccgttaatagcatatttggccataagattgagggcttcagatttgattaattactagtcccggacttatttaagtaccatggacgccgtaagtttaaaaacgattcaaccagccgtcaacactattgttcccccatcatggcagtatgctcccgcgcctgcgcggaccgcgggaagccctgcccgcgggcatgctcccgcatggaagtcaaatgcttgcggagccggtccccgggtggggaagacggtcagttcatggagcgcagggcggcgcggatcagttcgtccgcatccgcgtccggatggtctttcaggtgggcggcgatcgccttgcgggactccacctgcttgaacccgagcgcaatcaacgccagctccgcatcccccgctgcctgggaggtggcgccctgcgcctgggcctcccacgtagcggccagtcccaccttgtccttcagctccaggacaatgcgttccgccgtcttcttgcccacgcccttggcccgcgcaatgccggaaacgtccccgctcaccaccgcctgcttgaactgctccacggacagggaaccaagaatggcgatggccgtggcagggccgatgcctgaaacgcggtcgatcagcagcaggaaaatgtcccgctccgcatccgtggcaaagccgtagagcacctgcatgttctcccggacatgcaggtaggttttcagcgtcagctccctgccgggaagagggttcagcctgtcaaaggtggacaggggcacaatcacctcataccccacgccatgaacatccagaatcaaccgctggggatatgattccgccaccgtgccgcgcagaaaagctatcatgcccataacgtgacacaatccggcccgcgctcaagccaaaaacgcatctgcggaaaccggccccatcatcttttctggagcacgtgcagcctgatatgctccagatcctcccggtgataaaaacagcgcacccggaggccgcgggcggtcttcatccggcaccggtattcgcgcagcagcccctttttcacgagcctgtaaatgtagctgcgcaccacccccagcatgtcgatagcctcggccatgtccatgtagcacggtgggacgcggcggcgtacaggctcccgccgggcgagaatccggtccacatccgcacgccgccagtacagggccagggaacccgtccccttgcggaccacgcggaagcgggctccgtgacggtgcaggtactggcgggcggcggacgcgctgcagcagagccgcgaggcgatggaggacgtttccacgaacgcgctgcccgcttccgcataaggctggccggatttgggattcgttccccgacggcggattttcacatgttccgggaagctcagcttgggattgttaatgtattcccgtcctcctactccgatgaatgttttcttaaaatggtatatcatggttaatgagtttttacattgggattgcgaagctccatgcagacattccgcacgaaactctaacatttttggaagattccaaaaatgcattgagtccaagaatgttcaacatttttctttgtttttctgttttttacattcatactgaactcatttcatcgcaatatatgcccggaggccgtatcagccaatcacgggaaaagggcctacgcccccggcggaaacagcatgttcctcaactctttccgccccgcaggccttccgttccggtgaatacagaggttcacgggcacagggaaaaaaccccttccaccagcgtttttactggcgccgtacggttcaagggaaaacttttttcccgctatgattctaccatacggttccacgcatgcacggcccatttccagaaaaggacttgggaaatttcatgaaaggccttccgcgttccatctccccaccagcctgttcccatcccggacgccgtcccacgtgtttcttccggcatttcatggattttccgggaaccggggcaataaaaaacccggcttccctatggaaagccgggcatgaaaaaagaatgtttcagggcaggagcttcgcgggccgcccttcaaaaatcccgcgctggggaacgaagatgcggtcattgggctgaatgggaatcgccctgtccttgatggagaagtaatcgtacgtcacggtttttccgccgcgcgtcacctgcacgtaccgggaaccccagtccgtaatgtcgcccgcgcccacaatcgcttccagaagcgtcatgccgcgccgccacaggacgtttttcttcatggctacgccgccgctcaccagcacaatgtgctccgtcagccgcgcgtccgaactctgcaccttcaccagaaaggtgggggccgtgtacaattccgccttcttataggcggccatcagcatatcttcaatctggcgcgccgtcttgcctaccacgcgcaacacgtcgtggcccggcggaagctggggcatgcgtatcgtcccgttgccgtccagcagatactggccggaaatggccgtagcgtcatccgcaggaatgccgcgcacctgaatttcaatggtgccctgcgcaggcacggcgtccggagactgggcggacgccagccccgccgcacccagcaagaggcaaaggagggaacaaatgtattttttcatggagcaatgggttagtacagatcttcactatcatgggactgggtggccgccagctccttggcctttccggaacgctcggccttcttcatggaagaggcgtccgcattctcgccagaggaaccgccatccgcagaataataggagtaataagtcgtgtaatactgatactggtgatcggacgtgatgtccacattattcatcaccacgccggccaggttgccgcctacggattcaatcacctgcttctgcctcagcagggctttcagcggcagtttgcggggctgaacgaccatgagcgtcatatccacctcgctcacgatgacggcggaatcactgacgccgaggatgggcggggagtccaccagcacgatgtcaaagcgctgcttcacttcctggagcagttcattgaatttgcgggaattcaacgcgcccgacgggtcgaagggcgtggggcccgcaggcatcacgtacaggttttcaatgggcgtctggaaaatcacttcctccagcgggtagtcttccagcagataggaggtcagccccacttcattgtccagttcataataccggtgaagcttggagcggcgcaggtcggcgtcaatcatcagggtggcatagccgccctgggcgcagatataggccaggttgcacagggtggtggtcttcccttccccggcactgccggaaacaaaggtcagggaaatttcctccaatccctttttattgaattctatatttgttcgcagaatacggtaggcttccgcgtccgggcccatcacatcggaagaatgaaggatcggcacattcttggggataatgcccagcaccggaacctgcagggcccgttccacgtcctccatcgtcttcacggaggtgtccatgaattccagcagcagggccagcccgatgcccagaagcagcccggccccggcgcccaccgccaggttgatggtcacgttcggcttgtagggagcggcaggataggtcggaagctggtacatttcaatcgcttcacggggaacgcgcagacgggcgatttcatccttgtaccgggaatccaggtccttgagctggtccagcgcggcgtcataatcacggctggcctgttcatacatgggaacctgcaggacatgcttctggagagcttcctccttttgagcgacggtcgcctcccagtgcttccggcttgcggaaaccatttccagcttgcttttcagggaggagcgcagcccgatcagctccttgttcagcttctctcccagaatcctttccgtctccagcagcgccagcatcttggggtgcctggccccgatgttctgggctttcaggttttccttctccttgagcttgtcggaaaattcggcataggtttcacgcagggccttggctcctacggattccgcattcagcaggtcggaactgatgacgtaatccagcagcttgtcgtcaggcagacgctgcagttcctgcacgtaggaagccagttccttttcatccttttcaaactgcatggcctgggatttggcgttccggaagtcttcctcttccatgccggccgtcagagtgctccggttttcaccgtttctccaggtagtgggaaggtaggagctttccgcaatcagcttcttgagggacatcatcttttcattgacggtatcctcctgttcccggagaacgtccttcaaacttttgatggcggtttccaccaggcggttttcacgcatttcacggtcctgcttgtaagcctcgggaaccgtcttggcgatgttctgcaccagtttgggatccgggccggagacaatgacgtccaccaggtccgtcgcacgcacgggagccaccttgatcatgccggccagattggatgccgccatttcatccgtcatgccccattccgcggcaagattcagcttcctggacaccaccttcagaacttcagtggaagtcagcacggaatactgcatgggaatgtagttagccgtcacgttggaggaggcgaccacgtcccccccctggccgatttccatcacgggcttgggcagcttgatctggaactggctcgtcgcccggtaggagggcggcatcaggaaagtcactaccacggaaatgaccagcaccagaaggaagaccaggaagacttccttccagcgattttttaaaacttgcaaatagtcaatgttgcgtacgatgcgatcactgttctgctgatcctgggcattcatgaaagatagtgaggtagtaagataaaaactcctctaattgtgaatgaacattcgcaattagaggagtaaggacattaatggtcagtcaagacttagaagctgtaattcacgccgaaggagaacacgttgcggttgtaggagggcatcgggtagttatagccgccgtaggaaccgttggtgtaggagtactgggccgtaagagccagcgcattagtcagcagcagcttgatgccggccgtagcattgaaggtcaggtcagacgtatcactgttgctgccggagctcaggcggctgtactcgctggaaatcaggtttacgccgcagttcaggctggcgcggtgcgtcagtttcagcgtgctgttcacgccgaagcgccacgtttcattggaatagtaactggcaccgctgtagggaatgtacgtattcgtcgcttcgttggagtagcggatgaacgtgccgatcatgaagcggtcgctcatgcggtggttcaaaccgaattctgcggaaggataggtcctggtaccgtagctttccacatatttgaactggggacctacgcggagcgtggcggacgtattttcagccacagcgtattcagcgccggccatgacgaagttggagaattcgttgttgccgtattcgcggtcacagtaggaaccgttccagctcagggaaatagccaggcgttccgtccacttgtagcggttggtgaagtccatgcccacatagtcgcggttgtccgtcttggcggagtcctcctgatagttgatcatggagaagttggcgcccagcgtggtggagtagcgggaggtccatgccttgctcacggagctggagacgtacacgtaaatgtagtcgccgtcccggcgggcgttggcaatgccgttggaatagttgggttccggctgccacgcaaaggacacgctgccgttgtagcgcagggtctggtcaaagctgtgggaaagattggcggagagcgtggagttggaaagtgattcgttcgtctctccctcaaggtccttcaggtaaaagatacccccaagcttggcggagaaggagtactgggtcacggaatcgtagttggccagggaggcgccgatgtccgtgctgatgaaagcggcttcctgctggtcatagttggaagcgttgacgttgtcgtcataaccgccggccagattgaatgtccacttcaggggaagggattcttccagaccgaccggtcctgccagggtgtacagggactgcccgttggcatggacggcaagcatgccggcagccatcaaggagagataaaaaagactcttcatgctattgataaatggatcgggttaatttccggcaggattggagatgggagcggggcttgtagcagagccgcccacgggaagaccgcccggcaggaccagggcccctccggatgcttcttcaccaggcctcaccagaccgctggtctgagtggtcaccccttgcagaggattgtcaggcgtctgggccgccacgcccacggcaatgccgggaacggcattggctaccatggagctgcccagagctttcgtaaccgcttccgagatgggagaaacggacgcatacgggtggggctgcacagccacagcagaagcaatcacgttgcgtacgttggcttccgttacctgggttccatagcttttaacggcggcggaagcaacagcgggcgcgctgcccgggaaagcacctgcggccatggataccagggagcccatcacctggtcagacacgccagccttgacagcggcgttcagaatctcggtcacggctttcatatccagggcgccggctttcaagctggcctgaacaacacctgccatttgattcataaaagccttttcaacagcagaggctttaaccttattaacagccggaacggctgccggagaagcagtttgctgagccacaccggggagggcgcccgcaaacgcaagtgccagcgcactgagcgccgtctttgtcatgaacctggctttcataaaggaagtatctagcaggtgaatttaatgaaaaaatggagcgggtaacgggaatcgaacccgtgtgatcagcttggaaggctggagctttaccattaagctatacccgcacaacagaggcattatgttcaagcctcgggggtaagacaagttttttttcatttctgtgttaaaatatcaaaaaagaagacacgatttttctgtggtcttgacatacctgccttctgccgctaaataggcatccgcatttcatgcgggcgtcgttcaatggtaggacgcgagcttcccaagcttgagacgtgggttcgattcccatcgcccgtaccacttttataccgcaagcaattgttcctcaatgcttgcggtttttatttacactttaaaaagacgagcattccggaggctttcgctttccggaaaataaattttccccattcccgcttcccgggtattccgggagaatttccggataaggaaacgccgttccctcttccgctgcgccggaagcagccgcctccggcgcagccgtgaattacaggcctttaccagccaagaacaaatttccgctgaattttcgccaaaagaagaaccttgcggatcatcgtgcgggtttcattaaggaggttgaggtagaggagcgcccgccgcatgtcggatacgtcctccgcccgcaggatgatctgctgcttgaccgcctccgcaaattcctcatccagcgcgtccatgccggccaggcattggtccagcccggcatagtcattgctttccatcatttcccggaaacgggggtacagggaggaaacgcggttgttcatccccctcaagtgctctatcctgtccatgtccagcccttcatggttgttgtctatgtaggcatggctggccgtggtgatgttggagagggattcaaagacggaggtggcgtattccaccatctgcacgtagcgcttgccgcggtccgcctcttcatccgggagttcccggacgacgggcatgacttccatcgccatccggtcgctcagggagcggcggatgccgcgcgcttccttccggagctttttcagccgcttccggtcctccacgttcagggcttccaggttcatttcatagatttccgccatgcgtttcatcagctcaatgatttcttcattgtagcgggcggcgcaggccggatcccggtaattggccaccttcgccagcgccgcggcctgggttctttttttatggagcctggagcttttcagcagcaggaaggcagccagggcgcacatggcgacaatgccgaacaggcctccgtaaacgatgcacgccgccaccatgcagcacatggtgaatgcggcaaaggccgtaaagaaccacccggaaatcaccgtaatcacccccgtgatgcggtacacggcgctgtcccgcccccaggctttgtccgccagggaggaacccatcgccaccatgaacgtcacatacgtggtggaaagaggaagccggagggacgtagccagggagatcagcagggcggcgaccgtcaaattcacggaagcgcggatcaggtcaaaggaggccccgttatccgggccgtccggcacgggctggaaacgtttttcaatgaatcttcccacgcaggcgggcatgattttttccaccgcgcgggaggcgttcaacgcatagcgcacggccatgcgggccggggggacggagccgaaccgctccacgcccccgccctgcctcgccaggttgacctccgtatccgtgacggtctgcgcctttttggagaacatgagggccagcaccatgatgacgcccgcgcccagcaggtagcgccagtccgccgtgacgggggccatgaggccgcccatggtgagggtggaaaggtccgcgccctgcgccgcagcggcggacgctatctccatggaagactgccccgccatgaaaacgccgatgaagttgaccaggtcgtttccggcaaaggagagcgccagggccatggtgcccgccaggacggatattttcaggatgttgattttgcaaatgttctggagaacggccatcaggacggtccagaataccaggctgcagcatacgtacagccagatgtgggcgtccagatggcgcatcatgtccttggtgaccagcgtactgcctttcagccccttgaagatggcgaagtaggtgatggccgtcagggccaagccgcaccagacggcccccaggtatttgaatgattttttgtagttgaaggagaagatgaggcgggaaatccacatgaccgttatcccgcaaatgaaggcgacgaagacggaggagaagatgccggagatgatcgccagcgccttggaggagttgatgtagctggacagttcctgcgctgcgcccggctctgcggaccagattttgaacagggcaaccgccacggcgccgcccagcagttcaaagacgatggagaccgtggtggaggtgggaagaccgaaggtgttgaagacgtccagcagaatcacgtccgtcagcatcaccgccaggaatatcagcatgatgtcatggaaggtgaactgggccggcatgaatacgccgcttctggcgatttccatcatgccgctggagaacagggagccgatgatgatgcccagggcggccaccagtatgatcgtcctgcgcggcgcggccttggaaccgacggcggagttcaggaagttggcggcgtcattggagaccccgacgacgaggtcaaagcaggagagcaccagaatcagccctatgatgaagtaatagattgggtccataagcgtaataaacggccctctattacaggaggccgcttccgcacgcccgttttaaaacgtgaacattccgtcacattgatgcaacaatatgattttcaataaaaaccatagcgctacacctgcttcccgtgaaatcttccgtttcttccgggtacttccggagcctggttttcctccggttctccggcagccacggcccatcttcctgaaatcccttcccgcggagtggcggctgccgccttccatacaaaacaaaaaggccccccggaaaaccggggagccttgaagtcgattgcagtgtctcgcagaaacggacgggggcttacatcatgcccatgccgcccattcctcccatgccgcccatgtcgggagcgccggagccgcatccgcagcccttcttctcgggcttgtcggcaatgacgcattccgtggtaagcagcaggccggcgatggaagccgcgttctgcagggcggaacgggttaccttggtcgggtccaccacaccggcggtgagcaggtcttcatatttgtccgtggctacgttgtagccgtcagccgctttcttcatccccttcaccttggcgacgatgagggcgccttcacggccggcattgctggccagttggcggagcggagcttccaccgcacggtagacgatttgagcgccggtttcctcgtcgccttccagcttgagggtgtcaatggctttctgggcgcggatcagggccacgccgccgccgggaacgatgccttcttccaccgcagcgcgggtggcgtgcagggcgtcgtccacacgggccttcttttccttcatttccgtttccgtagcggcacccacatggatgacggccacgccgccggccagcttggccaggcgttcctggagtttttcacggtcgtagtcggacgtggtgtccttgatctggtggcggatctgggagatgcggccttcaatgtccgcagacttgccggcgccttccacgatgacggtttcatccttggagacgaccacgcgcttggcctggccgaggtcttcaatgcccacgttttccagcttgatgcccaggtcttccgtgatgcacttgccgccggtcaggatggcaatgtcttccatcatggccttgcggcggtcgccgaagccgggagccttcaccgcgcagatgttcagcacgccgcgcaggcggttgaccaccagggtggcgagagcttcgccttcaatgtcttccgcgatgaccaggaagggacggccgctcttggccactttttcaagcagcggaaggaagtccttcaggttgttgatcttcttttcgtggatgaggatataggggttttccagcacggcttccatcgtttccgcgttagtcacgaagtagggggacaggtagcccttgtcgaactgcatgccttccaccacgtccagcgtggtttcaatgcccttggcttcttccacggtaatggtgccgtccttgcccaccttgtccatggcttccgcgatgatgtggccgatttcggcgtcccagttggcggaaacggtggcaacctgggccacttccttgctggagtcaacaggcttgctgatcttcttgagttcttccaccacggcgtccgcggccttcatgatgcccctctggagggagatggggttggcgccggcggtgacgttgcgcaggccttcgcggtaaatgctttcagccagcacggtggcggtggtggtgccgtccccggccacgtcgttggtcttggaggagacttcccggacaagctgggcgcccatgttttcaaacgggtcttccagttcgatttccttggcgacggtcacgccgtccttggtgatgaggggggaaccgaatttcttgtcgatcaccacgttgcggccggcaggccccagcgtgctcttgacagccttggcaatctgttccacgccgcggaggagagcctggcgcgcggtttcgtcaaattggatttgtttagccataatatcaggttattttaaaatgatgttgagtgagtgtgtcgtgtgatttagccaatgatggccagaatgtcgttttcagacaggatgaggtagtcttctccgtccagcttgatttccgtgccgccgtacttggaaataagaacgtggtcgcccggcttcacggtgaattcaatcaaggcgcccttgtcatcgcggccgccggtgcctacggagatcacttcggcttcctggggtttttccttggcggtgtccggcaggaacaggccgccggccgtcttggtttcagcttcaatgcgcttgaccagcacacgttgtcctaggggtttgatgtttgccatagtatgttgtttttgtgttgttatagatgaatatatggatgtaatgttccgccggaggggaagttgctcccccctccggcgggaaggggttgcttatttgtcgtcgtcgacgatttcggcgtccaccacgcggcctttcgccttgcgggggccgtcggaagcttcttcctccggagcggctcccggcatggggccggctgcaccggcggactgctgggcggcttccgctgccttgtaaagggcttccagacgggattccaggtcttccttcccggccttgatcgcggtgtattcctttttggagatggcttccttgaggtgcatcaccttgtcttcgatctcgcgcttgaggtctgcgggaatcttgtcccccatgtccttgagctggcgttccacggagaagcagagggagtccgcctggttgacggtgtcaatttcctcggcgcgcttcttgtcttcttccgcatgggcttccgcatcacgcttggcgcgttcgatttcatccttggaaaggccgctggagccctggatggaaatcttctgttccttgccggtgcccttgtccttggcggagacgtgcagaatgccgttggcgtcaatgtcaaaggtcacttcaatctgcggcacgccgcgcggagcggcggagatgccgtccagcttgaagttgccgagaagcttgttgtcctcaaacatcttgcgttcaccctggcagatgcggatgtccacggcgggctggttgtccgcggcggtggagaacacctggctcttgcgcaccggaatggtcgtgttgcgctcgatcatcggcgtagcgatgccgcccatcgtttcaatggacagggtcagcggggtcacgtccagcagaagcacgtcgttgacgtccccctggaggacgccgccctggatagcggcgcctacggccaccacttcatccgggttcacgcccttgtggggttccttgccggccagcgtatgggccatttcctgcacggcgggcatgcgggtcatgccgcccaccagcaccagttcgtcaatgtccccggtcttcaggccggaggcggcgatgcagtccagcacgggcttgcgggtacggtccagcaggtcttccgtgagctgttccaacttgggacggctcagcgtcagctggatgtgcttgggtccggaagcgtccgccgtgatgaacggcaggctgatgtcatagctctgggtggaggaaagggcgatcttggccttttcagcttcttccttgatgcgctggatggcgtccggctggttggaaagatccatgccggagtccttcttgaactcgtccatgatccaggtgatgatcgcgttgtcccagtcgtcgccgcccaggtgggtgtcgccgtcggaagccttcacttcaaacacgccgtcaccgatttccagcacggaaatatcgaaggtgccgccgccgaggtcgtacacggcaatgttttcattggacttcttgtccaggccgtaagccagggcagcagccgtcggttcattgatgatgcggcgcaccttcaagccggcgatttcaccggcggccttggtcgcgttgcgctgggcgtcattgaaataggcgggaacggtaatcacggcttccgtgatcgtctcacccagcttggattccgcgtcggccttcagcttggccaggaccatggaggcgatttcctggggagaaaaagtcttcttttccccgcctacgtccacgcggatataggcgtccccgttgggggcctccacaatttcataaggcaccttcttatcttcttccgtcagctcgctgtacttgcggccaatgaggcgcttggaggaaaacacggtgtttttcgggttggtcaccgcctgacgtttggcggcctgccccacgaggcgttcaccgctcttggtgaaggcaacaatggagggagtggtgcgcgcaccttcgctgttttcaagtacggtaccctgaccgccttccatcacagccatgcacgagttggtcgtgcccaagtcgattcctaatattttagccatatcgttatcttagattgttttaaatggatttcgttgagatttgatttccccatgacctgaagtgtcatgcaggcaaactcatgttcttgcctctctttctgcaaatggcatgccagccttgtaagccctgttgaaaaataaacataaacaacataaattcatcgtattataacatcgcatcatttcatcggctctttttcctgccgagcagcaatgggacattttgtcacaccaaaaagagacaaaatgtcacacgcggccattttgtcccactccctccggacagcctgtccccggcgcccgtcacgaagcctccttgcaggaggaagcttccgctccggctccggttccgcatttgccgtaagccaggcgtttcatgaaatccttgtaaagcagcgtttccatgcggccgtccccgtattccaccaccgcgctcatggtttccacccagtccccgcaattcaggtaccgcacctcccccaccatggtatccgccggatgatgcacatgcccggcaatgataccgtcacactgccttttcaccgccagattctggagctgctcctcatatttcccaatgaaattgacggcggatttcacgcggctcttgatggcgcgggagacggaataatattccctgccccgccagacgcggtatttattgtaaagccggttgaccgtcagcagaacgtcgtagcccagggagccgagcatcgccagccaccggtggttggtggagatggcgtcaaaaccgtctccgtgcacgcacaggtaacgcctgccgtccgccgcccggtgcacgcattccctggccattttcaggccgcccagatgaaagggaaggaatttttccagaatatcgtcgtggttcccgcgcaggtacagcacttccacatcctcctgctccatctttttcagcagggtgcggatcaggcgcgtatgccgcctgcgccagcggctgccgcgggagagggcccaggcgtccacaatatcccctaccagaactattttttccgcacggacatgcttcaggaacctccggcattcgtccgccttgcaatccttcgtgcccagatggaggtctgacaaaaagaccgtgcggcattccagcaccgcatcccgcggggggcgggcgtagccggttccgttctcctcccgcgccacggaagccagcagttcttcaaacctgtcatggatggaatcccacgctctggcgcgcacggtcctgcgggcctgttcgccgagcctccggatcatccccctgtcctccagcagacggcgcatggcggagtaaaaaccctccgcgtcccccttctccgcctgaaggccgttgatgccgtccagcaccacatccgcggaagcggcgtaccggtagctgaccgtagccaggccgctggccatcccttccagcagaacgttcccgaaggtctccgtctcactggcgaagagcagcacgtccatggcggcgtaatggcgcgcgaggtcctccccgctgcgcattccgcaaaacacggcgtccggaaactcactgcgcaggctgctcatcatgggaccgtcccccaccacgaccatcttcatgccgcagtccgggaactcccgctgcaggcgcgtgtacagtcccaggactgtcaccaggttcttctcccgggccagacgccccaccacgccgaacaccacttcatcccgccaggcgccccatgactggcgcaggccggcatccctcctggcagggtcaaacaaggcggcatccaccccgcgccccattacggagaggcgttcaaatcccagcccctccagcgcgcggcgcatctcctccgtgggaaccaccgtcatccctgcacggttgtggagcttgcgcaggtaattcacggcggcggtttccagcccggagaaatggtaatccttcatgtactggtgaaaattggtgtggaatcccatcaccacgggaatctccagagcgcgggcggccttcacggcggaggcccccatggggctttccgtggcaacatacaccacatccggcctcttcttcatccatctggagcggaacctgtctgcggaaggcagccctattttcacctcatgatacatggggagggagagagacggcatggccgtctctccgggaacggaagctccgtccctcccggaagccctcagcacatgcaccagatgcccccgcgtccgaagtccccggaccagccgctccagcgtcagggccactccattcacgtcaggttcatacgtatccgttgccacatcaattctcatgcgccggcaccatgggcagaaaggccttcccaggcaagctgaggagggaaacgaaaccgtcacaggctgctgtcatccgtccccgtccccagcaggagaaacaaccgtgccggacagattccggcatgtccccccccccccgcttttcctgcacgggaaacggaacagaggaggcggcctcccccactccctgtttggaaggtgccgctgccaaaaccgcacatttccgtaaaaaaacagacgaatcattgaatatcagacgctctgaaactacatgcggccatccgcgcattataaatccgccgtcaaccaaattttttgagaaaaaatgattttcatcgtatccaggacgggaaaaatcacaatggaatccaaaggccgtgaaatctgatattcttattatccattgataatgtttctattatttattaaaaaaattattccttcccgacagccggatttataatccgccaaaatgcatgcatacgggatacataaaacggaaatgaaggaatatttagaaagatttttaataaaaataataatgattcccatgttctgaaagccgggaaaacgtggcggaacgccggatgcttatctctgccttttcccggtccggaaaccgcagccggttatctccttcattgctcctgatactcttacatattatccttcaacctgctttaaacaccccggattaggaatccggatgaaatggccgacagcgctaaaataagatgaacaatcattatattcaagtatttatgctttattctaacaaacatattttatcaaggctttcgtctaggaaaatactggattgatttggagaaacaggcttgatatgaaaaactagtattgacgccggattcctaattcgctattgaaacaaccgacccccatcccctaccccattcccccaatgaaattgatagattgctatcgctatgcagccatgctttatgcatccgcctgctgtaccgcctcgccgctttacggccctctggaaacaggcttgcaggaagcccagcttctgagttccctgaaagcctgcaaatccctggaaggtccgggaacggacgcctacctgagccgcactggattgaacggcgcctacaaaacgaaaaagcccattggcggccttttcttttcacttcattttgagtacaacaaggatggaggcctgagagccgtctccttttactccagcaccaaggcaggcaaggacgaatacgatacgcgcctgaaatccctgtacaagcgcatgctgaacgggctgacgggcctctatggcccgcccatgaatctgccggactggattgagaaggagtccctgcccgcggaacgcgtgctgtacatgcacatgtggcgcattcagccgggctgcttcctgatggccggcctggccaacatgggggcctccggctacattcccgttttccggatttccccgcctgccggcatgccgcccaagtccaagaaggacagggacaaactcaaatccgaatgggccgccattcccgaattttacgaattcaccaaggcggaacgcttcctggccaatgcggtgttcgccatgtcccataaaaaatatcaggacgcgctccagctcttccagaaagctgcagacctgggcagccccaacggatactggggactggcctacctgtaccggctgggacccgccggcgtggaaaagaacgcgagcctggcggatgaacacaccaaaaaagcggccctgatgggatttgcccgggctgccatgaaattcggaacaacatgggagcaattctgcaagaaccaggatttcaccgaagctgaagccagggaatggcagaacaggaaccttcgggccgccagggccggctatgcctccgaacaatacaacctgggcatcatctaccagcacggcttcggcgtggaaaagaacctggccaccgccagggaatggctggaaaaggcggcctcccaggaccatacccaggccaaagcggcattaaagacgctgccggacgccggagccggaaacgcggaactctcctgaccatcttccaacaaccaactcccccaataccaagccggctgtagcttctccggaagtacacgcagccgctccggcaaatccctatgaaatgccagaccggcagggaggcggccccaaccgcttccctgccaaaaagccggaaatgcaacgccggcggaaaccgcgggaagcatcagcaaatgcggggcagctgcatcccggaaggcatgcccagcacccgttccacccccagccgccccgtcatcagcaggggcgccgttccaaactcttccacacggcctatcgcgcaggccccggcggacacgccgcagccgcgcatcaggcgcagggcctcttcctcatgctcccggggaagaatagccagataacggccttcacaggccacttgaagagggtccagccccagcaggccgcaggctgctctgacatcctcccgcacgggaatggacacttcatccagtttcaccgtcaggccggaggactccgcaatttccgagagcgtggcggttaacccgccacgggtcacgtcacgcaggcaatgcacggggattccggcccggacgacggcagccacggattcatgcagcggggcggaatcactctccagtccctccccgaaggacaacccggcccgcaggctcatgatcgtcatgccgtgcctccccagatcaccgctgaccagcacggaatcccccggacggacggaagaagggctgatttccaacccatggcgcaccacgcccgccccggcggtattaatataaatgccgtcaccctttccgcgctccaccacttttgtatctcccgtcacgatgcggacgcccgccgcgcgcgccgccgccgccatatcctgcaccacgcggttcagcgcctccagcggaagcccttcttccaggataaagcctgccgtcaagtacaacgggtccgcgccgctcatggcgagatcattcaccgtgccgtgcaccgccagggaaccgatgctccctcccggaaactccagaggctgcaccacaaagctatccgtggtcatcgccagccgccccggcggaaaatccagaacggccgcatcattctgcacgccgccggagggagtgccgaacgcgttcagaaagacggaacggatcaggtcattcatcagacggcctccaccgccgtgggccatctggatacggtcggaaacaggttccggaacaggacattcaaacatggaatcaacttcttttataacggtaataggcggcgcaggccccttccccagacaccatgggcgcgcccaggggggccagcggcgtacaggacgtgccgaaaaacgggcactccgcaggacgaatcagccccctcagcacctggccggccaggcatccggaagcttcatccgcgccatgggcgctttttccgcatccgaaacgcagggcggcatccatgccctcccactcccggcgcagcctcatgccgccgccgggaatcagacccaggccgcgccaatggcggtcttccggctcaaaaacctctttcatcctttcctgcgccgccctgttcccctccggcttcacatagcgcccgtaggcattctgcaccgtgcaccccccgttctccaactggcggacgcacatcaggatgccgaggagcaggtccggagcctcaaaccccgtcaccgccatgggcgtccggtaacgagcggccaaacggccgtaatccccctcccccatgatggcgcagacatggccgggggccagaaaggcgtccggccttccctcgtcctgatccatcagccattccagtgcggggggaacctgcacatgggcacagagcacggaaaaattggcgtaacccagcgcgcgggcctgctgcatggcaagagccgtggccggggcagtcgtctcaaatcctacggcgaaaaataccacttccgcttccggatggctcccggcgaaagcaaccgcttccagcggtgaatacatcaaaagcacgtccccgccgcgagccttggcggaaaacaaatctccgcgggagcccggcacccgcatcatatccccgtagctgcacaaaaccacgccgggccgcaggctcaactccacggcctggtcaatcaaatccaccgacgtaacgcaaaccggacaaccagggccgtgaattagacgaagcccaggaggaagcagctcctcaagccccagggaggcaatcgcatgcgtctgtcccccgcacacctccatcaccgcccacggacgcgtcacggcatggcgcagctcctcaagcaactgctgaacttcctcctgcataagccattaaaaatgttcaatccggcaaacgcccctccccttacacgggatcggtattctccacgatctcccgcatttccctacgggtttgaagcgcggtctcctcatccagcacgctcagggccatccctacatgaacaataacgtaatcccccaggacggcctccggcacgcaggccaggttcacttcacgggtcacgccgccgaaatcaaccactcccagcctgaacagcgggtccgtctcattaatactcacgatctttccgggaacagccaaacacatattattatcctttccattggcgcacgactgccgcagcctgccccagcgaaattcccccgtcattgcacggcacccgctgcggcagggacaactggcaccttctagactgtgccattcccgccaggccttcaagcaaaaaggcattctgaaaacatccgccgcccagcaccagcctgtccagcgagaaacgctccgccacgtcaaaagccaggttcatcaggctctcatgaaacttgcgggcgatgcagccgcggaaaacgcctctcagcaggtcatcgtccacggctttcagcatcgggcgccaatccagttccagcaggccgccctcctcatgcatgacccattcatacggttcccccggcatttcttccccggaaaccgccgcagcccatgactccagcatcatggcggcatgcccttcgcatcccgccacgccgtcaaagccgcaccagaaagccatggcgtcaaacaggcgccccatggatgaagtggcgggagcttggatattacgggccatcatcgcctccagggcttcccgcttctgcaaggtcattccaccctgcagacgttgttcaagcccatccgtgcgccacggcgccatctgccgcgccagggaacaggcgcaccgggcaggttcccggaccgcttcatcccccccgggcagcaaaaacggcctgagccgcgccactctgcggggagcgccttcctcctccatcacaaaaaactctccgccccataccgtcccgtccgtgccgaatcccgtgccgtcccaggccgcgcccaaggcgggcaacggcgtctcattctccacggcacaggccagaacatgggcctgatgatgctgcaccggaacgacttccacattccatgcccgcgccagacgcctgcccaaggtaaacgacgggccgtccggatgggcgtccacggcaatcacctgcggcacagcacccagcgtgcgccccagcgtctccaccgtccgttcaaacgcgttcagggaagccgcgctgtcaagatcgcccagatgctggctcatgacggccacgccgttcttcagccagcaaacggtattcttcaacccggagcccagcgcaagaacgtcgggagcttccgcagacgtgcgccacacgggccgcggagcatacccgcgggcacggcgcaccatcatgggccttccgtccatgacgcggaccacggaatcatccacgggccgcacgaccggacggtcatgcacaaaaaacacatccgccacatggcccagtttctgcaagccttcctccacggaaatgcacaggggctccccgctcagattgccgctggtcaccaccaggggctttctccatacatccatcagcagggcatgaaggggggaggacggaagcatcacccccacaaaacggctgaacatgcacacggaaggagccaggtccacatccttccttccgggagccagtacgatgggggccgccggagaagccagcaggcgcttctcctcctccgacaaacggcacagcttccccgccgcgtccacatccggcaccatcacggcaaagggcttggcatcccgctccttcagcctgcggagacgtctgacggcggcttccgaagaagcgtccgccagcagttgaaagccgcccacgcccagcagagccacaatcaggccgtccgccagcacccacgccacctgttccgcgggagtgtcaaacccgtggccgaaccccagttcggaaccgtctgaaaacagcaccttcatggaagggccgcacgacgggcagcctatgggctgggcatggaaacgcctgtcctccacatcccggtactccctcaggcactccgggcacatccggaacttcttcatgctggtgcccgcacggtcatacggcatctcctcaataatggaatagcgggggccgcagtgcgtgcaattggtaaacgggtaatgataccgtcgggaggcggggtcgcgcatctccttcaggcactccggacacggggccaggtccggcagcatcatcggaacgccgccgggagtagaatcgctttccacaatgcggaactcttcaaacccggcaggctcgcacacggtctgctccacgccatacacgcgggcgtgctccggcaaagtatccatcagcgcggcaaaaaaacgttccggagcgccgggcttcccctccacatggatttccacgccggactccgtattgcgcacgaaccccttcaatccgtgccgcacagccaaacggtacacatggggacggaaaccgaccccctggacgatgccggctatctcaaacttcaacgccgcagcggcctgttcaatggtggtgatggccatggtgctggatcctgccttcccggacgcggcgcgcgcgttccacaatctcgtcgcaccacgcgtccattccctctccggtcttggaggacaactcaatcacgtgcgcatgatgggctaccttgttcagggcggccagggcggcatcccggtcaaaatccacggcatccgccagatcggacttggtcaccagggccacatccgcggaatggaacatgggaggatacttcaacggcttgtcctccccttccgtcacggaaagcaacaccacgcgcatgccttcccccagatcataggaagccgggcaaaccagattgcccacgttctcaataatcagaacgtcaagatcgttcaaaggcatcttcttcatggcttctgcaatcatgcgggcgtccagatgacacatggtgcccgtcgtaatctgcaccacgggaatatccgcacggctcaggcgttccgcatcattatccgtcgccagatcccccacgatcacccccatgcgcacacggccgcggagcatctccgccgtcttctgcagcagagaggtcttgccggacccgggggaagaaaaaacattgataaccagaagattctttgctgcgaaaaaacctctgttgcgctctgccagccggtcattggcgtccaacacaggaacatggacgtccatgccgtggccgtgactttcatgggtgtgctcacctccgcatccgcattctttacacataatcaatactgatattagattccaaaaaagagaaaaaatctcatttatcctacgtcatatcctggagacggcaaggtcaaactccccttgaacctcatttcaggcccggacatcccggggcagaatacgctatcaaacaattcccggaaaaaccgtttaaagaaacagtccgaataaataagacaagtttacaatgcggctcttctggcctaccatcccaatcaggaaaacagcaatgaaaaacgcagaagcaacagtcggaaatctcattgaccatcagaaagtggcattcatcagctctattgatgaacagggctatccgaatacgaaagccatgctgccgccccggaaaagggaaggcatcaaggtcttctacttcaccaccaacacctcctccatgcgcgcaaggcaatatcaagacaacccgaaagcctgcatttacttttgtgaccggagattcttcagaggcgtcatgcttctcggctccatggaagtgctggaggacagcatctataaggaaatgatttggagggagggtgacaccatgtactacccggagggagtgaccgacccggattattgcgttttgcggtttaccgccacgcagggcagattctacagcaacttcaactctgaaaactttaatatcatataaagctttccacgccacatggcccaacctcctataaaggattccggggatggaggcagaacgccgtcctcccggaaaggttctccgccggaagagagaaaaataaaaacaatcatggtcgttgaggaggcatattccgatagacggccttccgttgaaattccttcatcgtaagcatgtggacttgccaaggcatgggaattctgtaaactgtttcgtcctcagacaacatcctttttcccaggttatgccagacgctcgctttcaaccacttcccggattccgtgattttgcaccggcggactgcgccgtgcgcaactatctctttaacgcatggaagagggtggcgcaccgctatggattcctggaatgggaaggcccgaccgtggaagccacggagctttaccttaaaaagagcgggggcgaactgcccacccagctcttccgctttacggaccagggagacagggacatcaccatccgtccggaactcaccgcctccctgggccgcatcgccgccgcctaccagcgggaatacaccaagccgctcaagtggtttgaaatcggctcctgcttccgttacgaaaagccgcagaaaggacgcctgcgcgaattctaccaattcaatgcggacattcttggggaaggctccgcgtgggcggactccgaactgattgccctggccatcgactgcatgagggagctgggctttacgcagaacgacttcatcgtacgcgtctccgaccgcgaagcctggatcaggtttgccgcggaacacggcgtgcaggaacaggacattcccgcctttctgggcattgtggacaaatttgaacgcgaccgcccggaagaatgccagcgcaagctggacgccttccacatcagccgcggcgacctggtggccttcattgagaaccctcccgccggagcctccgaacgctatgacatcctgctgaaagacctggaagcccggggtctggacgattatgtaaagctggacctctctgtggtgcgcggcctggcctactacaccgggctggtctttgaaatctttgatacgcagcgcagcctgcgcgccgtggctggcggtggccgctacgatacgctggtaggcgccctctccaacaatgcggtggacatgccggccaccgggtttgccatgggggatgccgtcatcacccacctcattgaccagaccccccatgccaaggcgctgaaggatgcggcgctggccgccgcgggatgcgacgtcttcatggtgcaggcctccgaaaaccgccgcgcggaaatgctctccatcgcctccgccctccgggaccaggggtacagcgtggaccttcccctcacactcaccaaaatcaacggccagctccagaaagccgtcaaatccggcgcgcgcgcggccctgattgtgggagacgaattccctgccctggaactgcgcgacctgcatgcgcgctcctcctccactgtcgccatggagaacctgtttgacgccgtggcctccctgaccggccgtgattgatacgttccttcctcccttccattttcaacaaagatgaactcataccgcactcatacctgcagcgaattgcgcgctgcgaacatcggcaagccgaccaccctcatcggctgggtagattccgtccgtgaccacggcggcgtcatatttatcgacttgcgcgaccgctccggcatcacgcaggtagtctttcacccggaagtcaaccaggacgtggcgaaggcctcccagcagctccgctccgaagacatgatccagatatccggcaccgtggctgcgcgcctgaaaacggacacggtggacaccaccaatgcggaccttccgaccggggaaattgaagtctccgcggacaccctgaacgtcatcaacaaggcggacgtgctccccttccagctggaccgggccctctccaatgaagacctgcgcctcaagtaccgctttctggacctgcgccgcccgtccatggtccgcaacatgcagatacgccaccgcgtgaccaagaccacgcgcgactatctggacgaacacggcttcctggaaattgaaacgcccatcctttccaaatccacgcctgaaggcgcgcgcgacttcctggtcccctcccgcctggcacccggcaaattctatgccctcccccaggccccgcagcagtacaagcaattgctcatggtagccggcatggaacgctacttccagatcgcccgctgcttccgtgacgaagacctgcgtgcggaccgtcagctggaattcacccaggtggacattgaagcctccttcatcacgccggaagacatctacaacctggtggaaggcctgctcaagcgcgtgtacaaggaatccctggacgtggacatccccacccccttcccccgcatgacgtggagggaggccatggaccagtacggctccgacaagccggaacgccgcttcggcatgaagctgacggacgtctcctccatctttgaaaacagcgggttcaaggtattcgcctccgccgtaagcaatggaggcgtggtcaaggccatcaatgccaaggggttcggctccgcctccgtcggacaaatcgacgccctgacgaaaaccgccgtggaagccggagccaagggcctggcctacatcaaggtgcgcgaggaagactggagaagccccatctccaaattcctttccgacgaagaaaagcaaaaactcacggaagccctcaacattgaaaccggagacctcgtcctctttgcggccggcccgtgggaaccctcctgcgacatcctgggccgcgtgcgcctgcaatgcgccgaattcatggaactgcttaaggacaacacggaacgcgacttcctgtgggtcatcgaattcccgctggtgggctgggatgaggaagaacagcgctgggtggccatccatcaccccttcacccgccccgtcaaggaagacgaggaaaaactgctcaagggagaactctccgcagacctgcgcgcccaggcttacgacgtggtgctcaacgggacggaactgggcggcggctccatccgaatccatgaacgcgacttgcaatccgccatgttcaaggcgctcggcattacggaggaacaggcccgcgaacaattcggccacatcctggacgccttcagcttcggcgctccgccccacggcggccttgcgctgggcctggaccgcctggtcatgatgatctgcaacgcggaatccatccgtgaagtcatcgcgttcccgaaaaacaatcgcggagcggacctgatgagcgactcccccgccgctacggaagagcggcaattgcgcgacattcacatccaggtgaaactgcccgctaaaaaataaccggaatctttaaacacaaacccccggatggaaatttttccatccgggggtttttcattcaaagagcttcctgcatccggaaccacgccaacggcaagacagaaatcccttcctataaaccgtgcccggcgcccgtcagacgccgccggatatccgccatctgccgtaaattcttcatgacgggcaaacggtgacgcttgtccagcggctgcggaggaggattgcccgtcgtcaccatggtgaaacgctggtaacccttcacctccggataacgtccccagtaatacgccgtccacccgctgtccggcgcgtccggaccaaagggagcataaaccatgtgccgttcctctccaggatataaattaaaagcgctggcgcctatcacaatatcttccggcgcgtccggcagcagctccagcccgcgaacatactcccggatttttacggccgcatacgccttcaaggcatacaggcagccgtaaacacgctgttccacggaaccgctgccccagaacaccatctccctccggtcggcaaaacgcagcaaatcatctcccgacaccatcaccgtatccgcatctatcttcaccagggtatccccttcatcgtccatgctccggagcatctcccccagcatcccttcaatacaggccttccccctcaaattgccgcctctttcccaaaaggacacgcgccattccgcccccagttcctccgcctgcgccttcacctcatccgggcaaggatggcgcccgtcgtcaatcacgaccaaatgggctccggggagggcatgccggacacacagcagattctccccgaccagggcggcgtctcccgaataaacgaacaaatgaacgtgaatgcttgctttctttttcatcatcaataactctatcgctggaattctttttcctgtttgcggtcatcatgacaggaactgccggacatctccatctgccgcaacgggccttgttcaacaggctccaaggaaagctccggcagggaagaaggagagccagacactgcggcctccttccgcgcctcctgcttcaaccgcagcacgcccaacttgattctggaggccatattgcccagggcattcgcccgggaaggaatcagccagccgccaagaacaccctgatgaaggaaatccgtctttgcggccagcacttctcccggcctcagtccggaaaacagatgcacccacagagccatcaaacctcggctgatgagggaatcgctatcggcatcaatccgcaccagaccgcctgcaagctccagccgcagccatacccggtactggcatccccgcaggaggcaggcttccgttttccattcctccgcaaagggcggcaactgttccccctggcgcattaaaaaaccgtacagagccccctccccggacagggcggccagctcctgcagtagaacctgccgccgttcttcaaaacaatccatatgttcttattcgttatatgttaaaagcaattccgaccgttcagaaaaccctcttgaaaatcgacttaaccggaacggtccagctccctagcccttcaatacacactcgtcccgcgctgccatcatggaaccggacccgatttcaatattcaaaatccggcagggatgctggcgctgttccgaggcgcaatgctgtaatccctgaatcaaaaccctcaggtcacccgcccggtcatctattctccatccggaaataagcaaacgaagacactgcactgcctcatctccattcgtttgaaaccagatggccatcgtttcatccgtggcgacgcggcagccccttccggtgagcctgaacattccggaatctccgatgcagtccatgctgtcccacacaacctccttaataccgcattccgcggaattcctgacggcaatctttccaccgggaaaccatcccatatggaacaataagcaccgcatcaggtaggcgcgccttaacgcacaatcctcctgatgggtgccaagaccgagcgacttcctagcgccgcagaacttgctcccccggtcaatggttagtctgaccttataacttccggatgtattcttccgcaattcgattgatctatagatggacatgcaaatattcatacaatatccaaaaactatatatataaaatcaaacgggcctagaataaaaatgttagaaaacagcgcaacttcatcaaaaaaagcaatattagaaaactatgcaataaagaaaaaagcaaaatattccatatccagaacgcttctggcgttcatgaagaatcctgcgcagcagacctttcttccccctcccggcatttaaaaaaccggcaatcctttatagacggtctcaagagagctttctaagggagcttccacttggcccctccctatagccaatcggagaaggcaggtcaagctgctttttctattcccggccactttcacccaaagtaaaaaaacattccttcctaacaagcagaaagaacctcaaaccattttaaaaacagacagcgaaagcctcttcgcttttcaagaaccaaacaggctttccgtgaatagtcctcaatcttcatacacgattcgctccccggaagaaacgcttcaagtatcggacccatgccagcgaaaccaatccttccatgaagtccatacataccatcccatgcacaagaccacaggcaagaggacaaaaacagctctcctcaaaaggcagcacgatttaaaaagggaatcgatactcatctccctctcttccaatagcattgatagtctatcctgacacaatggccaataacccatagcccctggaataacattaggaaccacttgccttttcttccctgttcgcgttgtaccttgcaccccaaaccccgctttacccccagttcagaaagcaccaaagctgtttgccaaataaaaatgaattggaggtgtaggacaggcaatccatgctcgttcccatcaactgagctccctatgaacaaaaaccgaggcacatatgtacctcggcgtataatttactttatattaaaaacttagaaatagaagacatcatactgataatcacattttcttaatatttaaatgaaacaagtctatcatttttttcttttcaaataattatcatatgattcttgaaaaccccatcgatttaaataataaatttatcaataaccatttataaatttccaatctattatataacagtctaagtaaaaataaagccatatgcataatagaatgaagacggtctaatttattttataattttcttcccttcgctcccatattggggcaatagcaaataaacacggctatcggaatacccatagacagcgcacaacagattccatatttttttcaatggaatgacctcttcaaacgataccaaggcacaaaacggaacatgtctcctatttaatctttttaattcttttaaaatatcatcgtaattctttattttaccattggctatatagtgatcgtgataacaattcaatctaaaaatttctaaaccggaatcatccttttctgtataagcaggctcagataaataatccatggcagtgtcaacaatcaggttgcttcctacagcataattaacaaaataaatactcccttcacttcctgtgtgtacaaaatctaattccacacattcgttattaagagccgcctgtgctacgatatcataaaaatcttttgtcgtcgcattttcaggtaacgtaaccgttcggcgtttttcgccattccctaaggaatgtcttgcataaacaacatacgcatgcgtagatcctcctctcttttcaaaatcagtgaaacatataaaaggcgtggaagtctcgaagctctctcccaattttagaacaataaataatactcccactacacccactaaaataagaatcgcaaaaatcaaaaatcttttcatatagaattcttaatattatatttattcgatatctataatgttagtatttaattatcattaaagagcccatccaacatatctggtatcattcctattttcttccggtaattctctatgaatttcatcgtccgttgttgctaatagaacagttgttattttagggcaacaatccttttcttttaaagattcaattttctcaattaatttttccatggccgcagcttttactaacactctattccctacacctcctcgtctattaggaaaatttgtcggtattcctcttgcatcttttcctttgtgagcccttacacctgccagatgacaaccaattacatctacgtttggttttaactcagagcttggtaaatatccattataatatttaaattgtatcgaaaatgcatcaggatatcctttactatgagacatcaaaatagctttatcacatccaaatggtaaattcctgacacctttaggattcaaaggcttcttatttagggtaatttgataacacttattcccacatttatcttttatattattaattctctctatggttttatctaatttctccagctggtctttgcgaatgcaccccaattcatcttcttttcctacaggatcaaaaaaaccgaatactcgatgtccaacttcggcttcttgagtgaaaggatctgctttttcacaatttaatcctaaaatatctgttacataggttaaattattccttgcaaatctatacagattttcatcgcccagttcttccagaggatctctggaaatccatcttccgtcccgaggattgtagtgacggtaattgtagtagatcagaccaaggtcttcatcccggtactcactggaatagagaaacggcatgctggaagaatatacttcctctgatgtcaatatttccccataggaagtatattcaaacttcgcctgacggtttcccgaggagtcaaacagagcgcttacgctcttgagcaggtcgtgcgccacataacgggtggtggccacgctcttgtccgcattgtgcgtgcacatcgccaatacccgtgtcgactccgattcagagggatcccaaaaccacgtacccagcaagggcggattggaggtattttgcgtgcagtccatgcttgccaccattagatatcccatatacgcgaatcttgtacgtctggtcaagttatttccatcatattccactttttccacacgccggccaagatagtcatacacacattccacctttttgcttccctgtgtaaagaccaccggacgattgtccgcattatactggacagaccatattcctgtggaagtgttcacactcgtttgattaccgtcagagtcatacacaggtgcgaaggctgttcctgaacgtgtcacagtagcatactggttcaaactattgctttgataggtactggaaatgccctgttctgccgccgtctggcggttgccgatattgtcatagtcatagctgaaggctcctcccgcgttcatggtgtcttccgtcaattcccctcgtgcattgtagccatatgtgtggcgacgggaaagagcagttgaacccacatagtcttcccgtacggaaggacgccgcatactgtcccacgtataggcgtgcttgagcgcaggaatggaggaagttcccttcacgtaagtcagggacaccggcaaaggaagattggcatgaaacactgtgtttctaaccaatccattcggataggtcaaactgtcgagccagcccgtagccgaatcatatccatacgtaaaggatgaaccattaagcgacattgcagaaaggcggtctgcgacatcatattccagagcgacctgctgtaccgttgttccattcagagaaaacgtatatccggacgaacgatccaaagaatcacgctggtactcaagcaggcttgctaccatgccagaagtttgttcgtaggcaatatcttcaagatcccaatagtaaaaggaacgtgttccggatgcatcctggacggaagataaccgatccatcctatcataggaaaatgacacagacggagttccatcactatgcgttatagaagctatttttcctgatacagtatcatactggtattccgtcgtcactccgcgggactggatgcgagttcccagacgcccccagtcatcatggtaatacgaagtcatggaaccatccgcataagtcttattcaccagaagtccactcacagggccataagtccagcgtgtgatatcggaatccgaggatggaatcgcatccagaacagatcctgatgcacgataggtatgcagagccacaatacggtccatggcatcatattcccatttgatgggctggacagccgttccatactgctgcactaagcgtccacgaaaatcataggaaaaccatgtctgcttgccatcaggagttacaatacaatttggcagtcctgtaaccgcatcataggaggtagtagtcgtctctccgtcctggtccgttcggcttgtttcccttcctgtggcatcgttgacgatggtcatgtctttaccacgggcatcgcggattgtaagcatatctccggtcatactgtaagtacgcttgtactgggtcattgtcccatctatttgtatcaggcgtacggtatccccgttcaggatgacttcttcctcttccctgtcacatcccttccgtccccttagaacacgtatattaccgttttcattgtaaactttttcccaaatggaacggtattccggtagcctctccctcataacgactgactccaaagattgcagggcactgtccgttctggagactaatgtatatgtatattcgaggtcagcatccaatccctcacaaatagcctgtacgtagtccatacgccagacagcatttaccgctgaagcagacaatccgggaggaggaaaagacaggcgggtataacgggaaaccactgaatacctgtatggagaattatcaggccagtcattccaactcctcatccatcccgtcagttctcctctgttattataatggtaccacaacgggcattcattcttttgccattcacatactatttgcccgaatccgttatattcggcgttgtactggtctaccatcacagcgccgttagaatgtaaaattctcaatatcttgccatctgcattttccagaatattttctatcatatctccggatgaggaaagacggcgtatatatttccaaatcccggaccagtccgccttatattcataataacgcgcctcccgtcctgtgccggactcttccacaatcaggccggaagacgccttcctggtcaccagcgtagctccgggcgatgttgtttcagtcattgtcaatccgtcttgggaataagaataaagggaggttcgccccatcttatccgtccgggaagtgactcttcccagtaaatcatattgggaataaaccgtcgttttcctgtcccctatggagtggctcactgacaaaatcctccccatcccgtcgtatgccgtttccgttatactatccggacaaacggcattcatatctacatcattccaattttccacagccacggcagcatccctttccacacacaccagacgtttggccccatcataggtataacgcgtctgcagcccccttacatctgtttcccacaatggtcccgcacaactccattccatcatggaatacaagccattggcgtaatctgtccggatcaaacgatgcgaaggatcataggacatccggcgaaagtcaatggagacaaatcccggcgaatataaatgaacttgatggtctgtagcaatttcatctccgttctctgcataatagcgaatgatcctgaaggacttttctgaatccgccacatctatatagtcatcctctgtacatttccaaacagcgccataatcactgcaggcagaatattcgcgacgtgaaatatttctggcttctccattatttactatatcaggattatccacatcttgcacgttttcatattgatatctgcatttcaaccgtcctggcacatacacgcagtcatgagctgtgtaccattcctcaaccgtagttaccgaattcagaacacccacatttgtagaacccagataggtgcgtgtggcggttttcgaataaacctgttccgtcttattgtattcataatgtgttttttccagacattcggtcctctgaggagataccagttctacaagctcctgagaaattctccggtcattgaacaattcatctgcatatgaataggaagttctcatagaaatatccccataccacggctccgtccgttgaatcacgttcccgttggaatcatactccatctccaccacggctccgtccgggcgcgtttccctgatgcgtttgccataattgggggaagaaggatcgctgccgtatccgtacgtccatgttctttccagcggggttccatatccttccgtgcgggagataaggacgtccccgtacaaacggcgctggtatacttccttttctgcggaacacagcacggcatgctcggttccggccacgccgctgtacacatacttgaatttttccttcttgtccgtgtagtaccctcccgccaccatggcctgtccgttaatatccttggcaactaggttttcatggccgggcgccggaaggcatctggtgacgatgctgatggcgtcatccccctctcctttcaccagggtcagatcgtccgggtaaaggcccgcgcgccattcgctgataaaacctcccggttcttcaatacggaatgtctgcaacagcatctgggtcacttccggattttcttcatccacagccctggcgaccatcgtctccgtatctgcgaacgtccaggacagcttccatgtcttgatgggaacagctcctttgcgaatgatatacgtgccattgttatgccgccctgtcacgtctgcgggggcataccatctaatgctctgaacatcgctcaggtccagcaagccgtccgtcttgttccacacctgcttcagcatgaacagggaaagggaattgaaggtttccaccgcagtgccgggttcgtcagagacatcctgcctgactacctgaagctccgcggccagttcagcaaaggtgattttcacgccgcgcggcgtcacgatatgatcaaataaggcggaattggggcggaagcgcatggtcatgccgctttcctgaacttcttccagataggaaacgccatccaccacaacgcgccgcatcctgtcctggaacatctggctaccgccaagcgcctctgccccggaaatatttggagaggcaaagctgtaatagcgcggaaaccctttttccgtcttcaccaccgcccgggaaacatcttccggttcttccggacggctgatggacgcattggcggactcagtcacttccagacggcgctgggaaatgtgctcgtactgaaatgcggtcccccagcataacccggcatccatcatgttcaggttcagcatcaggcggccgccactcaattccggccatttgggaaaacggccgaattcgatggagaagtccacgctgttgttgtccgtacttcccgtaccggagtcgccttcggaacacgggcacgggtattccgtttccggccctatgggagtaacagggtaccaggtattgggccacggcatcggagacggttcatcgttggagacaaatgtcacggggtggctgggcatttctccggattgttccggagcggatgactgatcattaatttctttcattgttttattgtcattgatgcatctgccggaaatgagggaaaacgccgccatggattttccccggcttcattcccgccagatgctttggattaagttcaggcggcaggctggcagtccatggagacaggacggttacagatggcgttccgcaggcatctcatgacggaaaggcggacggaacgcgccaccttgtcctgatacctccggctcatggataccatgtccatgtccgccagggattctgcagacggaaaggtcgtccagttgtaatgcccccacaggaggcctccggttcctcgcgtccatgccctggcgaggagtggggccccctccgggaacagggcggtaaacgcccccaggatgacggcgccctccggacatttcatcacggaggaggattgctccagatgctggagaatggcccgaagcacagcaggcttcagggcataaagttcattgcacagcaggccggaccgaagacaggttccggataatcccgcttcggaacgggcaaattcccttaaaaaaccggcatggagaatgagattgtccggcttggtgcgcaccagcacatcatgttcatggcgcacagcctgagccatcagagccagaatagcggccgcatgttcggaggacgtatcagttttcttcagcactttccattccacggacatgttcctcagcacttccctgacggtttggggacagcgtgcccggtcatcgtccagaataatgacagacgcttccggaacggcacggcggatgccctgtacagcttccaccagcagaggagcgttgtttgccttgcagggaatgaaaaagatgattcccggctgctccacaggatcaggctgcggagaatttgatatggattccttcatacagataatcgttgagttgtaatgaaatgatgcgttgcatcagttccaaccttcatcattaccctgtatgaatgcacgctgttttaacgggcctaggacattggtttcaaataaattgaggcattttcacggtggcaggaatgagtctgttttttcctctcatgcgtttcttccggctcttcctccgcgttgaccctcggcaagaaaagaaaatgaatacccggccccatttccaccgatatggacattatcacaagcaggagataccctcttctccaaccagccgttcagactgccggaaaaagtctgcaactgcatccattccgtcctccccgcctgtcaaattatctctttcctctcatccgcacggaagactcaatatgctgaatcccataaaaaggcccttctccgccccgtacgtttccgccagccaaagcctctttgccgcgtgcatgaagaagggcggtttgaatggacatgcaatacccttcaaaccgccctgcctgcaggatttccatgacagaagaaacagccggtaaacgaacaccgggtgccctgccttcaaagattttaccgcctcatttaccggaaacagaaggcaccgggccttccagtacggcagtagcgccccttggagccggtggcgctacctccaggaacctctccgtcaccgtctcttttctttcctccggatggtcgatcaaagagataacacggtccaccgcctcgcatgcgttggggtgcatttccttccgcgcctccctcacagcactgcaagccgtccatgtgaattcctccgtatgggcatccgcctgtttcatcacaggcgccagaatcatgccctgataaatgatcgctccaataatgatcaccaggccgacacacccgcaagtcagcgcgcccctggcagaaccatacgtcctgtcatcactcctctttaccgctcccgctcccagaataatagccagaatggcacagagaaggccggggacaattgctacccaccccagacatggaagaaaggcgagcaacgcgagaatcaatccgacaatacccagaaccaatgcaaggatggttgaaacggtatcggggacggaacggcggggatccgagtagtttattttgttcatctttcattttttcattggatttccagacacggaaacgctctaatgttaaagaaagcgtgtaaaatctgtcaaggaacctccctgttgccccttgacggctctctcctgttccaacatccccggctcatgtcaaaacaaaggccgaacgcttctcaatgcgctaaaaataaataccatgattgcatggtcaatcatactgcttccctagctgcatgccttcttcagaacatcgccagtatgacaaaaaacgcatgacacatccatggccctgcaccgatcaggaagttgtttttccctttccgcctgctgttttttcatcccggaagaccatttttcttccccaagcctgccctcctccgccaacaccatgccagataaaacacggcagctcctccattgagcagcccagccataaaccagaccggagcgccccggttcctctcccatgcggcgcgtatgtttccgcgggccatttccacatacccacgcgtcatgccgcacaaaggacattcccggtgcggcacggccacggaagccgccagtgaattcatcccggcagggctgactgccagggccatgagggacggcgccaacaacagtaaggacaggatggcccatgcaggcagccacactttcctgatcatccagctattgcggcatgaacgccacgcagagcgcatgcaattcatcgccgtgctcccttgaaagcgtttcagaaactacaggtcctgggaacccgtttcatcagcgggggaggaatcctccgcatccctgagccttttcaattgctcctggttctgctgctccatctgttgaagctctttctggatctcctgcgccttcttttccacataatcctggtgctgttccatgtaagtcacggtcgcgctggccatccatgcctggacaatgcctgctgcggcagatgccgccaacgcaataatggcgacgataagagctcccttgggagagcctttgctcacagccacaatactcatgatgagggcaataatggccagcagagccgcaggaatcagggtaatccagcccaggcacgggaaaaatccgatcaacgccagcactagggcaataatgccgaggaccaaagcagccgtgcaggaaggggaaccgctgcagcaggacggagggggagaagaatcaggagcattcatgatcgtgttattctatggagttcagtgaaaattccctttggaaccttcatcccttcccttactggaagagagcattcctgtcaagatgcaagctctgccattccggacatccggctgtcattccacgcctcaaagcatcagataccccaccatcacagcggctgttcccaagaaggcgctgaccagcatcaatttccgcttcccgcggtttttccacatcagcagaattccggtaacatacagtataatcagggaaagagccgccccgtatcctaacgcagtaaaccaccatcccgccttccccttgtgagccagcatcagattggggtaaatgccgggctccaccacttccgcccggagggcatggcctttcctgaggaacagcacatgcgtatccgtcataggacccaggaggtagttccctttgaacggccttacctttccttccggcaatgccactccgcgacgttccagttccctgcaggaatcctcatagggcggctggtcggcggcattcagctcatgcaccgccacatgggaagtgaagtgctggtccacgccgcccatgtacagcaggccggtcacggcatacaccacgatcatcggcaggaaaaacaggctcaggaccaaatgaagggaatgggaagacaatgctttcatcattattcaagtaattatgttattatccgtggagcaactccgccaacgcttttcccaaccgcccgatctggacggtccgatgggccgccgttaccgtaacgcgcagacgggccgttccgcgggggaccgtaggataacgtatggcgggagccagaaaaccgcgttccagcaacgtacccgctgcggccagggcggcatcattctctcccattaccacggggaagatggaggaaacgggcctgccgggcattcccagcgcggaggacaaggcatccgccagcacggaaacatgacggcgcagttcctgcccctctgcgctccggatcacttccactgcggccagggcggcggcggccagggcgggaggcggagccgtggaatagatcagggaccgcgcagaattgatcatcacatccgcccaggcgcgggaacaggctacataaccgccgctcacgccggcagccttgctcaaggtccccatctgaaaatctatccgggaagagacgcccagttcctccgccaatcccgccccgtgttctcccagcacaccgaatccgtgtgcttcatccaccagcagcagagcgccgaattcatccttcaggcgcacgatttcctgaagaggcgcgcggtccccgtccatgctgaaaacggattccgtcaccaacaggattccgccggaaggattcgcgctccgcaaatgctccagcttttttctcaatgattccatgtcgttatgcaggaacgtggacaagcgggcaccggacagccgcgccccgtcaatcaggctggcatgggacagcttgtccatcagcaccgtatcctcccggtccgcaatggaggtaatcacccccagggaggttgcgtaaccggaggaaaagctgaccgccgcttcagtccccttcagatcagccagggcctcctccagaccggaatgcgcccggcgcgtccccgtgaccaggcgggaagccatggccccggcgccgccatcacgcgccgcacgggaaaaagcctccgacagggccggatgataagccaggcccaggtaatcattacttgccaggttgactacctcccggccgtcctccatgcgggccatgccgccgggcaggcaatccacattccgaagaacgcgcagcagtcccgcggacttcaactctgataaaaactgtccaggattcttcataagcgttctcgctccagaaacatgttagccgcccacgtcaaggctcagcactacattatggccgcccatggaagcggcggacttaaccagcatccgcctcccatccaaaggcaattcttccgcaacacaagccgcacctgccggggaacttacccagaaaggattaggcggcaaagccccctccctgataaaagccagcatcagggccagttccagaatgccgctgccgccaatggcatgacccgtccagggcttcatcatccttaaatccggaaagccggttccaaaaacccgttttaaagcggcccgctcggaagcggcattccccgccgttccactggcatgggggcagacggtcaaaggaacccttccatcccaattccgcagggcggcatccagcagggcggcaatgctctttccatcctccggcattcccagcgggctgtaggcatctgaattcaccagataatccttcacgtaaatgccgggaccggaagacaactccagcgccatggccgcccctccctcggaaatgcacatgccgtcggcatggggaccgtagggatcattcattccgttgcgggaaagcatcccggaagcccagtacgtccccagcagctcccggcacaagggcaaatccagcccgatagccagcgccctcctgacaattccctgacgcattagcatggccgccatgcccacggcatccagaccggcggcgcagccgctcgccagcacgtggtaaggcccgcgaatccccagttcaatgctgacgcaggaggcaagctcactgtgcagggaattgggaacggccagaatcttcatggaccgccgtccgggccacgggctcagccagccggaggcgttcccgcgggaactgcccacaatcagggccgcatccttcaattcttcctctccccaaccggcttcctccacagcctgccgcgccagcagcagcgccaactgggaggcagggccgttcctgcggctgcataaaagcttcctgtccggaatccacccgctcaaaacatcgccccacggataccccgctccccacagttccctcaacggcttcaacacgctgcgcccttccctcactccggtgagatgggctgccgcccccatgccaaagccggaagccagccccaggccgcatacccgcggctccggtcttccgtgactttttccccccgcaatcatgacggcggccagactactgccgcacccggaaaaactcaagcttccggtacgtcaggaacagccaggaaaaacggtacccctgccgtcttgcaacgggcttccttttatggcaatcatagtcccatgaccattcagaccgccggatttttatctcttctcttcatggccatttgccttccctccctctccttttcctcaccgcaaggaaaattccaggcggctgactgggcggtactccattcctcccggaacgaccagcggcacgtctcctcccgcggcgtcgtgcaaacaatgctggaaaacattcagccgtcatgcgcattctctccggacatgagaccggaagacttccccgcctggcagaagaaagtccgggaagccatgaaaaaactgatgaaattcccccttcatgacaaccttcccgcacccgtcctggtaaaaaccgtgcagagggaacactaccgggtagaaaaatgggaagcctatcccctcccgggcgctgcggtaccgtttctggtacttgttccggataccgcttcagaaaaaaatccggttcccgtgctattctgcatccccggttctgatcaaaccaaggaagaactggcggcggaaacgtcgccggacctggcgcagcctcccgtaccgcagccgggcagcaatgccatggcctgccactacgtcaaacagggctgggccgccgttgtggtggataacgccggaacgggagaggagggcgacgccgagcacgccgccggccgctcttcccacgactatgaaaacctggcccgtttcctgctggaaatggactggagctggctgggctacacctcctatatggaccaatgcgttctggactgggtaaaaacacgcccctgggtgcagaaaaaccgcatcatcctgagcggcttctccctgggaacggaacccatgatggtgctgggcgtcctgaatccggacatctttgcctttgtgtacaatgacttcctgtgccgtaccctggaacgcgccaaagtcatgaccatgcccagcagcaggggagtgcgctccgcgcccaactccatccgccacctcattccgggtttctggaagcagtttgactttccagacattgtggccgctctggctccccgccccgtaatctgtacggaaggcggtctggacagggacttccaactcatttccgcggcctaccgcacagccggagcgccggaccatttccagtaccgccaccagccccgctttgcagacccggcccaacgctggcacggagaacatttgcccgcagggctggacagagacgcctttttccgcctcgccaatgtggacccgagcaaccacttcttcaaaaaagacctggtcattccctggctcaagggccttttaggcaggggacagcaataagcgggaaaaccatcccgttctcaaacacgagttgtgcggaataacggaacagaacgtttcccctgccttcaggaatgcagaaacaatctgcggcacactttccggaaggcacggcccagcttcccgaaaaagccgacgactgcacgggcttccctgttaacgtccatagtcttgaacaaataacgccgtacggcatccaccagggagcagcctgcatacaccgcaacagccattgccagtaccttcacgaccatcaacgcaggggaagaagacgcggcccattcaaagacatcccataaaaaccatttgcctatcaaaacattgcaatgcagcacataaacactgaacgaggcggccgccagccatgaaatgcaggcaaccgtcctgcgggatgaaaaacgcatgcgggaaaaaatcaggaacagggcaaccgccgttcctacaatgaacggagaattataggcaataaacgttccgccgccccttatctgtccaatcaggtacggggacaccacgtcaagaaccatcttgaacgcccagacaaaacatacacacccggcataaagcatccataaggcgcccgtcctcattccagtcaacaggccatgctttttaatatacattcccagcatgtagagaacgcccagccaccagatggaataccctccctctacaggaaacacatccctgtgaagcaaggtgggaaccacggaaaacagaacaaaaacggtaaccagaagatactggaactgtgatttggtaagccggttccccaggacattaaggaaaggaataaagaaaaacagccctacatacgccgtcacataccaatactggacggttaaaacgggaaacaacgaattcaggacgtcattaaaatgaaccacctgggaggaaaacagcagcaccagcagcagactgcccgccgtataaaaaatcacctggaaccataaggtaaccacgcgttcatatctgaacgtcccgtcacagcatacatacccagtaatcagcgcataacaattcaccccgcaataggcggcaatctccagaagccaccctacccggtaggaagcggaatcatgattgtccagcggcaatacatgagtggcggccaaaagatgaagaaccaaaaccagcatcatggcgacaatgcgcaaggcgtctattccataattccgcgacaggggaatatccagaccaccataggaagaaggctttccttttccctgatcaccagccgacagcaagctcatggggatatttcaacggatttcttatccgtggtcaagttccaagcttgagggaaaagtatttgagaaaaaacctccgatggtttaagggtattccgccgggaacggcaggcttccggctttcggataaagcataaaatcccaggagggagaaagcggcatatcctcctgttcatatatcttttcaaggaccgggaggcccttgttcccagggatttcctattctttttacacatggcgtatcatgctgcatccctgtgaagaaaggcttttctttcggaaaacctttccatcattgatgaaaacgcggataagaaatccgctacccatgatcaggcaatccggctatccaaatcgaacacctgcccggaggctgccgtgaggacttcctgcaaaaacagaataaacgccgcggcctgctccggcgtattgaacctgcccagaacatgcctggacaaagcagactccttcacgctctccctcaacccggccgtcatctccgtcagcatgaaccccggcagcaccagattaacgcgtattccctcctttccccattcccgcgccaggctcttcaccaggccttccagcgcagacttggaagcggcataggccgcctgggacggagccgggcgaagcgccgcatacgaacccaccattaccacctgcccctcccgcttctcccttgccatggctgcggcggcacagcgggcgcaccaggcggctcccgtcacattcacgttcatcacctcgtcccactccttctccgtctgtttcaggaatggcctgtctctggtaattccggcggcgcacaccgccaggtcatacggagcatgttcgtcaaaccagcggcgcacggcggaacggtcccctacgtccagttcagcgtgtgacggagcatccgcctcccatcctgcggcggtaaaacactccacggcagcccgcgccaaaccgccgtggccgccgctgataaacatccttcccatgctggaacctctccggaatcgttaaatgcctcacttggggtccacccaccgcccgtactccttgatcaggtccaccagccgctccacggcctcctcctggggaatgttgaacttgacgggggtgtgcttcacgtacaggttgatcttgttcggcgcgccgcccacatagccgaaatcggcgtccgccatctcgccgggaccgttcacgatgcaccccatcacggcaatcctcacgcccttcaaatgctccgtagccttccggatgcaggccgtcgcctcctgaatattgtacagggtgcgtccgcaggacgggcaggaaacgtaatccgcacgcgtcaggcgcgtccccgtagcctgcaaaatattgaatccgaggaaggaagccagccggggatccgattccccctgaatcagcacggcatctccaatgccgtcgctcagcagggagccgatattgcgggcggccaccagcggcacgtcctcatcggaaacggaaccgggcaccagcgtatccttcagcagaatcaggtgcctgtcttccatgcgggaagccagaaggcggaacgcatacacgggttccatgtccaggccgttcttcacggtgacaacggacggttcggccagttccttcagcggctccagctcgtcaccgcagcgggggtccacctcaatggcctccagttggccgaaggccagctccggcatcatgtcccccatcgcatcccgttccgtctggagggcgtaaaaccccgcatccggcaccaccacgcgcacgggctgctcccagcccaggcgcaccccgtaacacatcgccagccctccctgccttttggaaaacttcaggggatcatagctcaactccggttcgggaaaggaagaaacgggatcatcggaacgttccgacggctggaacggattggacaggcggtaggccacgggcacttcccgcacggcgtcctccgtcagggaaacgcgcagggtatccccaatgccgtccgtcagcagggacccgatgcccaccgcgctcttgatgcggccgtcctctccgcctccggcttccgtcacccccagatgaatgggataattccagtccggccccagggcattcatgcgttccaccagcaggcggtaggcggccaccatcaccttcacgttggaagccttcatggaaaacaccagggaatggtaatccaagtcccgggcaatctgagcaaactcaatcgcgctctccaccatcccctccggcgtatcgccaaagcggttcagaatgcggtcggacagggagccgtggttggacccgatgcgcatcgcgcggccatgttcccggcaaaacagcaccaagggcgtaaactcctccctcaggcggtccagttcctcacggtattcggcgtcggaatactccctcacttcaaacttcttcttgtcgatgaaattgccaggattaatgcgtatcttctccacccacttggcggcctccatggcggcgtccggcttgaaatgaatatcagccaccagcggcacatggcagcccgccgcgcgcaattcacgggaaatattctccagattggccgcatacgccttggtctgggcggtcaggcggataatctcgcaccccgccgcggccaattccagagcctccttcacgcaggcatccgtatcccgcgtatcggacgtcagcatggactggacccggatgggattggagccgcccacccccacatcccccaccatgacttcacgggtcacgcggcgcgtataacggtaaggactcggacaataggaagactgcatgaaaccactctaccgcgccagattcccctgtcaaccatccttcaaaaacggaaagccttttcacgtcaacccatcaacattgaaaagggaacggagccgttcccgctgcacgaagacttgatacgctttacagcaaattaactataaccaagaataaccatcatgtttgaaccgctcaggaatgtcttcatgcgaatagcagaaaaagagcaggtaaaactcccctcaacaacaccgggaacaagctttggcttgacacacaaaaaattaaccctggaccacatttcctccataggagtcaaggcagaactctaaaaaagataaagcactgccggttcccactaatcgcatcatttcatcaatccctgtaacttctcaagttacccataacggcaacggcatcaggaaaaagagcgggcatcagacaagtttttccgcaactaaaagcccttctgaatccggaaccgggttacaacctgggaaatgcggttacacttccctatttccctgcatcgtttgggcagattgtataaagtggttccttttaacatcatagggctgcgttatttctttggcgcttcttcccattgcccggactcgaatcaccaatcgacgcacttccaaacttgagctattttgccaatattcgctaagcaattaaatttcaatcacaagaaacctaccgtgtttcttcgggtttcatgaacaactgcatattcttaagcaaagcttcgtccatttgttttgccaatggcaaaacggaaatatccatcgactcgtttttcagcataacggccgtattaccccgtatgaaactaattgaggagtattctccctgggatacggggactcccaattcattgattaccggtttgaggcagacatcgtagtctcccaccagaccgggatgtacctgcaggatttttttcaggatatccggcttgataagttgttttgattgctccgcctgcatcgcgaacatcgctctcaaggcctggtctttcgtatgaagatgcagaatcgtgtaggtgacgggataatcccgtccattcttattcacgctaaaagtaccggaacatccgttgatatgagattcgtcatgacctttttccgcaataaaagggatatttacgtgcttcttgagccagcgcaccgttccgatgccgctattaatattgggtatcatttcaggccccttgtcttcgttcccgtccggcatattcaggttgagaatattatcattccgttgcagctcacgagcattccgatcaatcctgtcgtataagccctcgggcatgccttttgttaatttccttaattcttcttcacgcctgctcctcttttgataaggcatctttgaaatgtccttccactttttcactgcctgccgcgtccttttcggaaaatacccgaattggcgtttcccattgagtgcggcgagtatggtctctgatatttcaaacagttctttatccttaagctcttttctaataagcggaaagaaccagtggtcagcggcaatgagggaaaacccctcctgttccgcaaagaattccccacataattttttatcttcgtctaaaataaacgggacttgcagaaatgccatttttataccgtcaccaaacatggtccatcggtattcacggttacggttgaccggaggtccctgtttttgtgagacaagcatttcatctactgctttctgacgactgtagacggggtttggggagtagaacattttgacggccatgtagacgtttcccatgatatcgacaatgacccagtaattctgctcatagtcccatcccaggtagtactgagatatattgagcccttccatgtcttttgccgcctcggactgtccaggaacaggattcccgcctggtttaatttcctcatacaggttatacagacgggccttgcgctcagcaggattggattttatggtggtctggttccatactacggccggttttatttcccagactgtttggccgggatacaggtcattccctgcaacaggcgccccatgaagaatctgccctatgagggttagggcaatgaagaaaaaggggagaattttcatactgtgcgtgcaagtcatgatggttatttgttaaatgagaagtagcggccgccaggttcggtaaaattactcctgttttcatcggatttcaaatcgtcttttatgtaatcactttccgatttgttggtaggacccgcattgtagggaacagggttatgtactttacctccataaaggcaccaggtatggccggagcgccaggattttgtctcctcctgtccttgtgcgtttgttgtttttctagtttccgtccacccgactcctctggaactgactccgcccgagccgagaaccgacgcagaataggcctgtcctccatcagcccgaggatttcatccctggtcagcatcacgtcacgatgaagcatccccatgatgccggcggcggcataggcggcccacggaggaacggacagtaccggacgacgggccccgtcacctttcccagcatggaaaacaatccatggaacgtatacgtttccggccccactgcttcaatcacgctgttttacccgtcttcccgcaacgcttcccgggaccgccaggagcggtcaaatcctgtacatgaaccggctgaaggcggttttctccattccccggaaaccgttacagcatggactgcaccacaaacaacacgacggaccccacataaacggccgccagcaccacggcggcgcaacacaggaagagcctgtatccacaggccagtaccatccttctgagctgggattccggatgccgccgcgcccaccacgcatacagcagaaaaagcagagccgttccggctgaaacaaacagagattctttcaacagaggcggataataatcaaacaccaccctgttccgcccctcctgaaggcgcaccgccatcaattcccccaccttttccacgggcacgtccaccccgttccgcgtggccttccatccacggtcatgcaccaccggaaccatcagcgcctccccctttccggcagagagggacacttccacatggcctccgcgtccgtgcgcctccaacccgtattgatcctggcctttccccagaaccggaacatcctgctccggcattcgcgccgcagccgccagaagaggagcctccaccagccgccgcatccttccctccaccacggtttccccggttacacccgcacgctttaattccaatgctccattataggtgcggcacgtcccgccgggggccttctgcgcttccgccatgacgggcaccgcgcggccattgacgcggagttcctccgtatccgtctgcgggaagccgtacaccgcgccgggatattccggcacgctcatccggtaaaagttgccattcctctccgtccgcacttccacgggagcatacagggggccttccgctgacgggcaaagcgcggcatgcagggcattgagattgctgaacacgccggcttccgcatccagccgcagccccagcgcgctctggggaaccaccagcccccagcgggcgcccggaagcctgtataaatacatgccttcccgggaaagcacgctctccattccttccacgggacgggacgccagcacaaagccatggcccagcagcagatcggaaaacagggtgcccccctgaccgtacgtgcgcgtgaattcatcccggtaccccaggtttttcagaaaacggaaatggctgatgctcgtggtatgccggaagttgccgatgctcgggacaggccccaggcaatccgcgttgtccaccagcaggcggtccctgtctttcacgcgcagaagcccggcgtacccgtccattccgcgcgccagccattccgcattcagggccagtacagcggccttttcctcttctccctgcttccagaacgcggcagcccccacgggcagccccagcagcatcacggcggctatggaccaccccagccttttgccttccacatgccgccagcacagccacgcgcatgaaaaaaacagcagaggcagaaggcgcgccaccaggtccatatccgtcacgtgaaggacaatcagggagacggcaaacgccgccacgggaaggccaaggctccatccccagccccagcgccgccccgccggctgcggcagcctcccgccggacaggatccaggcgcagaacgacgccaccaccagattgggaatgaacccgaaccggaccggaaaatccacgtagctccacagatgggcggcgcggtgaaggggttcaatgaacgcagggagcatggacgccgccaccaggagaagaaacagccgcctccccctgttcgccggcggagcctctttcctcccgtaaaccagatagacggcagccaaagcggcgcacgccattcccggcaggcaggcatacaggcgttccaggaatttgggagggtcaaacggccaggacagttcaaaaaaagtggggggagtcatgaacagggaccgcatggaatcccggctcatctccatcatgggcaaccagtaatagcaggtcgccagcgtcaccgccgccgtgtaccagaacacgcgcgccagccggacgcggcgttctgccgtccctttcaggggaagcgtgaaggcccacgcgaacagccagccggtcacgacggccatgaaagcgctgtacatggaggtagccagcaggaagaggccgacggcatacagccaccccctccctccgttcaccagctggtaaaggcccagggcaaacagggggaacatggcggcgtggtccaggaactgcatgaacccgtacttggtctggaaaaatccccccagggcataacccgccgtcagcagcacggtccagcatacgggcagggaggggaagacgcgtctcaggaaccaggaagccgtcaggcagatgcaggcggcgtccgccagcatcacccataccatgtccttcaacaggaaggagtctcccatcgccaccacaatccaggtggagggaaccagcagctggtgcggcagggaggggctcacgcggatgcccgctcctccattgacatcataaaagaaggacccgtccaacgctccggtcatcagggcggaggcataatatttcaaggtgggatacaccatctgcccgttatccatgtattccaggtaatggccgccaagcggccaaattccgcgcaccgccaggaacaggaacagaacggccagggcgaacgcaacagacgccagagacgtcaataccgggcgggaagaagcgggttccatggctcaatcagcggacaaacggttcggcggcctggaccaggcgcagggcgcgggcgcattcctccacatcatgaacacggtgaatacgggcgccgtgcaaatgtccccataccgtcatcacggcggtgctcagcggcgcccgcccctgctccgcatcacccagaacggctcccagcatgcgcttgcgggaaaggcccagcaataccggacgtcccgccacctccagcctgtccatattggacagcagggccagattgtgttccagcgtcttgccgaagccgatgccagggtcccagcaaatctgctccgggaccaggccgcggcccagcagaaaatcataacgctcctcaaaatagccgcgcacctcccgcaccacgtcttcataaaaaggcgcgttctgcatcgtttcaggccgtccctgcatgtgcatcgccactacgccgcagcgcgcctccgcacacagctccgccattccctcctcctgcaatccggaaatatcattgatcacgtccgctcccgcttccagcacagccgccgccacggcggcatggcgcgtatccacggaaatcacggcgtccgtgcatgggcggagttcccgcaccacgggaagcacccggtccagttcttcctccacggagacctccgccgcacccggcctggtggattcccccccaatgtccagaataagggctccctgccgctcaagctcttttgcatgggaaacggcgcgttccaccgtatggaaacgccctccgtcggaaaaggaatccggagtgacgtttacaattcccatcagcacgccgccgcgcgccacattcaatatgtctcgccttacaagccagttcatctaattacgttcttgtcaaaggcactatacatcactttaataagtcagaaacacttttttcaccatgaaaacaacgcccctgcttctcatcatccccctgctcatgacggccggagccctggcggccagccaggatgatttcaacgtccagaccgcttcctcccgcatggtcaagcatgaagacgggtcgcgcagctactttgaaaagaccggggacggcaaggggatgaaaaaaaccacttacaacatccacaacgttctcgtttccgtaaccctctacaaaagaggcccctttggagaactgcgctcatgcctgatctttgacgggcagaagaacgaactctttttcgtacgctacggttacgacggcaacgccaacctgagggaggagcaaatgttcgattccaagagcaaggagctcgtgcgccgcttcctttacacatatgacgacatgggcaaccgcagcaagcccgtgtgcatcacgctggtcaagagcaccaaggacattgagacgcacgccgttcccaccgctccggaaaaggacccctttgccgacgattttaaaaagaagagcaagtaagcgccggacccgcggggcaatggttccccccttcgcgcatgccatccgttttctccgtctttcaaccggccgccgtctctgtgatgcgcggccggttcgacgttataccgccgtgcgggaaaattgcggcgagttccggagacggacgttttctttccccagaaaaagacctggtccaaaggcatgcccgaggtttgaaacacggcaaatccgcgccaaccaccctggccaggcgcacgacggcccatttaaaggaggaacagcttcctaaaaagcccttttattctccatcgctggcttccagcctgttacgccagcggcgggccacccaggggcgcaccagcccgtaaagcaggtaaatggagaaaatgaccgcgggcatcacccacgggaatttgaagatgcagatgaccgtcagcacaatgagcacgatcgcgtacatggtcccccgcgtgcgcatgttgatgtgcttgaagctgggataaaccacccggctcatcatcaggacggacacccccgccatcgccagggcaatcacgtacttgaagacgcccaggtccatggccccgttcggagcccttcccgccaggtacatcaccaggtacatggtggaaaccacggctcccgccgccatcggaacgggcagccccacaaagtcgctgctctgcccctccttgcggggagcggcggccatgcagttgaaccgcgccaggcgcagggcggcgcacagcaggtacaggatgcctatgccccagccaacctccggcggagaaagctggaacaggacggccttggccaccagcagcgcaggggcaatgccgaaggagacgatgtccgccagggaatcgaattcccggccgaaggggccgtcctgcccgcgcatgcgggcaatgcggccgtcaaacaagtcaaacaggcacgccgcgaaaatcaggaacgtggcattctggtaataggagaaggccgccacggcgtcgctgtccgcctggttgatcccttcaaaaatcgtcagaatggcgaaaaacccgcacaccaggttccctgccgtaaacaggttcggcagaatgggaatctcaggttcgtccggaaaaatcttcttgtccatgatcggtgtccagtggggcgccccgtgaagggcttacccgttaatgatgttgcgggccgccgcggccagggcctggggatcggcatcctgcggagcggaaccgcgggcctggtccggacggccgccccccttgcctccggcaagagcggaaacctcgcggatcatatccccggcggacaatccgtccgcaatggcatctttgccacaataagcgcccaggagcaaggaagaactgtccacgcacagcaggaaggcggcgcccgcatactggcgctttttcaggccgttcagcaattcctgaagcaattccccggccccttccgccacctggatcagggaggcggggtcatcggaaagccattcattcagcagggcgtcagccctggcggcggactgcccggcgcgggccttcctaagcttcttttccgcctccagcgctgtctgcttgaaatgctccacggaggcgtcgaaacgcgccagggaatcattcaccgtccggatgtcggaggctcccagggcggacagccccggcttgtcttcaatcgtgggaacaggaacctgttccagccccatgtccgccagctcataattgacttccttgatcttttccaccgccttggcgatttccaggctccgggcgacgacgtgctggcgaatcatttccagggcggagtcccccgtcatggcctcaatgcggcgcacgccggaggcgatggccccctcgctcttgatcttgaacaggcctatatccttcgtattggcaatatgcgttccgccgcagaattccatggaaacgccgtccagttcattcctgcagccgcccacctggaccacgcgcaccacgtccccgtacttgtcgccgaagaactgggcaatcgcggaattgccctttacgtccgcataggcgcgttccgtgcagtgcaccgggagagccgcctcaatccagccgttcaccttctcttcaatcaggcggagctggtccggcgccacggcggcgctgttaaagtcaaaacgcaggcggtcttccgaaacgaaggaaccctgctgggccgcatccgggctgactacctggtgcagggcgcagtgaagaagatgggtggcggtatggtgcgcctcaatgcggcggcggcgttccgcgtcaatgctcaaatgcacgcggtcgccgggtttcacgtccagcccttcgcgggcttccaccacatgggcgcgggcattgccgatctgctggacggccatcacatggtagctctccccgccgatttcaatcaaccctgcgtcagacacctggccgcccatctccgcataaaacggagtcttgtccgtaatgatgaacagggaatccccctggcggctcacttccagcaccgtggcggcgcattcgtccacatcgtatcccgtaaattccgtcacggcgtccgtcttcaaatccagggcgcgcaccacctcgctcttgcgggcggcgcgggcgcgttcccgctgctcctccatcagcctgttgaaccgttccatgtcgatgtccaggccgcgttcctccgccagcagcgcggtcaggtcaatggggaagccgtacgtatcatacagtttgaaggcgaactcgccgctcacctttccggcggaagccgtctcagcgtcaaacagctccaggccgcggtccagcgtttcattgaagctggcctcctcacggttcagaacttccttcacggtagaggcgcgggcggacagctcagggaacacctggccgaaggattccaccagcgtatccaccagttccgccaggaacggctgggtgaagcccaggcggcgcccgtagcgcacggcgcggcgcagaatgcggcgcagcacgtaattacggccattgttgccgggaagaatgccgtccgctatggaaaaactgagcgtgcgcagatggtcggcaatcacgcggaaggcaatcgcctcctgaagggtgtcgtcccccgcctccactctcttggaaccgggcgccggatacacgtccgcgtacttccggccgctcaatgcctccagacggtcgaacaggggacggaacacgtccgtggcgtaattggacggcttgcgggagaaatccttgaacccgtccgtgcactgcatgatggagcacgcgcgttcaaaacccatgcccgtatccacgtggcacgccggaagattgcgcatggagccgtcgctctccgcattatactggataaacaccaggttccagatttcaatgcactggtcggaatccttgttcaccaggctgcccttcgtattcccctccggggtcaggtccacgtgcagctcggaacacgggccgcaggggccggtttcccccatcatccagaaattatccttcacgttcccgtgcacgatctgcacgtccgggtccagcccgcgggaacggaacagctccgcccagtaatcccatgcctcctggtcaaactccccggggtcgcccttggccttgtccggggcgtacacggtggcgtacaggcgttccgcggggaatccccaccgttccaccaccagctcccaggcccagcggatggcttccttcttgaaataatccccgaaggaccagttccccagcatttcaaaaaacgtgtggtggtaggagtcataacccacatcctccagatcgttgtgcttgccgccggcgcggatgcacttctgggtgtccgtggcgcgggcgggcgtccaggggggagtccatacgcccaggaaatacggaacaaactggttcatgccggcatttgtgaacaacaaaccggggctttggggcatcaaagaagcggagggcacgaccgtgtgctgtttctcgcggaaaaagtccagaaagctttggcgtatctcggtggcggtcatcatatcaataataggaaaagtaaaagtcgccggattatgcctgttccgcccccgttagtaaaccgctaattccttctccgtcatgacggctgcatttttgcttgtaataaattatacatgcgtataaataaagacatgaaaaagctggtgatcctcctgattcttcttgcggcggcaggagcggcagcctggttcatctaccgggaagctccgtccgggcctgaggacaaggccgttctttacggcaatgtagacctgcgccaggtggacctggccttcctgatttccgaacgcattgattccgtgctggtagacgagggagatacggttgttcccggccagaaactcgccacgctggaaacggtgcggctgcaacaggccgcggacgaggcccggcagaccgcggaggccgcccgccagaactacctgcgcgttaaaaacggaccgcgcgcggaagaaatagcccaggcaagggcgaacgtgcaggcggcggaagctacgctgaacaacgccggggtgcgcagcaagaggctggtggctctggctgaaaccaaatccatctcccgccaggaggcggacgacgccatcgcctcccagcaggtggccgccgccaatctggacgtagccagaaaacagctggagctgctgctggccggttcccgcgtggaagacatcgcccaggccctggcccagtacaaccaggccaaagccaacctgaccatcagggaacagaacctgaaagatgccgtgctttacgcccctagcaatgccgtggtgcgcaaccgcattctggaaaagggggacatggcctccccgcagaaacccgtttacaacctctccctgaaccataccaaatgggtgcgggcctacctcacggaatcccagctcggcaaagtgaagcccggcttctccgccaccgtgcacaatgacagcttcccggatacggacttcaagggaacggtgggcttcatctcctccgtggcggaattcacccctaaaaacgtggaaacgccggacctcagaacggccctggtctatgaagtgcgcatcatcgtggacgacccggacaaccggctgcgcctgggcgcccccgctaccgtcaccatccccctggaccagaacgccggaacgcagcctccggaacagcccaggccatgactacggactcccagcccctgattgactgccggaacgtccggaaaatgtttccggaccccgccggcgttcccttcgcggcggtggacggcgtttccttccgcctctccgccggggaaatcgtgggactgctggggccggacggcgcgggaaaaaccaccctcatccgcctcatcacgggactgatgaaaccgcacggcggctccatctccgtgctgaacctggactccgtgaaaaaaagccgggccatccaggcctccataggctacatgccgcagaaattcgggctttacgaggatctcaccgtgcaggaaaacatggagctttacgcccgcatgcacggcgtctacggccaggacagggaaaaacgcttccgcagcctgctctccatgaccaatctggaacgcttcaccacgcgcctggcgggcaagctctccggcggcatgaaacagaagctgggcctgtgctgctccctggtctcctccccgcccctcatcctgctggacgagcccaccgtgggcgtggacccgctctcccgccgggaactgtggaacatcctgaagcaattctccggggaggaaggcgtgggagtgctggtcagcacctcctacatggacgaatccgcctactgcaacagaaccctcatcatgtatgaagggcgcctgctcatggacgccccgccctccgacgtcattgcccgggcggaaggcatgtgcgtcacggtgcgcacgccggaggggctgcatgcgcgccagttccagagcaggctggccgccgtgcccggcatcatcaacgccaccccgcagggcaacaccgtccgcatcatcgttcctcccggccaccctgcgcgggaaaagctggaggaataccaccccaaacccgcgcagccggacttctccgacggcttcatgaccctgctggccgatcaaatggacctcgctccgcaggacatccccgtccctgccggaccgccggaaccggaacaggcggaaaacggggacaccgtcatccaggtgacggacctggtgagaaaattcggcagcttcattgccgtcaaccacgtcagcttctccgtccgcagggggcaggtcttcgggctgctgggtcccaacggggccggaaaaagcaccaccttccgcatgctctgcgggctgctgcccgccagcggcggcacgctcaacgtggccggggcggacctgaggaccgccgccgcgcgggcgcgcaggaaagtgggatacgtggcccagaaattctccatgtacggcatgctcactacgcggcagaacctggaattcttcgccggggcctacggcatggccggaaaggaacggcaggaagccatccgttccatggaagaggaattccacctgaccccgtacatgaacgcccccgccgcgcacctgcccggcggctacaagcagcgcctcagcatggcgtgcgccctcctccactccccggacatcctctttctggacgaacccacttccggcgcggaccccctggcccggcgggacttctggctgcgcatcaacgccctggcggaaaaaggcgtcaccatcatcatcaccacgcacttccttggagaagcggaattctgcgacaacatgctcatcatgatggacgggaccacgctggcggaaggctccccggacgatatccgcaaacacgcccctccgcgggaagacggcgcccccgcttccctggaagacgccttcctgtccatcacggaggaacacatgaagaaaggaggggaagaagcatgattgcctccctcaaaagaatcggagccctcatcgtcaaggaactccaccaggtggtccgggaccccggcaacgtgggcattgcggtcatcctgccggccgtgctcctgctcctcttcggctacggcatgagcatggacatcaaaaacgtgcgcatcgcgtacctggccgttcccgcctccagccagtccacggagctggaaacgcggctcaccctctccaggtacttccagaccgcgcgcgtcttctccacccgggaggcggaagaaaagctgcgcacccatgaggcggacgccttcatcgccctgcaaagcgacgcgccggacacgctcaacggcggagtcacgaaagtccagatcgtggtcaacggcgtcaacgccaaccaggccaccctcatccgcaactacctccaggccgtcgtgggatcctgggcagcctccctgaacggccaggccgcccccgtgctggacgtgcagacgcgcacccgctttaatgaagccaacgacagccactactacctggtccccggcgtcatcgtcaccatcatgaccatgatcggggcgctgctcacctccctggtcatggcgcgggaatatgaacggggcacgctggaaagcctcttcgtcacgcccgtgggcagcggggaaatcctgacggccaaggccgccaccaacttcctgctgggcatggtcagcctggccatctccatgatcttcgccgccttcgtctttgacatccccatccgcggctccctcatcctgctgctggcggtctccgccctgttcctgatcgtggccctgggactggggctggtcatctccaccgccaccaaaaaccagttcctggcctgccagttcgccatcatgggcaccttcatgccggcgctcatgctctccggcttcctgtacgacatcctcaacatgccccccgccgtccgggccatcacctacatcatcccggcccgctactacgtcaccctgctccagaccctcttcctggccggggacatcccctccgtcatcattccgtgctgcatcacgctgggcgtctttgccgtggtgctcatgggcatcgcccggctgaaagcccccaaatccctcgaataacgccatggacttcctcgtcagaatagcctccctcgtcaaaaaggaactgctggccgtgctcagggacaaaaaaagccggatggccctcatcatcccgcccatcctccagatagccatcttcggctatgccgccaccatgaacgtcacccgcgtgccgtacgccgtgctggacaaggacgggggagaaacggccgcccagtacatcgcggacctggaaggcacgggcatcttccggcggcaggccacggcggccacggaaaaagacatcgaccgcatgatcgacaaccgggaaatcgtcgtggggctcaccatccccccggacttctcccgcaacctccagaccgggcgccccgcctccctccagctcattgcggacggccgcaacacgaacacggcggccatcgccctcagctacggccagcaaatcgcctccgcctacggagcggacctgcttgccaaaaacggcggatcctccccggtggaaatagaatcccgcgcctggttcaaccccaacctcatcacccgctggttcatcgtccccggcctcattgccgtgctcgtgctgatcaactccatcctctccggcgcgctctccatcgcccgagaacgggaggaaggcaccttcgaccagctcctggtcgccccgtacacccccggagaaatcctgctcggcaaggggattgcctccgtcatcaccggaatcatgcaggccgtcttcgtggtgctggtagccatgttctggttccgcatccccttccagggatccgtctggctgctctccgccgccctcctgctcttcatcgtcacggcggcggccatcgggctgtgcatctcctcctttgcccagtccctccagcaggccattgtgggcaccttcctgctgctggtgcccatggtcatgctctccggctttgccacacccatctccagcatgccggaaatctttcaggacctcaccctgctcaaccccatgaggtacggcctggaactcatccagcgcatcttcctggaaggagccggattcctggacctctggcctctcttcgcggccatcatgactgttacggtggtggccgttctggcagccattttctccttccaccataaaatctcctgacggaaaactttgctttcccggccccggaacattctggtgcccttttgccattagtctttcgcctttaatattttcatcatgccaatcccgtcacccgtataaaaatacttgcatccggcccgttttttctattctatttctctcgttccttgggaacatgggctcgtcgttcaatggataggacatcggtttccggtaccgacgatgtaggttcgattcctaccgggcctaccagacttttcataccgcaagttgttgtttgattgaaatcgcaagacatcggaacggcgtttgattacccctccgcaccgtctggcggcaacgttccgcctgtgcaggttattccgcaccacatcctgccggcctcccggaaacatcaaccgcaggacattccccgcccacttaaagggcggtccctttcttcggcatgaaaaggcgggacatgtccactccctcaagcttcagaagcctgattttcgcggcaattccgccggcatagcccgtcaggctcccgcctgcgcccaccacccggtggcatgggatgatgatggaaatggggttatgccccaccgctcctcctactgcttgagcagacatgctccttttattcccgagcgcggccatcttccgggcaatctctccgtaagtggtaacctctccgtaagggatgtcgcagagaatcttccatacggcctggcggaactctccccccacgggggccagcggcaattcggctatcggaggcctgccgcccgcaaaatacctgtccagccagtctcttgccgcggcaaataccggcaggccgtccctttcctccatgtccccgctgacggtatctccaaaatacttctggccctccagccacaagcccgcgagatgttccccatcgctcgccagcgtgagcgacccaaggggtgacgaatagtgtgttgagtaatacatcatctttctattgtttcagtgaattccataaattgacggcagcatagccgcgccacggcctccagccttcagccagagcaagaatttccttttgcgtgcgcggggagagcgcccctctaatgccgggatcggttgaaggaaaggcatccgtccatccaaagacccgcatggcgatatactgcgccgtgcatattccgatgccggggagccccgccagctttttcatttcagcctcaggatcggcccggaaactgaaatcaatgctcccttcttcaaacgcgcgcgccagctcgacaatcgccctgcccctggacgcggtcattccgggaatgccccatccggcgcttcccggaccaatcagggaaagaatcttccccggcgcagggaacgcatgcgtcagctcctccatccccgtccgcacgggctcgccatggctccgcgccagcctccccgccagaacattcgcggctttcatggaaatttgccgtcccagcgctgtccgcaccgccagctcgtaagggtcaaagcagccgggcaaacgggttcccggaacatacagccccggagacaggccgttcatggaagccagcgtttcatccaccgcggccgggtcacagtacaagtcaaacaaatggcgtacccttgcaagcacctgggacaaggcgggaagcagagacctcgcgatcaccacgatcagcgcatttttcacggggcaatggcccacccgtatccagccatagacatctttcccccttctggttgcaagacgcacggtgcggccatactccccgccgcgtacggcctccacaccgggaatggcccgcagcgcgaggaactcaagcagcctctcccaccggtagggagggcggtaaggcagcgtcagcgttattccggaaccctcctcctcttttccccccttccccagcttccgcaatgccgccggggaaagcctgtattcctttttgaacaattcattgaagcgccgcaaactgccgaaccccgcgctcatggcaatgtcaagaaccgagagcctcgtgcttgtcaggagattcttcgccagcagcagccggagagtctgcaagtactggatgggggaaacattgaactccgcggtaaaaacccggcgcaaatgccgcccggtgcagcccaggtgggcggcaagctcttccaggctttccatgtctccgcaattctcctccaggaaaccggccgcacggcgcgccagggaagcggcggcgtccaccggagcggttccgggcgccagctccgggcggcattgcaggcaaggccggaatccggcccgttccgcttcagccgctgtggcgtaataggtgcaattcccggccctgggcagctttgcgcggcatatggggcggcaataaatgcccgtagacgccacccccacgaagaaatggccgtcaaaacgggcatccttggatttaaacgcggcataccaggccttttcatttcctttcatggttttgcaaactccacggttgaggctcatgatagcaaaccgcggacatgattcccgccattttcggacatgcatccaaaaaaattattttgacattggggaataattatataaccaattacgtaatcagttacatttttaacaatacaacaggagacgggaatatggatttcttcaaccggacaggaaaaatggccattggaagcagactgcggatgctgacggataaaataacgaatgacgccgccctgatcttccggatgtccggcgtggacatccgtcccaaatggtttcccgtattctttgtcctgtcagagggggaagccaagaccatcacctccattgccagggaaataggacattcccacccgtccgtcagcaacattgtcaaggaaatgggggccagggggctggtgaaggaaaagaaggacaaagcggacggacggagaaacctcgtcatgctgtccgccaagggaaagaaaatgtccgatatcatggcggaacaatatcccgacgtggaagccgccgtggaacaaatatcccgccaaacccggaacgatctgtggcgcgccattgaagaatgggaaggcctgctggcggaaaaaacgctgctggaacgggtgaaggaagcaaaaaaggaacgggaaggcagggatgtctccatcgttccctacgatccccgctaccgggccgctttcaaggcgctcaatgaagaatggattacggcgtactggcagatggaagaaccggaccatcacgcgctggaccacccgcaggaacacattctggacaagggcggccacatcttcgtggcgctttacagggaagagcctgtcggcgtgtgcgccctgtgcaggaaggatgaccccgtacatcagtatgaactggccaaacttgccgtcagccccagcgcgcagggcaaaggcatcggcatgctgctgtgccggaccgtcatcgccaaggcgaaagaactgggctgcaaaaaaatctttctggaaagcaataccctgctccgcccggccatccagctatacaggaaggcgggattcagggaagtggagatttaccgcccctcctatgaaagggtggatatccagatggaactggcgctccagtaatgcgccgccatcccggcccgttccggaggaagggccactatcctttcctccggccaagaaattcatgcccctcatatcgccgtcaaatggtcatctctcgttttccggtgaagcagcctggtatctggtgaacaaatttcatcaaaagacacgaagatgatacccccggtttgagagctggacatcagggcgccaaaacaatcaaggccataatcgtccctgactgcgggacaatcgatgattttcagaatcacgttatgatcctcgcccccgtccgtggtgatatggtcgcctatttcaatctcctctccggaaaaatacctcttcatcgccgtttcctgatgttcggtttttatcatgaagtcaccatttctccaactggttccgtgcccggcagttttttcttaggaaaaaaatccggagcatgccgttccttcatgccatgaacataacaccttctcctcaaataccccgtgatcaagaaaaaaatgtgggcagccagagcctctgatctttttttaaaaatctcccttgttccggacgatggcgaaagtcgcactgccatcaagggaaaaggcaaaggcgtccgcgtccttcgccttttccatgccccaacgccaacaaggccgtttcctccgtgcagaggggaaactgcctgctgtttttccctccagcccgttcccttcatttttccgcttccttatcaagcgcagccactccctcttttatcgggttcccggcaaaaaaacgaatctccggactaggaagaagagaagttcctttcagcacggcgcgaccggagaaagagatactttccctattagtctgacggcgctccattttcctctggaaattccggtgctcaaccaccttcctccaaaccgtttcattcaaaatcgccgccttttccaaaaacctccctttctttcattttcaagcctttctttaccctgtccaactggacttggcaggcaaatcgcgttatgatgcggccgctcctttcctcatgatttccgctttaaccgggatcatgaagcgtacccatgaaacagagaaaaatcatccatgtggacatggatgccttttacgcatccatcgaacagcgcgaccatcccgagtaccgcggcaagcccatcgccgtaggaagaccggagatgcgcggcgtggtggcggcggccagctatgaggcgcgccgcttcggcgtgcgttccgccatgccttccatgaaggcgatgaagctttgccccaagctgattttcacccgcaaccgcatggacgtgtacaaatccgtttcagcgcagatacgctccatcttccaccgttacacggacctggtggaacccctttccctggatgaagcttttctggacgttacggaaaacaagccgggcattccgctggccgtcgacattgcacggcgcatcaagagggaaatcaggcaggaacttcatctgacggcttccgctggcgtttcctacaataaattcctggccaagatcgcttccgactaccgcaagccggacggcctgttcaccattcatccctcccgcgcggaggaattcatcgcgcggctccccattgaggccttctggggcgtcggccacgccaccgccgaacgcatgcgcgccctctccatcaccaacggggcgcagctccgggaacgcagcctggatttcctgctccgccatttcggcaagataggggggatcttctacaacttcgcccgcggcatggacgaccgccccgtggaaccttcccgcatccgcaaatccgtgggctgtgaagaaacctaccgggcagacgtcaccagggcggaggccctggaacaacaccttcccctgctggtggaagagctcacggggcgcttggcgcgctccggcttccggggcaacacgcttaccctgaaggttaaattcccggacttcgtccagaagtcccgctgcatgaccgttccggattccctgacggagaaggaggacatcctgcccctggcccggactttgatggaagacctggattccggggaccgcacgttccgccttctggggctgtccgtctcccacccccaggaagaacagcggcaaggaatctgggagcagctttggctggatttagagtactaatcctcccacagactcccatatttttagtattctccccttaaaatcaaccttatccacaagatattggtgtatgaatgagcgaaatccgctccaacctggtcataggtacgtatgaatcaggaagaacgtagacactgggcatcatggataggaacgattgcggaaggggtggcaggcgtcatggctgtggacggcggaattcccgcctcccagggcgtgcctgatcccggcccatcccgaacgcgccgtcccctcacggaaacggaaaagcgcatcattgagcaccagggaacggaaccgcccttttccgggcagttcgtcagcttctttgaacaaggcacctatggctgccgcaagtgcggggaagccctgttccggtcggaagacaaattcgacgccggatgcggctggccctgctttgacgattccctgccggacgccgtcagaagcatcaacgcaggccaggggcggcgcacggagatcacatgcgcgcggtgcggagcccatctggggcacatcttcaccggagaacgcctgacgccgaagaacacgcgctactgcgtcaattccctttccctggaattccaggctgcgccgcagccggccatggcgaacagcccccattgacgcgcacggcacggaaaaaaggaccggacggaaaagccgggaaccggataaaagctccgggaaaattccattttccggaagaaacgcgcctctgaaacattcattcccgcgcctgcgtaatgtggtatcatgagaatgaccaccctgcgcatcatcccggtcctgctggcccttttcctggcgcacgccatgggcggggagcccagaatcgccattttgggggacagtatcccctattccggacaatggcctgccctggtggaagcggccctgcggcaggctccggcctaccggcacgcggaaatcgtcagcatggcgctccccagtgaaacggtctccggcctgtcggaaccgggccacgccgggggcgccttcccccgcccgtgccttcatgaccgcctggattccattctctccaactacgcgcccaccctcgtcattgcctgctatgggatgaacgacggcatgatgcagcccttttccgaatcaggcttccaggcctatcaacaaggcatggaacggctgaaaaaaagagtggaagacgccggggcccaattcatcgccatcacgccgcctccctatatggcggataccccggaaaaggatgcggcccgttacaaccaggtgctggacacttatgccgcatggctcgccagccgtaaaaaggacggctggaaggttgtggacatgcgcccggagctgggccgccaaatccgggaagcgaagaaaaggaatccccgcttcatttacgccggggacggcgtccatcccgggcaggagggccacttcatgattgccagggccatttggcctcccctcgcctccatcctccgcgtgcccgcccgcgtccgttttccggaaggggacgagttcaggaaagccctggagcgccacaacctgtacaagctggcgtggctgacggaaacgggccaccgccgccccggcatcccgaagggggttccggtttccgttcttccctgcatccgggagggagtggccgtcgcggaatggcacggcttcccgtcccttcacttcaaggtagcgggcaggaacgccaccctcgttctccccaaaaccccggcggaaaacaggccgtggatctggcggcaggaattcttcgggaacgagccgcaggcggacatagccctgctcaaggaagggtttcatgtggcttacgtggacgtgcagaacatgtacggcgcgcccgcagccatggacatcatggaccggttttatgaaacattggtccgggactaccgcctttccccaaaaacggtgctggaagggttcagccgcggaggcctcttttccttcaactgggcggccctgcatcccggccgggtggccgccatttatgcggacgcccccgtttgcgacgtggcgagctggcccggcggcagggggaagggaacaggctccccggaagactggctccgcctgctggacgtttacggcgctacggaacaggaagccctgagcggaaagctgagccccgtcaacaggctggcgccgctcgccaacgcgcgcattccggtgctcgccgtggtgggggacgcggacaacgtggtgcccctggaggagaacatggccgtagtggaacggaaataccgcgccatgggcggcagcatccgggtgatccataaaccgggagcaggccaccatccccacagcctgccggacccggctcccattgtggaatttatcctgaaatccgttcgcgggaccggctccgccgcggcggaacagggaacgcccgtatccagaaagcccttgtcccccagcaggaaagccccttccgcattccccgttcgtcccgcactggggaacgggggggattagcttgactttcctgtaatgtcgcctattctgactcaagcattatttgcaaccactcacacttattatgaccgaccgcagaattgttatcaccggcatcggagtgatcagccccttgggcaatgatcttgcatccacctgggaagccatgaaggctggccgcagcggcattgacaccatcaagtccatggatgtcaccgactactccacgaaaatcgccggtgaagtcaaggatttcgatcccaccccgtatttcaagacgcccaaggacgcccgccgcgtggaccgcttcacgcactttgccatgggcgccgccggaatggctctcaaggactccggaatggatctggaagcggaggacaaaacccgcataggcgtcatggtgggcagcggcatcggcggcctcggcacgctggaaagccagcacgccacgcttctttccaaggggccggcccgcgtgtcccccttcatgatcccgtacatgatcagcaacatcgcctccggcctcatctccatggaatacggattcggcggcccgaacatgtccatcgtcacggcctgcgccacctccaaccacaacatcggggaagcctggcgcatcatgaaattcggcgatgcggacgtcatggtctgcggcggcgcggaagccaccatcctgcctacgggcgtctccggattcagcaacatgaaagccctcagcgcccgcaatgacgaaccccagcgcgcctcccgcccgtatgatgtggaccgcgacggcttcgtcatgggcgaaggctccggcgtcgtcattctggaaacgctggaacatgcccagaaacgcggcgccaagatttacggggaactcgtcggctacggcatctccgcagacgcccaccacctcaccgctccggacccggaaggccgcggcgccgcacgctgcatgcagatggccctggaacacgcaggcatgaagccggaggacattgactacatcaacacgcacggcacctccaccccgctgggggacatctgcgaaatcaaggccatcaaggccgtctttggcgaccacgccaaaaacgggctgctcatcagctccaccaaatccatgaccggccaccttctgggcgccgccggcggcgtggaactggcagcctgcctcatggccatgcaggaaaacatcatcccgcccaccatcaacgtggacaaccaggacccggaatgcgacctggattgcgtgcccaacaaggcccgcgaggccagagtggacgccgtcctgagcaactccttcggtttcggggggcataactcctccgtcattgtgaagagattcgcctgaccctttcaggaaaccccttcccggcggaagcgctgatgtttgtgtccaccgcagccatcgcgcttccgccttcttcatttcacagccatgccttccaaaacgcaccaggacattctgctcatgcggtgggccctgttctccgtagcggggatcatcctgatcgtggtgctgtattccctgggcgtcacccccgcctgggcgcaagccctgaagggagccatggcctccgctccgtttctgctggctgcagatgctccggccctctcccccggcatgggcttcctgctgtgcattgcgctgacgctggccctggtttacgacctgatcctgatccgcggaacactccgtaaaacggccgttctggccgccttccttcttctgctggcctgctttaccccggtgctggggctgtggggcatcttcttcaacgccgttccgtgcctgctctccgcggggagcgcgggtgcgctcgccatcctgtggccccagccgtcacccggcccgcatcattccgaacatcctcccactcatgaataatctggactatccccttcccgtgcttgaactggtaaccgccctcaaacagcttccgggcatcggcacccgcggagcggaacgcatggccttgtggatgctccaggggcacatgggggaagcggaggcgattgcccgcaccatcggccaagcggcggaacacgtcacgccgtgccccgtctgcggctttttcagcaccgccggagaaccctgctccgcctgccgggatgaagaacgggacagccgcctcatctgcgtggtagaacaggccacggacgtcattcccattgagcgcagcagcgcctaccgcgggctgtaccattgcctgggcggcaagctctccccgctggacgacgtggagccggaagacctcaatatccagtccctggtggaacgcgtcacccggctgccgggctgtgaagtcattctggcaacggggtccgacgtggagggggaagccacggccacctacctccaccacctgctcaaagaactggactgcaagatttcccgccccgcccagggcctgcccgccggcgccggcctcagccatgcggacacgctgacgctgatgaaagcgctggaaggcaggacggccctttgaaaacgctctaaaaacaaacccggactccctttgaaaacaatcagtcacgcatgtagcaacatcgctgacaaccaattcattaatacacagcagattaaatctcacggacgtattgtctggattgacatctgccgggtactcaccatgctgtgtattatagcatcccatgccaatgtatggaactatttcagcgataatataataggcgcttggtccgtcttcgttttctttttcatttcagccttgtttattaagcaggacagtaaaaaggcgctcaattacagccgttttctcaaactgttcattccttatcttctctggtgcctgattggagcgttgatctacttcaaattcaatcttcatgccatctatgccaacatggttgccgttttcggctgtaatatcttcaacaccttccccgcctacggaatactgtggttcttgagggaactgctgctgttaagccttgtcagccctctgttaagtaaattgaatgatgcggcactgttgttatttaccgtcattttccaaattctgggggctgcccccgaattaatttaccatgcgggtttagatgacatcccctttttatttaaagcacagggagcgtacggcatgtcctggttcctgcttggtattttttgcgcgcgcaggaagcgcatcatccgtcttcacgcatggatttgcgagcaccttgcccttgtttcatccttgacgctggtaatgctgctgtgcgccgcagttggcaaatacgccatgcaggatgccggaggcagccagcatgccgccctcatattgatatccgtccaaaacatcttcatggtcattttccccatggtatgcgccatagcctgcacccggctatccccgggaacggctactaaactatccagcctggcgccttccgtctttttcgtctatgtcttccaccccataggcattatgctattctatcacagcatacccgccagcattgaaaacagcacgctgcactccatcctgaaattctttgaaccagttcttgtctttgctgtttcagtctttgtattcaacatcctcagacgctttaaaacggtgggaaaatggatatgcctttccacatgaaaatgccataacggctaaaaacagaataaaaatccggagggaggggccacggagcccgcatggcagaatccatcccgcaaataaaatggatctgcacaaacgtacccctgccgtgtgccaaaaagtccacgttcccaaatatgaggaggggaacgaaaacagcttgaaatatgccgttggaacctcaatcccccgtcattccgccaggccgtccacgcgggcgcggtcaaaatccgccgggcaaatcgtcacgttcacccggtcgcccggcttgagcacatctcttaacggagcgttctttttctccacaaaagccacagtagtcttgccgttcggcagggtggcgcggaaagccgtatccgcgatgcgctccgcaataacggccactgcctgcaccgtctggtagggataaagtttcatctggaaaaatcaggttacaaattcatcaatccgttcatcaggtcgctcccggtcttgagccccttctccgcggcgtcctgaagctggggcacgacgggagcgggaacctggtctgcggccggaatcctgacccccccgttacccttttccgtgccatccttccccctgccttccccggcccccttgttcagcaggcgcgacgcgacgtccgccacttccgccaccttgcccatgccgatctccgtcaggcggtctcccgccgccttgataagccgcgcggacaagtcttccgacgggttgtccagcgtgccgccaatgttcacattggcccacaccagattgcctccggctccctggcgggaagcggaaaacacgtcggaaaagcccggcagggcgctccacaggccgtcggaccgcaggcccacctgcaaccttccgttaagctcgcctccttttccgatttccagccagccttccaccctcaccagattttcgctctccaccagaatgtcggagacatgccaggcggcttccttatagcggaactgggcggacgccttgtgcagggggagctggcggaatctggaagaaccgcagaaaagggccagcctgtccaggacgggaagcccggtcagcatcccgtcctgcaatcttaccagcccggccacatgcgtcacgccgtcccggccgccgcgcaggtccaccccgccgctcacactgccctggacatgcttcttccagtcattttccaggatggaagaggcgggaacgctgttcaccaccatattcgccgtccaggaggaggaaaggccgtcccagtcccccttgatgtccacatagccgccggcatccgtggtcaggcggcaggagggaacgttcacccgcctgctggaatggttgaactgcgccgtgccggacatcagggaaaactccggacagcccttgaagggaaggagcagcctgcccccctgcacgtcaaacttgtactggctggacccggcatcatgggtactctccacacgggttccgttcagggcgtacagcctgccgggaacaccgtaggagacggacagggaatcaatgctccccttttccaggcggaacgtatccggcaggatattcttttccacccagctcctgggtccctcttccttttcccggaaacggaagggcgccggagccagttgaagcttcagttccgcaatattcacggaggtaatcacaaaggcgcgcttcagcaaatcccagcggctgaactccgtttcaatgttttttgcctggagggaggttaagaactcatgcccctccatcgtcacgccgtcgcaccggatgccggaaccgtcccagtccagcggggctatcctggcggcatccacattcatgtcgtcaacggcggactgccccagcatggttaaaaaatcgtcactcttcaaataggacctgacatacaggtaggagccggctaccgccgccacagccagcaccagagcccccagcacgccccacagcagcagctttttccaaatgcctccggcacggggctttttcctgcgtatcctcctcattctggacatggtaacagactatatcaaatccggcggcggtcaagcctccggattggacctccggctgccgcaagccacggataaacggacatccgcgccggttttcccccgcttaccgcgggctgtggtacaccttgtgccttccggacgccatggtgataaagagcaggaacagggtgtaggccgccagaaagcccatcggaataactgcgccatgctccccgcgtcccagcgcttcaatgggggcggcctgcttcacccagatgttctgggccagccaggtcaggaaaatcgccagcagcagcgtgggcgtcacgaacttcatgatgaagcggtagattctgggaatgcggatgacggaaccgtcttccagatccatcagcccccggtccactcccagcttccaggagaacagaatcatcatcaccatggcgcttacaaagaaacacagggtgcccaggaagaaatcatacgtatccatcgccagcaggttgccgctgtaccaggcgacgatcagcgtgcccgtggccgtgaaaaaaccctgcaccaccacggccatcttgcgtttcaaccccatgaactcttcaataaaggacaggcccacctgcatcatggaaatggagctggtaaccgccgccacggtcaggagcaggaaaaacaggctgccgaagatcacgctggagcccatcttggcaaaggcctgcggaagcaccatgaaccccagcgcaaaagttccctgcccggcggctccggccacccccaggaacgccacggcggcaggcaccgtcatcatgccggcaatgcccacctcgcacacctcgttggaggcggccgcggaaaggccgctcaatgcgatgtcctccttcttcctgacgtagctcgcataagtcaggatcagccccgtccctacggaaaggctcaggaacacctgcccggccgccgctatccaaagttcaatgtttttcaggccgtcccacaacgtcacctcggtcagcctgcgggttccgccggacatttccacctgccgcacggcttcatccatggccccccggtgggaggcggacaccatggaaaccgtcttccactccccgctgtcccggtcctgctcctccaccagcaccttgctgggattccacatataccccagcccctgctcaatgctgcggtccggataggatgggtccggcgtgccgatgcacaaaatgcgcaccagcagcaccagggaaatcagcaggagtatcggcatgaaccagcgtgaaaacatctcgattcccttgctgatgccccggtaaatgattcccaggttcagcaggatgaccccaccgacgatccagagcagcccgttgttagacagcagggcgctcccgtccccgtacatccccgtgaaactgaaaaaggtctgcgccgttccctcagccgtggcaaatacctccggctgggtcagcatcttccagaaatagccgcagcaccacgcctccaccaccatatagtaaaaggccacggaggaagggcccagaaccgcgagcacccccaggaacttccacagcctggaccccttggtcaggtaccagaatacgccgggggcgcagtgggctcccatctggccgccgcgccgcccgatggaccactccgcccatgccacgggcacgcccaccagcaccagcatgagaccgtacgccaccatgaaggcgcccccgccgtactgggccgccagccccggaaaacgcagaaagttgcccagccccacggcgcttccggccacagcaagaatcacgccaattttgccggaccactcgtcttgttgcgcctttgaggatgacatgcaggcaatactgacaaaaaaagcttcattttcaagagaaaacaggcccttttgccacagagaaggcatcattgccacttgactttcgttcgttttttggaatcattcttttagaaccaaaccaaaaaaccgaccatgctcctcataggaaaaccggcacctcatttcagtgcaaacgcagttgtaaacggtaccatcgtaccggatttcagtcttgaccagttcaagggtaaaaagtacgtgatcctgttcttctacccgaaggacttcacgtttgtgtgccccactgaattgatcggcttccaggaagccctgggcgaattcgacaagcgtgacgtagccgtcgtaggctgctccacggacagcgaattctcccactgggcctgggtgaacaccccccgtgaccagggcggcatccagggcgtgagctaccccatcgtttccgacatcaacaagaccatttccgccgactacggcgttctggccggagacgaggaaattgacgaagacggcaacgtggaagtcaacggggaactgatcgcctaccgcggcctcttcctgatcgacaaggacggcatcgtccgccaccagctcatcaacgacttcccgctgggacgctccattgatgaagccatccgcgtggtagacgccctccagcacttcgaactgtacggagaagtctgcccccttggctggcacaagggtgaagcggccatgaccccgtcccacgaaggcgtggcctcctacctcagcaagtaagctgccccggcaatatttcaaggccgttcccttttccggggaacggcctttttgccgcttttctctaacatataagtattgacaacggacccttccgttctaatttacccggaatgaactacttcatgccggctttcctgttgatttctgcccttgcaggctccgtctgggccgcaaatgcccaagcgcctgaaaacatcagggaccttgaaacagcctatcaaaaattctgcaccaggcgcggggaagctcttcttcccgcattttcaaaaaaacttctcgccctccagcagcaggcggtcaatcaatccgactttgaaaaagccaaacagattcaatccgttcttcaaaacatcaaaaaagatattctctctccgccttcttccaacaccatcgacccgttcttcataggaaaggcgtggaaaaagaacggggacagcaacgaattcacgcagtttctggatgccggactgaggcggttctcaaaagacattaaacaaacagcattccagccccaggaccagtgggcggaccccggaaaatcctcccgggaaatagtggtcttcaccggggagcccctgcgcatctgggttaaaaaagacgactccaccatcattcaaatttacaaggactccagtactgactggctcaccctgcaagacggcaggcaaaacatcatcaaatcaccggagccgggattgaacaacctgcatcaggaattcctgacggaatactccaaggcgtgccagccgttaacccggaaatatctggccgccgtggaaaaaaggcagaagcagctggcccagcagggaagcatggaggaagcgatcgccatccacaattacatgaagccattcaattccgagggcagaccggtggaccagctgttaaacggaatctggaagaaccaggcgggagagctgtatgacttttccaataaatcaaaagcggccaagaaaggcccggacggttccctgaaattttatctggtttatacgtccgccagtcctgcaggggaatggaaaatggctcgtgtggaccgggggacggaaaagggcatggaagtcattttcttttccgccggaggaaaagtgtacctcattccgaacaggccctcccgctttttctctatcttgacgcgcgtatccggtacctgacggccctttaaggcgcacattcccggctatccctccttccccggccgcggcctctccctttccggaaatgccggaactgtcataaatcaggaggaatacgcgcacgccccttgagccgcacaggggtgtttgctacatccttggcatgaatatggatttcatggcagccgcatcctccagggaagatatctggacaagaaccatggattttctgaacatgccggactggctcaagctggagatggtgcagtccgtgggcgccaaaatcctgcatgtggtgatatggctggtggtcagctggattctcctgaagctgctctgccaggtgctccggaaaatcaccgccctgaaaatgtccccccaggcgtcccgcctgaccgttaaaatagtcaaggaggcaggctacatcatcatcggcgtggaagccttcgccctgatggggttcgacatcctcaccctgctgggcgcggccagcatcatcggcgtggcggtcggcttcgcctcccagacttccctgtccaacatcatcagcggcctcttcctggtgggggaaaagcaaatcaacctgggggacatgattgaagtgggcggcatcaccggcaatgtggactccatcaacctcatgtccgtccagctccggctgccgaacaacaccatggtccgcatacccaatgaaatgatcatcaaaaacccggtgagcaacatcacccgcttttccacgcgccgctgtgacctggacctgggcgtggactacaattgcgacattgaacacgtcgtgagcatattgcaggaagtggtcaaacagaacaagctctgcctggacgacccggctcccgtcatcatgttcaccggattccaggattcctccctgggattcaaaatcggcgcctggtgcctgaaggacaactttctggactgccagaaaacgcttgcccacgacatcaagcaccgctttgcggcagagggcatttccttccccttccccacccgcagtctggagagcagaagccccatccaggtggaaatctccggcacggcggagaaaaatcagtaggtgctctctttttgctttctttttgccccgtgaaatttcaatcttgtctgcgtaaaatccgcatctatgtctgacacatccgcacccgcctatcaaagaatcctcctgaaactcagcggagaagccctgcgcagccccggcagcatggacaacatttccccggaaatcgtcgcccgcattgctgaagaaatcgcccaggcgcaccgcgccggcgtgcagatcggcctggtcgtgggcggcggcaacttctggcgcggggctaaagccagcgtgcgcggcatggaccgcgccacggcggactacgtaggcatgctcgccacggtgatgaacgccctggctctccaaagcgcgctggaacgcgcgggagtcccctgcgtggtgcagtccgccattgaaatgaaaaacgtggcggaatccttcatccgcctgaaagcccgcacctacctggacaacaataaaatcgtcatcttcgccgccggcaccggcaatccgttcttttccacagacactacggcggccctgcgcgccagcgagatcaatgcggaagtggtcatgaaggccacctccgtggacggcgtttatgatgcggaccccaagaaggtttccgacgccaagcgctttgacgccatttcctaccaggaatgcctggaacgtcagctcaaggtgatggactccacggccttcaccctgtgcatggacaacaagaagcccatcatcgtattcgacatgcacacgccgggcaacatcacgcgcgccctgctcggggaacccatcggcaccaccatcagctgaactccgcacgcccctttttccaacctacaaaaaacacttagcacccaccacaatcatggacgcagaaacattaatattggaaacggaggaatccatgctcaaggccgtggacttcgccaaacaggaattctccggcgtgcgcacgggaaaagcctcccccggcctcgttgaaaacctggacgtgcacgtctccagctacggctccgtcatgaagctgaagggcctggccgtcatcagcacgccggaaccccgcctcatcctcatccagccctttgacccgagcaccgtccatgacatcggccgcgccatcaatgaaagcaagttgaacctcaacccgctggtggaaggccgctccatccgcctgcccattcccgccctcacggaagaacgccgcaaggacctcgtgaagcttgtcaaatcccaggcggaagaagcccgcgtgcgcgtacgcggcgcccgcaaggccggcatggactccgccaaaaagctcaaggcggacaacatcgtcacggaagacggccagcgcgatctggaaacgcagatccagaagctcacggacaagtacgtgaaggacattgacgagctggtggccgtcaaggaaaaggacatcatgaccatctgagccagaaccatccatccccaaccattttacgacaatgacagacaacgtaacaaacttcctcgcctccggcattgaaatcaagggaaccatccgtttccagaacgacatgcacatcgacggcaaaatcgaaggagaaatcatttccgacaagggaaaagtcaccatcggagaaaccgcccagatcaagggcgacatcaccgccggagacgtgcgcatctacggcaacgtagaaggcaaggtcacctccgaccgctgcgaactcaagcagcaggcccgcgtcgtcggggacatgaagacccgcagcctcgccatggaagaaggcgcccacctgctgggccgcacggaaatcggttaaaaccgcgaacctcattttttcatcaagccgttccttcctgcgcgagggaacggcttttttacgcccggtggcagggcaacccggcagaaaaagaggaatactccgcttgaaaaaccggtaaagacggaaaactcccatccgggagcggaaggctcccgcctttcgcatttacgttcgtccgaagcaaagctgggctttcttccctttctcccgcagccgcacttgatgagagccgggaggccctcattcccgggcggaacgccgattcccacttttgcggcaggcaggccaggcccccggtggaacctggccgccaacagggcaaaaaacgggaggtggagcaaaagccgctccgttatcccgcttcctcaggaaagtcaggaaaggggcggacgcacgatggaccaggaacgcggctgcgcggggtccagcaccttcttgataaaggcgttcacctggtccagctccatgttcctgatggcgactgtctgccgttcaaacgcatccaggggcagcccgaacaggatatccagagccagcatctggcacagggctccgttggactgcatggccagcaggcgggaggaaagggcggacgccttggtgcgttccagctcctcttccgtcatgccgcgctcatgaatcatctccagagtcttttccagccgccgcccggcttcttccagttgttccggagaggtgcccaggtagaagcagatgcctccggcgtccatgccgatgaacagggaggagctggcatagtaggccagcccggcttcctcccggatgttggtgaaaacgggaccggccatgtcactgcaccaggcctggaacagcagcgcctgcgccatttccggggaagccacgtccacgcacggcattcccaccaccagcacggcttgctgcttgtccagcacggacacctcccggccagcgcgcagcgcgggcgtgggagtcaggaccggcggcattccggccctcattccgccaaggcgcttttccagaagagggagaacctcctccttcctgacatctccggaaatgcatatcacggcattggaggcgcagatgatgcgttcatactgtttcttcacgtcccgcaccgtcagtgaagaaaggctctccggcgtgccggacgggggaatcccgtaggaaacatggccgtaggccaccttccgttcctgccggaacgccacggaaagcggatcttccaaatcctcctccgcatccgccacaaaggactccttctcccggaggaaggcgtcctccgggaaggagggattcatcaccacatccgccatcagctccagtccggaatccaggtcttccgccagaatctggcagcccacgctcagggaattgttgcctgtggaggtattgatggcccctccgatgtcctccagaaaacgcgctatgtcccctgcggaacgcgtggcggtccctttcagcaggcattcggacatcaaatccgtcaccccggcgtcatgttcattctccgcacggcagccggccttgaaggccaggcaggcataggccagcggaaggcggtggtcctcacgaaccactaccttcatgccgttgccaagcacatgctcgctcagggccgtttccgtcccggcggcggaaccgtcttcctccgcggcgttgctgcccacgggatccaggctgacttccgtcacattcggggaggacagccaggtggagcacacgcggtgcaggtcttccgtagtcacccgttcaatggcttcctgccattctgaagacaggttcaaattgcgcgccccgaaccagtccgcccccatttccgaggccactccggcggcggaactcctgcggcgcaggcggctgacccgcgtctgcttgcaaactctcttcaaatcctccgtaaaatcctcctgtgccagattccgcagttcctggagcaccaggtcccgcaccttgtcacgctgggcgcggtccacgtcaatgctgatggtgaacgccccttcgtcagtctcggactggttggaatgcacctcaatgctgtacaccagccccaggcggtcgtggaacttttcataaaaacgcgcggaacggcccccgcccaggatgctggccagggcggaaagggccggcgtatccggatggcctgaacagggcaggcgccaggcaaggttcagtttggaataaggcacggcaaattccttgcgcaccctgcgggaaccgaactggtgcggttcatggggaataagctcccggttcagggggcgggactttaaatcctccaccagcagttccagatgggaaaaaatctccgcggcatccacatcccccgcgatggaaagcaccacattgttcggaacatagcggctggcatggtaatccagcacgtcctggcgcgtcaggcagtcaaacgcggcgggttcccccagcacgggccagcggcgcggatgcttgaggtacaatgtctgcatcagaagctggtaagccacggaatcgggatcgtccgcgtacatggccatctcccggcgcaccacccctttctcccgctccagttcatcctccgggaacgtggggaaaaacaccagctccgtcagaaggttcaggaaaatctgccaggaatccgcagggccgtctatataatacacggtgcggttcacgctggtataggcattccagtggccgccgcgttcctggaccttgcgggccaggtcctgcccggaataatgctccgttcccttgaacaccaggtgttccagcaaatgggaaaggccgctcccctgccagtggccctcattcatggacccggtgcccacccagtactgaagggacactacgggatgggacttgtcctccttgatcaaaaccgtcaaaccgtttccgaaacggcgcgtcacaggctccttggctgaactcatgtttcttagcgtgccttaagacggcaggccatgcaagccgccgctccgtccacgccgcggcactgtcagacttaccccggttttaaaaaacgcagttgaatcgaaaacctccctaaaaaaaacatgctgactgcacatttttttgaacaaatcttaaactctgttactctatcagtcgtagaacggcagattatgtgccgtttatcatcaacaacaccaacctcacacatcatcatatgaaaaagatcctcgctgtagcagcctttgctttcgctttcagtgtcaacggttacgcccaggaagccgccgctccggccgattcctccgcccccgctgctcagaagtgctgcaagaaagacaaaaagtgcgacaagaaatgcgacaaggaaggcaagtgcggcaaaaaatgcgacaagccctgcagcaaaggtgaaaagccctgcgactgctccaaaaaggaagaagctcccaaggcctaacctcacggaaaccatcacaatgaacgcgaacccttgccgaaccctttcggcaagggttttctccaccgggtgggcgtaaaaccgtccgtcccgttgaccatgaaattacttgatttgaaccttcaacccattttataaactgtcatcatgaaaacgacttccattcttaccatcggctgtgcggccattgcgctgtctatcacctcctgcaccaacttcggttccccgaacgcctacaacctgaacgaaatcggcggcgcacaggaaacctataccggtacggtcaccagtgtggaaaacgtcaaaatccaggccaataacgccaataccggcaccggcatcggtgcagtggcgggcggcctgaccggcgccatgttcggcggcggcaacgccaagtacgccacggcagcgggcggcgccattctgggcggcatcgccggcaaccagattgacaaggccgtgaacaacacgaccggggaacgcatcaccgtgcgcctggaccagaaaaggaacggcacccgcaactacacggtcgtgcaggtcgccagcaggaacaacccgatccaggtcggacagcgcgtgcgcgtgatcatcggcaacaacggttcccgcgtgctggcctactaattggccctccttcactgaccagctacataccggcatgatcttcggcaccttacccggcggcgctccagtagaactgtttgaactgtcttccgacaagctgacggtacgcatcagcaactacggggggcgcatcatctccgtcgtcaaggacggcatggacatgatcgtagggcccaagcactttgaagacatgctgaaagacacctgttattgcggtgcgatttgcggccgtgtcgcgaatcgcatcgcaaaaggcaggttctccattgacggagactcccattccgtggccgtcaacaacggccccaaccacctgcacggaggcgtgcagggcttcgacagcaaaatctggcaggtgcaggaagccacgcgcaacacgctggtgcttaccctgcactccgcagacggggaggaaaactatcccggcaatctggaagtggtagccacctataccgtggtggaagaaaccctccacctccggctggaagcgtacgcggacgcagccaccatcgtcaacctcaccaaccacgcctactggaacctttccggcaagcccaccattgactccatgacgctggaggtgcgggcttccgcctacaccccggtggacgccaccaacattccggacggccgcatccttcccgtggaaggaacggactttgacctgcggaaggcagccctgctgggagaacgcaactccgccgcccatccggacaccgccgccggactggaccacaactacgtgctggattccgaacccggcgacaaaatcgccgccatccttctggacccggaatcccgccaccgcctgatcgtggcgacggacgcgcccggcctccaggtgtataccggggaatacctgccccaggcgcgccagggaatcgcgctggaagcccagggcttccccaatgccgtcaacacgccccacttccccagcgtcatcctgcgtcccggccagtcagccacgcgcaatatcacctggaccgtcaggtaaaaggcatatccgcagtcccctgcgcgggaaaggcaggaaatgttccggcgcgccaaactccggaaccctgtttttcagcttttcaggcgtgcgctgtcaagacgccgcataaagggcttccgccaccaccttttgcaggccttccgccatgcgttccatggaacggcccacaaaaatcaggtccgccacggaaatcagattgtcctgatactgttccggcaggcgcgtgaacgtatccgacatggccgccgcatgctccgccagcgtctccagcgcgggaaccagctccgccagagccttcccgtcccaggaggagacggccttgttcaccgctctgaactgctccgccatctcccggtaaacggggtccgcctgggcggcctcccggatgcgggggcgcttgttaagcttgttggccctcttggcgatcgtcacggcctcatccccgatccgttcatacatggaagacatgcgtatggaagccagcaccaccttgagatcggaggctacgggactgaaaaaagccagcagatgcaggccttcccggtccaccgtcatttccagctcgtccagctcctcatcatccgcaatggcctggttggaggcggattcattctgctgcagcagcccggcggcagccaggtcaagggcgctctgcgccttgtaggccatctggagcaaatgcgtattcagggaggaaagggcggcgtcaaactccctcagggtgtgcgcgtcgtgattcatgattaggaatattggcttgatgactggcggcgcttttgccggcatggtaaaaaatgtgctggcggcgcaggctgttccttttggcggaggatgcggccagcctccgtacaacgccggaggaaagggaaaaatgcccggctccctttctggaagtaaactttgaaaaaaccataaacaactctctgttaactgaatcttcccgtgatataatcctccgtttctttcatggaaggattggaaaaaatcttctccgtggaatcaaactccaccagtcttcccagcatgaaaaaaccggtcaggtcggaaacgcgggtggcctgctgcatgttgtgggtaaccacgatgatggtgaactcctccttgagccggtgcatcagctcttccacccgcaccgtggcaatggggtccagggcggaacaaggttcgtccatcagcaggatgcgaggcttcacggcaatggaacgggcgatgcacaggcgctgctgctgtcccccggaaaggccgttggcggaagcatgcaggcggtccttcacttcatcccataaggcggcatgcctcaggctttcctccaccgcttcatccagaatgccgcggttccttacccccgccagcttcaacccgtaggaaacgttctcataaatggtcatcgggaagggattggacttctggaaaaccatccccacctcccggcgcaaatggatggggtccagggacggggaagtcacgtccaccccgtcaatgcggatggagccgcccgtgacgcgggcctccggaatgcggtcattcatccggttgatgcagcgcagcagcgtggactttccacatccggaagggccgatgaacgccgtcacccggtttctgggaaccttcatggtgacatggaacagggattgcttgctcccataacaaaaatccagggaatccacctctacggcggtctggtcggcggcggctggatgcggagtcatgttcggtcaaatggcgcgtcctgcgccgttgaccgcatggtatcccaaaaacgaagctccaggtctactacgggtttgtgacaatttcttaacctggctttttgagaaaaagaaaaacacgcagcggatttagaatccgtcaagagactggaagaaaccagggagatgtcatggtacacctctcccaagtctttcagccggccgtttttactgttagccagtatcgtatcaagggagatgagttttctgactgtggacatgtcgtttccggaacttgatgccatcatggaagaaaggttgaggggctccaaatcgggaccgggcgtgtcccacgtggagcgcatcaccgtcagggcatccgtgctttcttccgaggcatgcggcatcaggttgatgcgcgccttctggttttctcccgttacccaccacgcaatgtatttacgcacgctggaatttcttttaaggccaatggttttggatgaatcgtccacacgcaccatgcgggcgtagatttcctttttgtcctggttcttggcgcctacgggcgttcctattgtgccatggtccaccaaggcgacactgcggaaattttggttggtaagggaacgtttgcccagcaggcttttgcccgcttccagcgtgctgagcctgcgcaggtccggatcggaaatgagccagcggcggaacatggactttcttcccgtatcgtaggtggaagaaatgttcatgccctgggagttagtcttgttgagccaggtgtcccagctgttccagacgcccaggatgtacggggcgttgccttcgctggtgccggaggaaaggatgcccgagttggcggaaacgcgctggtcgggccccagttcacactggagctgcccgagggccacttccagggaaaacctggcgagggatttggcctccgcggcaaagagctgtttttcggaaatgcggacctgtgaggatgcgatggtgagaaggccaacgctgaggagggccaggagcatcatcagggtgatggtggcaatcagggcaaaacccttgcttatatgtttaaatctttgggtttgcggaattgttcttttcatcgtaattttcctgaaaattattaaaatctattataaaaattgggagacgcaaagctgctgccaataggttttccggcacgtcatatcaacatacaaaatagttctttccgggcaagaaaaatagttctcgttttgcaagtaaaaacgtatctctaaaaagaaaagaccaaacgtgtttttgcattcacactcatttagttttatagtcaattaaaagtaaacggattctaaattcggtggattgaaaaaagacctgaacatcatgttttcacaggaaaaactgcctgaagatttccgtggagacacctctgatatcggcctccgcccgtacacgtcagaggacggcagcccaaccgagcagaaccgcccgatcggttcctggaaccagctctacctgtgggccaacgtgtgggactcctccacgaagagggaaggccaggacacttccgccgccctgcaatgggacggccgctcccccagcacattgattgcggctgatgccgccgcaaacatggaaatgatggacaaccgctacacgtacatgcgccatcccatcctgctgcgcttctactccttcgtagggattcagtacgtcaaacgcgaggcccagcacggagcccgcggaggccatattgacgtgcgcgtttccgtgatcccggtgtatgtctggtggaacccgtacaacgtggacatgaaattccaaggagcggaaggcggtccctggggctctttcttcggagagcaccgctacatgccgctcatgcagaccaataattatggccgcatgcaaggcaatctgatcgaaaactgggatccctctacggccacctattcagaatcacccttttccccgtattcccccaacgacggctataacaaccgccagattgccgactttggagcctccttccggaaaacgtcgcaattaacatcgggaggggtaggaaaagccggggagccttccacgctcaaagcgggcgaaatcgtcattttcgcccatcccgtcgtcgaacggatcgaacacggcaacatggtcacgcaatccaaggcaaacaagaacgatgtgcgcgtggacaactttgctttcaaggaaggctgggaccagagccccggacaggtcagttcctatgctatcaaccaggctgacggcattcagtaccagtatctttccggcagcggttatgaagacaggggaacggccatgatgtccatcaaatttgcggaaacgctggatgatctcaattacacgcctaacagcgttgttctctgcaccaagtatacagacgaattttcctccagttccaacaaactcggctccatcgtcatggtttccggcatcatggatcccaagcaaattggcaaagcagggaatttaaccgcaaacaccggagcagacatgaatgttttctccaaagccatgccctctattctgaacctgaactggggcgcgtgggaaaagcccctgcttgaccaggtcaaactgcctgcggacatgttcctggacaatgaaggaccggacgacaacctgaaacgccgcggcaaatacggctctgcggcccaggattccacgttcgtggcctactacggggtatcggtaaaatggggcaagcccccggtgatcggagcctacccggaaggcaaggactaccgcgccaagacatggcagcactccagccctctcttctggggtgggcagatgcccaccgcctccgagctcggacgcctctacagtccctaccagtttgaagtcaaaaacgccaacagcgacttcttccccatcaccatctccaacatcctctccaacgacggcaccaggctctcccccttcggcggaccgggcgccgagcaggtcaacaagatcgtggccgcggaactccccttccagcagccctccagcctcgccggcttcgcaggctgccgcctcaccccgggatggtacaggagcgactccaaggcggccatcgccaagcgcttcgcctaccagtccggcgtgccgggcgtggggatcggcaacgcttttgccgaccccatgctcccgcccgacaaggtcttctcccacaatgaaatcatgggagacgcctccctgggcgacttctgggaccacggcctgatggtcaacgacgccctctgggactcctggttcgcctcctccctggccgcgcgcccctccagcatcggaggcacgggcagggaggaacttaaaaccgtgcttcaacaggccttctccacggacgcctcctccaacagggccgccggcattgccaacaggcgcttcgtgcccgacctccagggcaagccctccgaggccgtcgtcgaagaactctccaagaccgacgaaggctacaagcacgcctccaagtacctcaccgtggccgggggcttcaacgtcaactccacctcccagcgcgcctgggaagccaccctgcttgggctcaaaaagcgcaagctcctctactcccggagcggaaccccctccgtgctcaacaacagccagacggccttctcccgcttcggggtggccagcagcgacaagtcccacgtggacgactacggctcggtgggcgtaacccagggcatcccggacggggaggccatggcgtggtccgacctcagaacgctcagcgactcgcagatcaagtccctggcccggaacatggtccaggaggtcaagaagaggggccccttcctgaacatgtccgacttcgtcaaccgccgcctgcagagcggggagatgggggtgaagggggcgcttcaggcggccatcgacgaaagctccatcaacagcacctttgacgaactctccgacatggtcatcacgcccaagggagggtacccgaaccaggacgcggccaagggatcggtgtacacggcggcgcccggctacctgatccagtccgacgtgctggcggtgctgggcaatattttaacgacgcgcgacgacacgtttacgatccgggcctacggggagctgaccaaccgcgagggtgtggtgctgtcgcgggcgtggtgcgaggcggtggtgcagagggggatcaattacgtggacccggtggacagcccggagacgccggtcaagaagatcaacatgaagagcggagcgctggaggagacggagctgagcgcggtgaacaaggcgttcgggaggaagttcaacatcgtctccttccgctggctgtctcccgaggaggtgtaataaaagagagagagagtttttttcttcttcccggtcagcgccgcttcccatccacggggagcggctcttttttgtgcttaaggggagggagggaaagaaagatagggattataggggtgataggggaggcccccattacccccattacccccattacccccattacccccattacccccattacccccattacccccataaaccctatctcccctatctcccctatctcccctatctcccctatctcccccagagacagcccccacaaccacatccttgcagtttgtgacgatttcttaaccaggtttctcttcctcaccatgggggcgggagggtatcacttccacgtcttccggcatgaacggcgctaccgtccgggaagcggaagacgcaacacaacagaaaagacgccatgaaatttgtcgccaaaatcctgaccatcgcagccgccctcagctccctgagcatggctgccgagaaagtaaccgttgacagcagcatcaagccgtatgcgcccaccagcggcgtttccggcaacctgagcgccgtcggttccgatacgctgaacaacctgatgaccctttgggcggaaggattcagcaagaagtaccccagcgtcaaaataggcgttgaaggcaaagggtcttccacggctccccccgccctcacggcagggacggcccagctcgcccccatgagccgccagatgaagcgggaggaaatagcggcctttgaagccaaatacggctacaagccgacggaaatcaaggtggccctggacgccgtggccttcttcgtcaacaagaacaatcccatccaggccctttccctgtcgcagattgactccatcttctcctccaccttcaagcgcgggggctccaacatctccgactggggcgatgcgggcgtcccctccatgaagggaaaagccatctccatctatggccgtaacagcgcctccggcacgaacggcttcgtgaaggaaatcgccctgaagaagggggactacaaaaactccgtgaaggaacagcccggctcctccgccgtcgtgcagggcatcagctctgatgaacaggggatcggctactccggcatcggatacgtcacttccggcgtgaaaaccctctccctggcggaaaaaggcggccaggtggccgtgcagccttcttacgacaactgcatcagcggcaaatacccgctctcccgctacctgctgatttacgtcaacaagaagcccggcgaacccctggacaccctgaccagggaattcatcaagttcatcgtctccaaggacggccaggaaatcgtgaccaaggacggctattacccgattcccgccaaggtcagcgcggatgtcctcaagagcattgaataaacaccccttccatacgccatcaacacatgccggggcaggattgcggccttcccgccggagtcctgcccccaactcccctctccaccgcctgccgtcatgagcgccaaagccccctctcccgcgccgcccaagaagcccaagcccgttccggaacgcttccaagtggcaaaaaccacgctgtggtttgaccgcatcatgactaaaaccatcatcggcgggggctttaccgtcattgtagccgttttcggcatcctctttttcctgctggccgtcaccattcccctcttccagggcgcggacgtggaagaacggcagcacctcgcgccgtccgcccctgtccagggaacctggggcctggacccttccggcacgctccccttcgtttatgacaacggcaaaaacgtcttctttctggacaaggcaaccgggaacctgaatcccgctcccgtatccctgccggacggggaaaccgtctgcgcccattcctatgattcatccctggcggcctacgccatcgccacggaatccggcaaggcgggcctcatctccgtccattccgggctcaacatccacggccaggcgaacgcgcacggcccggacaaggccggaacggaaaccagcccgctctaccccctgacggaaagcggctccgttcccggcagaatatcccgcatagcctacgcggacgcgggggaacggaaaatcttcaccgcgaccgcggagacggaacagggtccgcgcctcctgctgatgacgctggaggaatcccgctccctgctccatgaaggggagctggccccctccggcttccatgacctgacggaccagcttgaaggccgccccgccgccctgctgcccggcgcctccggagacagcctcgtcatcgccacggacacggacaaactcctttacttctcctatgatgaagacggggaaacgtgggtcaagcgccaaaccattccgtcccccctgggaagcggagaaaaaatgacctccgtcaactggctcttcggagacatgtccctggtgataggcggcgacaagggaagccttaaaattttcagcctgtatccccacccccgcccggacggccccgccctgcgcctcttcgggcagaccaggcagttcccccccctggacggcccggtgcagcattacgccgcctccggcatcaaccgttccttcctggtctccaccccgcgggagctcaggctctgctacggaaccacggctgacgtccgctggagcagcgacccgctggaattcacccccgtccagctggcggccagcacggaattcagctccgccattgccgtggacgccggggggaaggtccacttcttctccatggaagacaggcacccggaagcaggctccaaagccctggccgggaaaatctggtatgaagggtatgactcccccaaatggctctggcaatccgtgggcggcacggacgactacgaatccaagctctccctgatgcccctggtcttcggcacgctgaaaggcaccctgtacgccctcgtcttcgccgttccggtagcggtcatggccgccatttacacagcccacttcatggccccctccgtcaagcgggtggtaaaacccgtcatggaaatcatggcgtccctgccctccgtggtgctgggcttcttcggcgcgctctacctggcccccagaatggaggacaaggtgcccgccctgctctgcatggccgtcctcatccccggcctggcggccctgatcgcgtggttctggaccacgcggcctgcggcctggcgcaacaaattcagccgcggcgtggaatacatcgtcatgactcccgtcatcctgctctgcgcctggttctgctgggaatacctgggctactggctggaacagcccctcatcagcctctgccgcggcgtcatgggactgtggggcgcgggggacttccaggccgccagcttcgcggacctgtggcgcaacggcttcggcatgccctatgaacagcgcaactccctggtggtgggattcatcatgggctttgccgtcatccccgtcatcttcaccatttccgaggatgccctgagcaacgtccccccttcccttatcgccgcctcggaggcgctgggggccagccgctggcagatggtccgcaccgtggtccttccggtggcttccgcgggcattttctccgccctgatgatcggcctgggccgcgcggtgggggaaaccatgatcgtgctgatggccacggggaacacccccatcatggactggaacatcttcaacggcatgcgcaccctctccgccaacatcgccacggaactgccggaggcggcgcaggactccacccactaccgcgtcctctttctgggcggcctcatcctcttctccatgacgttcatcctgaacaccctggcggaaatcgtgcgccagcggctccgcaaacgcttcaacgtcgtttgagactttccctccctcttccaatccatcttccatgaaacaggacttcagccttccgcccgcccccaaacgccccctgggggaagtcaacatctggctcacctccatcgggctctccttgggcctcatcatgatcttcggcctgctgggcatcatcgtcttcaacggcctggaggctttctggcccaaaaccgtccatgaactgacgatcgcccccgcttcacagggggaaaaaccccttgtcctgtacgccggcatcacgaaggaccagacgcgccacatgcccgcggatcccgccctccccggctccatggcgaaggacgtgcgggaataccagctcttcaccggaagcaaggaagcctacgggcaatcctaccgctacgtggacgcgcaccacgtcaccgcctcctccacccccaaggggctcctgtgcctggaacgcatggagggaggaaaagccctggtcaaaccgctggagctcaagctggcctccggagaaaccgtcccggcctcctccccggaattcatgacggccttccgccgcgcgctggaccgggaagcggagttgcgggacgacatcaaggccattgacgccaaagacatcggcgccgtcaacacccggctggcggacgccaagctggacatcaaggccattgaacgctcctatgacatccgggaggaaaacggacggcgcacggccacgcccagggaaaaccccatcctcacgggcatggatgacccggcgggggaactggaccggctccgcgccagggtggagcagctcaacgcggaatacgcccggtacaccgcagaagcgggcaggctgagggaacagcagggccgggacacgctcgtgtatgccctgggagacggggagaggaaggaaaccggcatggacaaaatcgtttacggctaccagccgaacgacctgggcttcttcggcaaatgcggcgtcttcctccacaacctgtaccacttcatcatggatgacccgcgggaggccaacacggaaggcggcatcttccccgccatcttcggcaccttcatcatgaccctgctcatgagcgcgctggtcacgcccgtgggggtcatcggcgccatctacctgcgggaatacgccaggcagggagccctggtgcaggccgtgcgcatctgcgtgaacaacctggcgggcgttccttccatcgtcttcggcgtcttcgggctgggcttcttcgtctactacctgggcgggacgattgacgaactcttctactggaaaaagctggccgtggacaacacgcccaccttcggcacctccggcatcctgtgggcctccctcacgctggccctgatgacgctgcccgtggtcatcgtctccacggaggaagccctctccgccgtcccccgcgggctgcgggaggcggccctggcctgcggagcctccaaatggcagatgatcaagcgcatcatcctgcccagcgccctgccgggcgtcatgaccggcctcatcctggccatggcccgcggcgcgggggaagtggcccccctcatggtcacgggcgtggtcaagctggccccttccctgcccattgacggggaaggccccttcatccacctggagcgcaaattcatgcacctgggcttccacatctatgacgtggggttccagtccccggactcggacgccgcccagcccatggtcttcgccaccacgctgctgctcatcctgctggtggtggtcatgaacctcacggccatcctcatccgcaaccgcctgcgcaaaaaatacgcggcctccagcttctaaccccgttctccttcaccatcccatgactgaaccagccgccccagacgacgatcccatcattgacgtggaagatttctccttcttttacggaagcaaacaggttctcttcaacatcggcatgacctttgaaaccaaccgcgtgacggccctcatcgggccctccggctgcggaaaatccaccctgctccgcaacatcaaccgcatgaacgacctggttccggacgtccgccaccggggggacatccgcattgacggcgccagcctgtacgatccgcgcgtggaagtcatctccctgcgcaagcgcgtgggcatggtcttccagaaatacaaccccttcccgaagagcatttatgaaaacatcgtcttccccctccgcgtggcgggacgcagcaggcgcgcggaactggatgaaaccgtggaacgcagcctgaaaggcgccgccctgtgggacgaagtgaaggacaagctgcacgaaagcgcctacggcctctccggaggccagcagcagcgcctgtgcatcgcccgcgccatcgccaaccgcccccagatcctgctgatggacgagccctgcgccgccctggaccccatcgccacgctgaaaatagaagacctgatggaagacctgaaaaaagacctcaccatcgtcatcgtcacccacaacatgcagcaggccacgcgcattgcggaccgcactgccttcatgtacatgggccgcctggtggaatacggggaaacgtctcaaatcttcaccaaccccgcggaaaaagaaacggaagcctacatcacgggccgtttcagctaaaaagcccaatttccaagccattcacctcatgacacctcccggcaaccacatcctcccccattatgacgcggccctgaacgccatccgcacccgcgtcaatgccgtctgcggcagcctgctgaaacacatggacgttctggaacgggtcatctccggcccggacagcgacggagccaacggcatcattgcggacggggaaccgctcagcgaagaaacccgccaggttctctccctctgcgccgccgtgctcacccagttccatcccctggggtccgacctgcggcttgtgctcaccttttcccgctgcggggacaagctccaggaatgcatggaggaagtcacaggcatcgccaggcacgccaaggcatccatcaggcgccaggaacccctgtgcccggatatagtgctccccctgctgggaatggccgtttccgaattccgggacgccgcccgatgcctggaaacgcaggacgtggacgccgcacgggaaatacgcctgcgggacaaaaagctggacaagtcccaccgcaaggcgctggccctgctggtctcccctgacaggaaggaccacccctccctcaacgtcaacctgctcttcatcatccgctccattgaacgcatcggagacattgccaaaaccatcgccgccaccgtcgtcttcctgaaggaagccacggacatccgccacggaaaagagaaataaaccgcgtctttccccgcacgattattccaccttgctcacgctgaagcagtacacggcggggttgatcagggccaggggaaggtaaaacacggcaaaggagagagaaccgccgtacaaaaccaggcacagggcggagacgataaacaggattccgattttaaggctccgcgcccagtcctggcggttcaccagccagatgaaggccgcgcatacaaagccgatgaccacgcacagcaccccgcccatggtgaggaactgaatataactggaacagaattgttccagccaccgcacattatccggactggggggattaccttcccaggcaaaaacgcccggcggcagcagcgcccacaacagcacggaaaagaacaccaggcgatccgtattaaggcgataggtcatgcgggggtacggtaccatttccgtgcatgggataacaagtgaaatcggctgctcccggctgttccgggaacggttcctttacaggggagcaaatgcaccgtctccggcgccattgacggcgattccgtctatttccaccagccagccgggacggcagacgggggctttcaacagcagatgggggacggcggccagcggggattccatcaggcggcggctgaccgtttcccggtccgcccagtcgcgcaggtacaccacggcctgtttgaggtcggacaggcttccgccgctcctttccatcagggcgttcatattttccagggtgcgggccgtctgccgcgccacatcccccgggtgaacgatgttcccctccgcgtcaatgctggccgtgccggaaaggaagtagtgggagcggtccccgtacacgatgcgggcgccgcgttcaaaggccacccggtacagatgcgtgggggacaggtaatccggagcctccatgtaacggacctgccccggcttcagcccgacgattcccaggctgtccatgtgcagcagccgcccaggcgtttccgtacagccttcaatcccggtgctggcgatgaagtgggtttccggcgtcagcccgtaacggttaaagctctcattgcggccctctaccagcccacggtaattgttgtcaatgtcccggcagtaaatccacgtgcggtgaaccagctccggcacggttcctccgtgcgcggcagccgcgcggtccagccagcggaattcctcctgcatctggccgtagctgtccggagcggaggtttccttcctgcccgccaggaacagccggtaatgcagacgccgggccgtcaccaccattcccccctggtcctctttccgccttttttccagcattccgctgatgtgccatgcttccagggccacgcgggccccgttcgccggaggctgccccaccacggagacataggagttccgctcccccgccatccggcgcagcgtttccgactggcgcaccggatcgctgacgtggaagcgcaggaggaattcatcttcccctccgccgcccagttcacggtacctgtccatcagggaacgcagttccgcctcaaagctcgcgcccggttccgccgtcatgcagaagaaatgttcttccgcgcctccttttccgcgccattccgttttttcaggtaaatccgccgccatggtgtcctcctttacagggactgcacgtaattgaccaggtcctccagctcacggtcatttaaagaacttgtcttcccgcggatgtcccccggattgtgcgtcgtaatggcttcccggaccgtcttcgcccggccgtcgtgcaggtagggggcggtgcgccacacttccaccagggagggcaccagaatgctttttccttcatccagccccgtggccgtccccgtagcaaccagttccttggtagtgaaatacgggtgcgggtggcactgcacgcacccggccgttttaaagacttcctttcccctccgcgcggattctgacaaggcgccccgctccactccgggagcatggcactgggcacaaccagcctcccgcgtctgctgcctggagggagtatgcgccatcaggtacgggctgggaacctccttcatgtttttcaggtattcattcacgcattccgccagttccccggagggttccaaaaactggatgtgaacgaagcccgccgtcacggccacctccgcggaggcgcggacgcccagcgtcatcaccgggcttgtccggtgggagaggaacatggtgcgcgtgtttttcgggttgcccatgccgtcattcagcaggtcccagttcaggccgtccacccggctgtccgggtggcaggtggcgcagctctgccagccctggaagcaatgggaggcgtcgttgaagtactgttcccccagcttttcccgtgagggctggaatccttcattcagggcgattttccggggttgcgctactcccttgagagggacttgcgccagcgtgtccgagaagtatccggccacataaacgtttttcccgtcgcacgccagggagcgcggaccgttcaggggcagaggaatgcgggtgcggaggccgtgcaggaagcccagcctttcggaaacgggttcgttttcccggttttcccgcttcatgcggtccagcaggccgggaaaatcaatcacggataactcatgcgttcccgcgtgcgtcacaaacagctttccgctatccccggaaaaggcgacgccccaggggttggccgcccccgcatccgggtcgtccagcaggacggggtgcggcttgtccggctgttccgtgtcaataaccgtcacggcgttcgtgttcatccagccgcggtccagctgcgtggtgggcacctggtagcggctcagcacgtgcgccacggccagataacggccatccgggctcatcgccatgccgcgcacgccctgcgtcccgttggagagcgggaaatgagccgccttcccgtcttccaccagggtcagcgcagccgccgtgaaatccccgtccgccttcccggcgggcaaatggccggcggcccatattttcctgccgtccggggagacggccagcgccaccggttcacggggaacattccaggaattcagcacgttcccggtagcggcgtccatttccagcacacgggaatcaaaccggcacgccacatacaacttacctccgcgcagcacgggagccatgggcgtatggcccgccggaaaggaacctttcagcgccccgctttccaggtccaccacctccaccacgccgcgcggtccgccttccgccacataggcggtggaaccgtcaagcgccatgccgttgggcggctggcccagacggatgcttttcaccttttccccggaagccgggtccaccagttccagagtccggctttcatgccccagcacggctaccaggcgattgaaaacctttacatccaccggagctgcgggaccggaggcgtgcgccgcatcctgcctgcacgagacgaaggacagcaggcagcagagggcagccgcggaggagcagagcgtttttgtcagtttcatggccatttcagattcagtcttctatcatcacgcggaaccccacgttgtacacgggccgccagccgggatacccccagcgccaggaggacgtggcccgccgggggcggtcataccaggaaccgccgcgcacggcacggggaacgcgggagtccaggctttcattgcgcccgtccccttccttccacgggtagggtctgtattcggaacgggtccattccgcggcgtttccgatcatgtcgtacagtccgtaggcattcggcttgtagctcttgacgggggccagatgaagcttgccgtcattgtacttttcatcccgcggcacgaagtcccagaaacggttgggatttttgatcggcttgggatccacgccggagacggccagctccttcagcgtcacatcccccagattggcgtatgcggagaagtccgcatcccgttccccgaagaagaagtccgtatccgctccgcccctcgccgcgtattcccactgcgcttccgtgggcagcgtcacctttttcccggttttcccggaaagccagcggcagaattccatggccctggtccacggcacccggacagccggaaaacgcggatcggcatccatgtcgtagccgggcctcacctggtccttgtagtgcatgtcgtaccatccattgaggtattccgggtcaaagcggcggtattgctccagcgtcacttccgcctctcccatccagaacggttgttcaatctccaccggggaggcgggtttttccgccggggtttcccgttcacttcccatcctgaattttcccgcgggaatgcggcggaacgtcatgcttacgctaccccccaaatccacggacagcgtttcattccgcggttccgggacgggcacgcttttttcactggctcccggaacgggcctttccccgttgaaaacaggtccgctggcgtttctccggaacagggaatccttcatggtcacgtaattccgttccgctccggagaattgcctgtgcaggtcatagcggcgtttcagcaatccttcattgcgctctcccggccattcgcccaggtagggggcgttcatgtccatccacgtgaccaggcggttccagtcctcctgcggcatctccacgccgtggtgcccctttttaaggagctggtagagttccgacgtatccgcgaagaactccgtgggggccagtcccaggtagttcccctccggaccgttgcggcgcacgtaagggtgcaggttccagtacgcgacggacccgggagcgggcgcacccttgacggcctccaatgtcatgaagtccggaactcccgcgcgggccttgtcttccgcggtgtggcagcggatgcagtggcggtccagcacgggctgcacttcattcatgaaggagaaggtgcgcgccggaccataccacggggtgatggcggcaggcttctgccgggaggccatgaccgccttggcgggcggagcgtagttctgccgttcatggcagccgatgcagcttaacgtttcccccggcatggcggaaaaccagctccgcatcagtgccagggcgcgcccctccccgtccagcacctggagggtcagcggctggttggccggagccgtaaagatggcggagccgtcaggattcacgggaacggtgccgtacagcaccttcaagtcccagttgctttccatgcccatggcatagtggcttccggtgttgcgggggctgtactcggacatgaagacgcgcagggattttgcctcccccttcggcactccggccatggcgcggccccggtacacgtcggagatatagaccgtggccgtcttgctctccggcttcacgcggtcatgcagcacgggcggctttttgcgcggcttcagcggcgcggggtccgcataaatgaaataggaggaagccgtgagagggacaatgttgtcgtacatgtcacaccagaccacattagtgacgccctggttgccggaaggggaggagacggccaggaaggtctcctcattcagcggatacggttccgcaaaatagggagttttcaatccatccaccaactggtccctagtgacgttttccacgggttttccgtagcccgggattttctgaacggcgccctccgtggcggtacggccccggttcacgtcaaagatgaccagttccccaagccgcttgacaccgtggtgcccgctcacaatgcccgcgaacatgcccggcctgcagggaagcgggcgggcgttgaacaggctgttgggccagtaggagttggaaccgtagtactccttctggtcgctgccgtccggattcatgtgcatcagcacgcggctgaagtagtgggcgctctccgtgtattcccagcgcaggaacatcacgcggccgtccggcagcatggtggggaaccagttgttgtcctggtcaaaggtgagcctccgggtcgtcttcctctcccggtcgtaaaggtggatgttccccacgtagtccaccccggttacgcagggcacgccctgcatgccggaggtgttgacgaagatgacgcggccgtccggcaggtagcaggagttgtagctgtccgtatccggcggcatgtgggcggtgagggcttccgttttcccggttttcaggtccagttcaaagacgtcccagggcctgttttccttcttgccgaagcggtttccggtgaacatgagcctttccccggaaaagtccacttccagatgccccatccagcggtcatcccccagcagctgcgccgctggggaggaagaggagatgccgtcaaatttcacgatgccgctgcggtacgtgcggcccggacccggcatgctggagattccctgccagttggccgggcggtcatgcttgaaggagctttctccggacgggttgaaacgccgcacgctcacccattcccgcagggagtcctgctccgggagggattcaataagagcctttttccgcagttccaccagctcgcgcagctggtccgcctgctccggcccggcctgttccacccatcggtccagcggccccagcttcttctcccactcatccagccgggccaggaaggcggacgcatcagggtactgttctccgtatttttcccggttatgcttcacagcgcggcggatggcggccgcatcataataagccgccagtttcttcagccggaggaagcggactttttccagaatggcttcctgatgcttcatcaggccagcccaggaagagacggagcctgcctgctccgccggaatggaaaggatttccgccagcgcggtcccggctttctggccgtccggccaggcctggaacacgggagccagcagcgccatggcatccccgcagtcatccgcggcagacggatcggaaagggaagatacatgctccgccgtccgcgcccataattgctgcatccattggtttcttccctccgcggaggccgcgagcggaattccggacaattcccgcagccagggctggagtccggaggcatggagtattccggctcccagcacggcacagccgcacgagagaaggcgcaggatggaacaggagcttaacatggcgtataattttacattagtacgcaaaggaaattctttttcattcaaccggaatattcctttccaacaattttttcttaaaaggcagataatgagcgaataactaacttggtccggattaccaatccgatgtcaaccctactattatgatagggaatcattttaaggtaaattcctctcctgaaatggagcattggacgaaatcccccgtccttcagaaccccatggctccggaagaacccgcaccttttcttttttgcagagtcaaccttttcaagaatcaaaaaatacttacttccatagaaatacatagtttccaacaataagtcctgttatctctatttctccgatggcgcctgtttcagtctccctttatggctgaagagaaaatgcggattggtaatccgtagaatgattcctgtcctcaaaaaaatgaaggacatccaagatcatatcaattcaatctctatctcatgaatttcctccatcatcgtcatgcttgggctcctgcccacggcgcagggcaccggaacgctcgtatgggacatgtccttcaccggaacttccaattctccaaacacacagaacattgtgattaagggaacggacgacactccttatggaagtcttgtctcttccttcgggggaggctccgtggcggacggcgtctatgattccaataatacccgcctgacccttacggacaattcctcccctctttccatgtgcaacagtttcagctttgtggttaaagcctccctgaacggggaaggctccaccctgtggcccgtgctgttcggcctgggagaaaataacgacgagaatctgaaaatctaccacacgaaggactcaaatgccggctggggctttactccggaaagctataccctgtccgattccacctacactcccggaactgtagtacagggcaaagaacaaaccttcatcgtcaccgtggatgccggagccaatgacggcacggcccaaacgggaacggccttgcttaccctgtacctgaacggagaagcagtagccacggcaacgctggcctccgataaccggacggatgaaaagctggatacgttcaccctggggggccgccccttcagcagcgacgtcaaccagacggcggagttttccaatgtccagctttaccagggcgtgctgagcgcggaacagattgcggccctcagcgtgccggaacccgccgccgcctccctcagcctggcggggctggccctgctggcgctccgccgcagaaggccgcagcagtaaaagtttttccggaaaaagcccacggcggatattccttcacggggatatccgttttttgatggctgcggcggtggtctcttccgttccacgggcatggaacactgagaatcccggccatacaggcagcagggcatggcgcggaaaaataattccggcggcaggcggcggaaagggcctaccgtccgtcctccatgcccaggatttttttcatggcgggcctgaattcattcccccattgctccaactgcctgacaacggggattagcgtcttacccgccggggtgatggagtattcggaatgcggaggaagcctggcgtatatctttttctcaatgattccgcacgtttcaagttctttcaactgctggtcaatgacgcgcgaattggcctccgggaacaggcggtgaagctcgctgggccgcttcgggccttccgccagctcaaagatgatgcagctcttccattttccgccaatcacctccatggctattctgattccgcaatcaatatcaaagggcaattttttctcgtacatggcagaaggaaacaggggggttctttcctcctacttcatcaattccggaagcatctttcaagcgtttcccggataaaaccgccgttatgccgcacggccctgcggaaggatgaaagggggtggaaggatgcccccggaaggcatatgccgataaatttgccggcatacgaataatttatccgtattgcaggaaaatgaaaatggtctaacttcaaccataacgggctccgccctgcccaacacatcacagcagcatgaaatatattttatggccagccgccgtattgctggggatatcctttgccccggcggaagaaaaaccctcaatcaatcatcagcatatggaacatcaaacaaacacgattcgcctgatttatccccaatggcaggggggtgtggtaagccactggatgccggacctccccgcggaagacgcgtccagagggtattacctgggagcgcagcttctccggatgctggctcccgaaagttcccagaagaccgttgaagttcccgtttccctggacattggagaaaggaaggtggaaaagggcatcagcgaccggagcgccattctggcccagaccaaagcggcgcttgagaagctgcgggaaaacaatccggataaaatagtgacactgggcggggaatgctccgtcagcgtggttcctttcacttacctggccgggaaatatcccgatgacgtggccgtggtctggattgacgcccatcccgacatcaatcttcccggcgatgagtacaagggttatcacgccatggcgctggcggcctgcatggggatgggggatgaagagatcatgaagcttctgccggggaaggtggacgcctccaaggtcctgattgcaggattgcgagcctgggaaaaagacggcgggacgaaggagcggcagaagaacctgaacatcaaaagcctgtcccccgccgaactggccggcagcagcgatgccgtcctgaactggctggaagagaggggcgtttccagggttctcattcactttgacctggacgttctggacccggcggaaatcatcgcgggggtaggcgtggaaccggggggaatgaagatcaacgaggtggtgcgggtgattaacgacatcgccgcccgctacgatgtggtgggcctcacggtagccgaaccgatgccgcgcctggcgattaagattaaaaacatgctcaaccagctccccctgctgaagcaggatgccccgccttcccccgccggacagggaacgggagcatgagccgcattcctccgttcattcccgccatctgcgaaagacaagcgccggaggaagaaggaacgcccgtcttccttcccttccggcggctttgttgttacattcctgcggaatcggaagttcaggagtcttccagcgtgcgggggcgcagcaggtataccttgtcccggcggcgcacctgttccggaaccgccaggtagacggtttcccctttttgcgcggcgtccacgggttccatgcccgccgccgtctcccgccgcatggattccacttccacgcggacggcccccgtggtgggccctgcaatgaggatggtctgccccgcggacaagccgccggcttccagataaagggccgccaccccgttcttcttataaaagttttccaccttggctatatggattttcaacagggcggcgcggctgttggcggaaccgctccattccccccatttcacgcccaggtaatatccgccctgccagaatccccggttgaagacggattccagccgtttcatccacgcttccgccctggctgcggaaaaggttccgtccaggcacgcctgcgcggcctcccggtacacggaggtgaccgttctgacgtagtcggaggagcggccgcgcccctccagcttcagcacggagaccccggcgtccaggatctggtccagcaccggaacggtgcagaggtcccggggggacatcacgtatttgttgtctatcaccagttcattgcccgtttcctcatccgtcacgcggtaggcgcggcggcagttctggaagcaggcgccccggttggcggaggagttgtaagccgccaggctcatgtggcatttgccggaaacggccacgcacagcgccccgtgggcgaagatttccacccggagcagttccccggaggggcccctcacgtcctccttccggatggattcaatgatgtgccggatttgcgccagggtgagttcccgtgccagcaccaccacatccgcatactgcgcgtagaacctgacggaggccatgttgcagacgttggcctgcacggacatgtggacttccagcccgatggagcgggcatgggcgattaccgccaggtcggaggcgatgacggcgtccactccggccttccgggcggcggcgcacagggcatgcaccgcctccagctcttcatcatacacgatgatgttcagcgtcaggtaggccttagcccccgcctcatggcagcgggccacgatttccggcaggtcttcctctgaaaagttggccgtggcccgggaacgcatgttgagcttccctacgccgaagtacacggagtgcgccccgccctgcaaggcagcggccagggattcaaacgaccccgccggggccatgatttctatccgggattgaacgggcatggcagaacggctcagagtcctccggattcctccgtcaggatgacggtgatccttcccttggggaagcatttgacgatggacatgtggatgttgcacaggcggtccggagagttgcagtccgcacagactcccgtgtacatgcagggcgtcttgaagtcttcatggcgtttggcattcagcggggcgatgcggcggatgcgttcccgcgcctcctccggcgttcccaccagcttgttggccccggccagcagaatgacgtgccgggggccgaacgctacgggtgccacgcggttgcccaccatgtccacccagtgcagggttcccttcatgctgacggcgttgattccggtcaggaacaggtccgccgtcatgccgcggcggcggatttcccatttttcctcccggtccatgtccggaagaaagccgtcgtaaaattgaatgtccggattggaccgcaggtcgtcaagaattcccgtggccttcaaggtcatggagtctccgtaggaggcggacgccgggttgagctcccgcaccaggccgcgcatcacgcctgcggcttccttcaggcccggaactacaaagcatctgaatccgcgccgttccaggcgttcggcgcacttttgcagggaaagggttttttccataaaaacggcggatgaagaaccccgctccggctgattccggagcggggttccatgtagttttattcttccgcaggggcttccgcttcaccggaatcttccccggcctccgcttcttccgcttcttccgggccatcctcgtcttcatcatccgggatgacgatggagatgtcctggatggcttcgccgtcgttcagcgtcatgagcttcacgccctgggtggcgcggcccgtctcgcgcacggtagccaccttgatgcggacggactgccccgccgtggtcatgagcatcagttcatcctcctcggaaacgaccgtggcggataccaccttcccggtcttgtccgtgcagttcatggtcttgatgccggtgccgccgcggccctgcgtgcggtattcgtcaaaggaggtgcgcttgccgaggccgttttccgaggccaccagcagggttttctgcgggtccacaatagcgagggccaccacgtagtcccccgcgcgcggacggatgccgcgcacgccgatggtgttgcgtccctgagtgcggagggcttcctccgggaagcggatgctcatgccgtcatgcgtgacgagcacgatttcattttccccggtggtgagttcagcgtttaccagggtgttgccttcctccaggttgatggcgatgatgccggccttgcggtagttgacaaagtcgttcaggctggttttcttcaccgtgccgtccttcgtggcgaagaccacgttgccgctgccttccgcaaaggtgatgtcattgcccttttcatccacccggcgttccaggcgcaggatggcggcgatggcttcctccggctggaggtccagcaggttcttgatgttgcggccctgcgcgctgcgggcggcctcgtcaatttcatacacgcggtccacgtacacgcgcccggtattcgtgaagaacatcaggtagtcgtggttctgggcggcgaagaggtgctcgatgaagtccgcctccgcatcctttctggcccccttggtggtggcggccttcacgcccttgcccccacgggcctgcacgcggtattccgcggagttggtgcgcttgatgtagccgctgtgcgtgatggtgacgatcatcgtatcgttcgggatcaggtcttcaatagccatgtccccggagaagggaatgatgcgcgtgacgcgcggcgtagcgtacttgtccttgatggccatgagttcatctttcacgatgcccagcacgcgggattcgttcgccaggatgtccagatagtccttgatgcggaccagcagttccgcgtattccccggaaatcttgtcgttttccagagcggtgagctggtacaggcgcaggtccaggatggagtttacctggcgttccgtgaagatgtagcggtccccctgaacggaggcctgggaacggatcaggatgcccaggctttccgccgtctgcgtggagaaggtgtagttctggaggcgttcgcgggcttcctccctgttcctggagtcgcggatgatggtgatgaagtcatccatgtggtgaagggccagcaggaaggcttccaggcgttcggcgtccttttccgcatcccccagcaggtagcgcgtgcggcgcacgaccacctcgcggcggtgctcgatgtagaagttgatggcgtccagcatcgcgagcgtcttggggcggttgtcgtgaatcgccagcatgttcaccgcaaaggaggtttccatggaggtgagcttgtaaagctggttcatgaccacctgcgggcgggcgtcccgcttgagctcgatttcaatgcaggttttctcgtcggaaaggtcccggatgccggaaatatccgtcaggatcttgtctttgtacagttccgcgatgcgttcctggagggcggcgcggttcacgccgtacggcacttcacggatgatgaggaggtccttgcctgagtccgtcatttccatgtctatcttcccgcggatgcgcacggagccgcgcccggtgcggaagtagttgtcaatgccggaaaagcccagcacgtcgcccccggtggggaagtccggccccttgatgtactggcgcagttcatccaccgtcatgagcgggttgtcaatcacggcgcagatgccgtccaccacttcccccaggttgtgcgggggcatgttggttgccatccccacggcaatgcccgtgccgccgttgaccagcaggttcgggaaggcggaggggaacacggtgggttccgtgtgctcgttgtcgtacgtgggaacgaagtccaccgtatccttgtccaggtcagccatcagggccacgcccatgccggaaagcttggcttccgtgtatcgggcggcggcgggagggtccccgtccggcgtgccgaagttgccctgcccgatgacgaggatgtcccgcatggaccagtcctgcgccatgtttaccagggtgccgtaaatggcggcgtccccgtgcgggtggtagttacccatcgtgtcacccacgattttggagcatttgcgggtcttcccgccgggggacaggttcagctccttcatggcgtacaggatacgcctctgggagggcttgaggccgtctctcacgtccggcagggcgcgggagatgatgacggacatggagtagtccaggaaagaagtggagagctcgctggctacgtccaccggtttgattctattgttttccatggttctgagagaaagtctggggattaaacatcaaggttgcggacgttgagggcgtggtccacgatgtagttcttgcggggctccaccacgtcccccatcaggatggtgaacatttcatcagccctgacggcattgtcgtcattcaggatgacgcggagcagctcccgccgttccgggtccatcgtcgtcttgaacaggtccttggcgtccatttcacccaagcccttgaatcgcgtgatttccacgccgcgcttgccgatggagatgacggattccagaatgtccatcacggagaacaggggcgttaccttttccttttctccctcaccttccaccagttcaaacaggggcgtatccatggatacgatcatgttccccggaatgcccagctccgcaagccgtacgagggcccgcgtgatggccttggcctcatgcagttcatgggtgatggaacggcggctggggccctcccggtccgggagcggattttccagcagttcctcttccgtgggcatgccgaagatgaagaggtccctgttttcctcggaaaaggcagtgagagcttccatgtcatggaagaagaggacttcctcttcattgccgctgcgcaccttcaccaggaattccgggaattccccgtttgcctcccggtggctgagcaggtcctccagggagccgccctgcgcctgcatggattccgtgtagcgctggaggttgaccagcgtttccagaatggcggaaaactcgtcagatgagaaggaacgggaaccgtccgcgaaacggagggtcacgtcattgacggccagttcaatcaatttgcggttcagggcgacgtcatcctgcacgtattcctcctttttcctgcggatgatgcggtacaggggcgcctgcgcgatgtacaggtacccggcgcggacaagctgcggcatatggcggcagaagaaggtgagaagcagggtgcggatgtgggcgccgtccacgtcggcgtcagtcatgatgatgatcttgtggtaacgcacgcggtccagcttgaaggaggcttcatcgtccccttccccgatcccggcgccgatggccgtgatcatgttctgaatttccttgctccccagcgctttgtccaggcgggccttttccacgttcagcacctttccgcgcaggggcaggatggcctgcgtgcggcggtcgcgccccatcttggcggagccgccggcggagtcaccttccacaatgaacagttcgcacttggcggggtcccggtcggagcagtccgccagcttgccgggaaggccgccgatggagagggcgctcttgcggactgtttcgcgcgccttgcgggcggcttcacgggcccgggcggccgtgatgctcttttcgatgatcttcttggccatcgccgggttttcctcaaagtacgtcttgatttcctcgtacacgacgttgcccaccacgccttcaatctccgtgttcaccagcttgtccttcgtctgggaggagaaacgcgggttgggcatcttgacggagatgaccgccaccaggccttcgcgcacgtcctccccgctcagggaggggtccttttccttcagcaggccgttcgccttcgcgtagccgttgatcacgcgcgtcagggcgccgcggaaaccggaaaggtgcgttccgccgtccccgttgtaaatggagttggcaaagcagaggatgttcgtttcatacgtgttgttgtactggaacaccacgtccaccaggacgtcatcctccatcttcttgccgtcgtactccacttccaccttccggacgccggaaatggagatgggttcctcattgatcaattccttgttccggcccagctggcgcacgaattccacaatgccttccttatagaagaaggtttcccggcgcaccggggcctcccgctcgtcaatcagctcgatgaccaggccggggttcaggaaagccagttcgcgcaggcgcgtcgtcaggcggtcaaatttgaactccgtggtatccgtgaaaatggtggagtccgggaaaaaagtgatcgtggtgcccgtgatttcacaggcgcaggcgcccaccgcgcggaggggctcgatcgtcttgccgcgttcaaacttgatctggtagcgcttgccgtcgcggcgcacttccgccctgaaccagtcggacagggcattcacgcacttggcacccaccccgtgcaaaccgccggagtacttgtaggcgccctggccgaacttgccgcccgcgtgcagattggtcagcaccagttccacggcggggatgccgaacttcgggtggatatccaccggaatgccgcgcccgttgtccacaacggaaatggagccgtccacatggatcacaatgtcaatcttgctgcaatagccggccagatgctcgtcaatggagttgtccagcacttcaaatacgcagtggtgcaagcctctttcgtcagggtccccgatgtacatgccggggcgcttccgcacggcctccaggccctccagtttgtcaatctgcgcggcgccgtattcatgctgcgccgtcgtggaaacggtggtttcaacaacctcgttggtatcttcggacataactgaaatatactacgcttatcttaattttttgcaagactaatgttagaaagcgcgtgcgcgcgcgtaggggcaacccccgcgaaaagccgccgcaatcgcataaaaaaggccctattccacgccttccggatttttctgacatcagacagcggacgagggcgcgcaggagtattctgcgccgttttatagaatcggaaggggtgttccgtgtgaagggcggagagcggcgcggggagagtagtggacaaaatggacttgatggacaggatggacaccattttcttttttccattctgtcctttcagtccacacggcctattactccggaggacgctatttccttacacaagcagggccgttccggctcttgtccgcaacggccctggaagtccggagagcggagcgtctccgctccattctccactctcaaacttcaactctccttagaagtcataccggtagcccacgctcccgttcactgagttggctccgtcacggaagtccgcgttcccgttgatgaagaccgttccctgcgttcccacaggcacactgatgcccgctccgatctggagagccgtcgttccgaccttggtcccacgcacgctctgcatgaagccggggttgcccagcagcgccacattggtttctccgcggcggtcgcccatgtcctgggccacgttagcgcggaattccaccagcgcctcacggccaaagaggttgcttcccgccagtcccatccagcggccgccaagcgcaaccgttcccgtcgtccattcctgcttgcctacattcaggcccgcatttccggctcccgtttccgtgtacccgtccatgtgcgtcgtcaccacggagacgttggccagaggctgcaggatgctgctcttgtcttcgttgaggtacacgtcataggtgagttcgtacatcgccccaaagccccacccgttggtgttgccctgcgtgctgtagctgccttccccgtagttgaccgtgcggttgagcttggcatcattccagcctcccgtcaggatcaatgtatgcgcccaccgcttgctctggtagcgaccgaagaggttggcgtagtagctgtccagatggccgtccgccgtgtccgccgcgctggccgtcaggtcgccgtagttggccgtgaaggccgctcccatggtgaagtggtcgctgaggtccacgtccatgcccacggtgccgccccaggtggtgagctggtagccgctttcatcccccttggtgtccagcttggcgtaggagcccgtgccttccatccacatgtggaagtaagggaggtcttcgttgacgtaggcggggttgacgcccatgagggtagtgcggttcctgatccatcccatctggtcgcgcagggcgtccttctgggccgttcccagcgcgttgaccgtgctgcccgctacggctgccatcacccgcttcgcttccgaggggttggaagacgtcagggctcctacggcgtcatccaccttcttgaggatggagtctgcggccaggtccccgggcaggttccagagaagttccgctccggccctggagttgaccgtatccgcaagacgggcgtatttattgtccttggatgccgtagccaccagaacgaggttgccgttttccatcaccaggtacgcatcgttttcaaatttcttgaaggcggaggaggagggatccagcaggatagccagcctgtcgcttccacccagatcgatggttccatcagcatgcatgagcgtgtagctgccgtccgcgcccagcgtcagttcattcttgccggtagagctgagggttatttccgctccctggctgatgctgatattcccggtcacgctgatgatgggtccggcgtagtccgtgttgaaggtaaggttcgtgctggacccgtcgcccagcgtcaggctgctgagggtaagagccgtattggctctcgggtcttctaccgtgccgcccatcttgatattgaggcgtcccgtgttgttgatggcccagttgctgccggcggcggtgatgacgttttcaagcgtctgccccgcattgccggagatgttgagctgcccgcggccttccagcgtgccgctgaagacggaaccgctgcccgaattgccggtattgacggccagagcgccgccattgctcttcaaggttccctggccgctgattccggcaacggtgttgccggtggttgagccaaggtcaagcgttcccgtggaatcgccgttctttaccaggtccagcagtacgccgccctggagggaagccgttccggaaagggcaagcgtatcatgaagggcaagcgtgccgctgccctggatggtgctggcggaaaggctgctggcatcgttaatggtgagggtggctccgctgccgatgttcaggtccgcgccttcgccgctgtccgtcaggtctcccatgacagtattacggttgatatccagaaccacgccttccgccgtgcctgccagcaccacatggttgaagctgctgccatcaccgttcagggtgagcgtgccgccttccatgcggagggtgtccgtcacaaaggagccgttgaccgtgagcttgcccgtgttctgcttgatgaaggtgaccccgttttccccgacgatgctgccgcccatgatggagtccgccccggcataatcgtccggtgcgggcaatcccgtttccaggcgttcgttgttgaggatgacaacggcgttgcctccgtccgcattggtgttttccaccttcagcgtgcttcccgttgcgcccagcaggttgttgatgaccgcgccgtcgccgtcggtatctccgggggctcccgccaactggacggtaagcgtcttgccctgggcgatcaccacgccggcgtacatgcccagcgttccgtagttcgtgaccgtatcgggatcagaggaggcggtgccgtccaccatgtaaaggccgttgacctgtccgctgaggaccaggctgccgccgtcggtgccagtcacgcggatgccgtagttggaaaggattttgctgaactggatgtcgcccagattggcgcattccagcgttccggtcgtcagcgtcagccagctttccaccccggcgtccttatgggcgacgagggtgttcacaatggcgtcaatatccagattgaccgtggcggaatcattgatgacaagcttgccgtctccctggtcaatgatggccgtaccggccgctccctggttgacgttgtccgcgcccagggtaaggttcagcgtttccgtagctcccgcacccaccgtaatgtctccggagacgttggtgagcttgcctccggcagccagggtgatgcctttcagcatgtcgccattggtaccgcccaggttgatggcggcggcggagtccacaacgatgcccgcggtggcgccttctccccgcgtcatggcggaggtcagtgatccgttaacgattttcagcgttcccgctccgttcagcacggtgccggcccactggccggccttgtccgccgtgccaagctggaccacggcgtcggcattcgtgatgccgagggctcccgtagcggtattggcctgatccaggatcagggtgcccgtgcccgcatgcgtcaggtttgagttgccctgcaccagcgcattcagcaccagttccgcgttattgtaattgacgttgtactgcgcggccagggaggcgtccgtggagcccgtgttgcccgccagaatggcgccgtctccaaagacggtattcccagcgcctgtgacgctcgcgccgccgttgccgaagttccagacctggcggctgttgttggcggaggtttcattggtggacagggttcccgagaagtccttgagggagcccgtgaggatattggtcatccgcacgtctgtggacatgccccatgcgcctgaaccggaaagattaccggagaaggtatacgtggcgccggaggaaccgttctgcattgtgccgtgggcgtcaccaatctcaaagttggcggccgtcgtgcccgcggtgaagaagaagcccttgccgtctatgaagacagtgccccctcccagcgtgtttcctgcgccgaaagccacccagttggcattggagctcatattttccccgttgccgatcagttccagacggcccgtgaagttggtattgccggtattggagatgttgaccagccctgcggcatccgccgttccgatggtgatggtgcccgcgccgttgagctgggcgtgcaggttgacggttccgccggaaagggccagagaggcgccctcatttacgcggacgatggtggaattattcggattcacgccgatggtcgcaccgcccgtgaaggcaagcgttccctcttccacggtgaggtgggccagagtattcccggaatatcccagcgccagcgtgccgtctcccgtcttggtcagcgtagtgcccgcgcccatgacgtcagccgtcaggccggcccaggaaacggtatcccccgctccaagcacggaaacgttcagggcgcctccgtccccaaccttgacgcggctggaaatgtcataccccgtcacatccgtaccggcggcggagtccgcataagccagcgtaccgccgttgaacgtgatgttccccgccgttcccagcgcgccatccgctccgatggtaagagtgcctccgttgagcgtcgtgcctccggtgtaggtattcgccaggttcagggtgacatcggccgttccgttcacggtgagcgtggtgggagcaacggagtccgcaataaagcccgcgttgtcaggatcactgaccagcgtgtaagtgccgctgttgaagacgatgctcttgggcgtcacggtaccggagaccttcacttcacccgcttccgcagcggagaagtagatttcctggtcgttcagcgtgtccacgcccgtcagcttggtgttccagccgtcgatactggtgttgatccacttgcggtccgttccgccgtcccagacaaaaccgttgtctccgctgacgtccacgactttcagcacgagctggttgttttccaccacgacggagtattcaaagccttcccgggtgatgtccggcgtccaggtgaaggaatccgtagtcaggcttcccgccgcagcccactgggccaggacgtagtcggatgcttccagttcaccatagttgttgatggtcagcgtgcagttggcatccgtcagagccagggcccctgcctggatattgatgatcgggccgtttgccacgactccggtcatgtcaaaggtcagcgtagcgccgctgttcagcgtcagagcggaggccgtggtcattttggcgcccgcgcccatggagatgctgcccagggtcatggcgttcgcattcgtgaatgccagcgtgccggcctggacgttcgtcaagcccgtgtaggtattctgcccggagagggtcagcgtgccggaaccgactttcgtcaaaccgccggcgccggaaaggacgcccccgagggtgatgttggtggaagcctggtcattgtatgatttggttcccgcatcgtattggcgggtatcaaccgtcacgttgccggcaagattcatgttataggcggaggaccagccttccgccgccgtcgttcccagggtcccggaattcatgttcaggacaatcgtattggcattgccggacgcagtcatgcctcccgctccgagaagcagggaaccgccattcagattaatggtggcgcccttggcggcggctccggcccaattctgccccagatccagcgtctgagccaggaccatgccgccttgttcaatgttcatgacccccttcccgtcacgggaaatccgcagggtgccggtaatgttcatgaaagcatccttcttgacagtgagcgtcgtcgtcccgttgtattcattacggccgatgaaacttccagccgtcagggaagcgccggaatccagcgtccaggaagcagccgcattcgcacccgccatcaaagtatagcttcccgtgatattgacatcaccctgtaaaaccgttgtgccggcagcagatatcagagaaccggcgccggtgatcgtgtttccgtaagttccggcggaaagcgtcagggtagttcccgcgcccacatcatatttgacgccagtcagcgcggccgtcgtcgtgccggaggcattcccgctcagcttcagcgtacccgtggaattggcattcaggcgcgtgcccaggccgttccacgtgcccgtggtcagctccagaatggaattgccctggaggagaaccgtgcttgtgcccagcgcgccggcattgccgacgacgagcttgctgccgttatacaacacggtgtttccgctataggagttggcattgttgatggtcagggaagctccgtccagcagattcagcgtcgtatccccggtaatggagccgtcaccagcaaaaatgaaatccgtgccggaaacattaattttacccggagcaacattcccgacgatcgttacagtcttgttcacgtccgcaccatcggagaaatacacggtctgtccatcggcgtaagccgtgggagtgccgtcaagatcccaggcggtattggcgctgtccgtgttccagttgccgctcttccatctcagcaggccgtccttgtcggacagggagacgtacagcgtatcattgctgacggtgaatgtagccttgtacagttcagccgcggagccgccgagcgtgaacatggacgtatccgtcatgcccgttccgtgcagaagggcatattccgtattggcggtgacggaggaaaggcctatctggagagccgtagcgccggtgcccgccactgaattgacggttaatgccgcggtatccgtgctcagggctccaaagctcagggagcctccgttcagggtcagagcagccgccagggtagcggtgcccccgtcaagattgatggttcccagcgtagagccggcatccagggaataaccgtctgcggaagtcacggccacggtcaggccgccgttgataagcagggtcccctgcccgatgacgctggagtccttcacggtcagcgcgccttccctcaattccaccgtgccggtgaaaccgggaacggcggcggtttccccttccgcgggaaccggaaccttggcagctccattgagcaccagggtgccggcgccgattttcgtgagcttgccgctgccggtcaggccggtattaaaggtaatggttcttccggttgtcttgtccccggcgtccagggtatccacataacttccgttggaagccgccagcgtgatataggaaggagtgaacgcgttattgtacgtcacggaccagttggccgtggcgcccagcgttcccatgccgagcgtaatttcactgccgctggcaaagttaacgatgttaccgccaaagttgacgcgggccgttccggccgttgcattgcccagctggaatttcccgcggaatacgccgttgccattggcccagaagtccaggccgcccagattggccgtgccgctggaagcaaggaaggtccccgctccgctgtacccgaggttcagcacagcggagccggtaagaagccccccgttaagagtaagggtgctgccgttgtccacgatgaagctgcggccggttccgtggtcgctgttggtgcccgtgacattcaactcagcgccggtgttgatggaaagggtcccgttcttgaggagccgcacgttcgtagcgttgacgacggaaccggagttgacctgaatggaactgctcgcccagttgctcgacatgctgagggttccgatggtggcctgcgaattggtgagggtgaagcccccgatgcagtaattgacggccaggccgcccaggttaaccgtattgttcaggaaggttacacggggaccgtaaccgccggaagcctggtccagctgcatggtacctgcatagtcaacgttgccggagatattcaggttgaggttttcactgcggcggaaggtgattgaactatcctgggtgacgcccgctcctcctacgatatcggaggcgatcgtgaccgtatccgcggcattgtggttcatcaggacgtacatgccgccttcaacgacgatgcggtccgaaggacgaatcgttcccgctccggggcgaatgatgaaattggcgccgttgccgatatgcagggttgctccgttgagcgtgtccgccgcaggctggctggccgtattggcggcgtaattgccatatacggtgatgtcctttagcgtggatccaggagaaagggtgacgctcccgtccgtattgccgagccagacggaaagggaggagttcgtcccgcccatgacggtggaggagaaggactccatgagatgcgtggcgtctcccagcgtcagggaagcgttgttccccagcgtgaaggtattgcccgtgccgaaggtgatggaagaagcgatcgctgcggtcttcccttcggaaacgaggaggcccgcattattgccgagcgtgaaggttccccccgtaatggcggcgtccccaagcgtaagcgtcgcctggctgccgagggaaagggcttccgcctgaagggaatccccggctcccatgttcaaggtatagttcgtcccgtcctggaacgttacggtaccggcgataatgttgccggtcaatgcaatggttttaaccccttccgcagctgtgaaaataacggagtcattgttcaggaaggaagtatccgtcttgcctccatctccactcttgtaccagcccgttccagtgttgctccaggtaccggtagtggaattccagacaagcgtttccgtattgtagcctgttccctgatactgcacggacatgccggaaccgttggagacaagcacgaaattgccggctcccagctggtcggcggaatcgactctcgtcaatgcctcataggtgtcctccccggtttgcttccaaataagaagggaatccagggaagctcccagatcagccccggtggacatgaaatagcgggtcagcagggcatcgtccaccagctcgcggttggtaaccgtcagcgcttccatggcgcccgcaaccactacctctacattccacgtccggtcattcttggtcactgtagtggtatttgacaggttgatcatgccgtcaagcccgatgtgccagtagtggctgccggaaccggttccgttgtcaaagttgagattgcctcccggtgtggtcaggttcagcgtgccgtccacataaatattagcgtgcccctctgcctccatgctcttgatctggttgctgaaggtggtggaaagagtggatccggcgcctacgtaaacactgccaccccattgtcccaggccaacggacacattgctgttccccgtcacggagatgccgccgccatccgaagtgttgggaggagcgcccgtaaccgtaacgtctacatcattaaaaatcaaatgcgggcccttatcctcctggcgggagggggcagcgtccccttcccagttgcccgccgtatctacggcatcgccttcccctgcccccgtccacgtaaaatcaggaccgccaaacgtgggagcctgccagaaatccgccgatgtggcggcatgggagtaagagtaaaaaccggagaaggaaaccagggatgcaagaagggcggaacgcaaagaaggagggagatgaagtctcatattgtatcaatgatattatgaccagtaatacccggatttataatccttcttcttctttaaatttccatatcttgcttgtattaagattattgcattaataattattgaaatggatggaaagatagtttaaagaagcctgttttattccccttcatgatttgcttaaggagagtcattaacgaaaataggcttgccaacggattataaattcccagattggccgttcaccctcctgatgaaggcggtacctgcaaaaacaaaaaggccgtcccctcacgggaacggccctggcttggaaatcttaccttattgctgctgggcgccgctctgcttgagcatctcctggagctgttccggggaaatgctcatgggaccgccctggggagccggggcttccgaaatgccgtccagttccagatcaaagatgagcggggaattgggctcgatcggagcgccgggggtgttttcaccgtaggccagctcggaagggatgtacacgatccacttggagccgacgggcatggtggtcagcgcctcggcaaagccggggatgacctggaggggaagttccacggatttgcccttggtgtcgtcaaacacggtgccgtccagcagcgtgcccttgtacttcaccttgaacatggggttcttgaacttcttctcgtcaaatttttcttcgccgcccttgttcaccaccttgtactggaggccggatttcgtggtggtcacgccttccttcttgccgttttcctccatgaacttcttgctggcttccagattggacttggccttggcagagatgcgttcgtcaatctgcttctggaacgcgtccagggcgggtttcagctgttcctggtccttggcgggcttgcggaccatgccgtccttgatgccctgaaggaaggattcctggtccaggtcgtcaaaggtaagggtgggaatggagccgagttgctgtccgctctggaaacccagaaaatagcccaggtcctttttcatctgttcgggagacacagtaatttctttctcttgtttgggttggtcggccgccggagcttcggcagccttttcttgcgcgcccgccacacccgccagaagggcggaaacggcaaacagggcgatggaagggttcatcttcatggttgttttttatcctttgtttgaaaagaggactcctttttaacggattccgttcacagaacaagacaagagaatcagtcatcctgtcatccgttccggacgccctctcgccaaaaggcgcagcgggttatgccagcgtttccagaacgcgggcgatcatggcgggataaagggcatgctcctgctcctgaatgcgggcgtgcaggctttccggagtgtctcccggcagcacgggcacgcgcgcctgccccaggatggggcccgtgtccatgccgtcatccacgtagtgaacggtgcagccgctttccgccgcaccggcgtttacggcctgctcccaggcatgaaggccggggaaggaaggaaggagggaaggatgaatgttcagaatgcgggaagggaattccttcagcagcggatgcttcaccaggcgcatgaacccagccaggcaaacgcagtccacgccgtattccttcaggcgcgcggcgacggcggcctgggacgcctccgggaatttggttttaaatcccccgcagtcgatcacctccgccgggatgccccaggaacgggcgcgctccagaatgtaggcgtccggattgtcagacatcaccacggcaatttccgcccggagggagccggaccggatggcgtcataaatggactggcagttggaaccggaaccggaaccgagtattcctaatttgggcaacttggacatccgggggatgaaaccacagttttttgcccgtggcaagtctccggcttgacaaaaaggccccggtattcgcctaataaaggcatgagagacacccgttttcaggccctggcggcccagcttgcagggtattccaccaccctgcgtcccggagaccgggttttgctggaattaacggatattccggaggaaatgggaatagcccttatccgggaggtacgcgccgcaggcgcaatgcccttccttcgcctgaaccagtcccggctgaaccgggaaatgctctccggagccacggaggagcaatacggcatcatcggccgccaccgcctggcggaaatggaggagatggacgcctatatagaaatacgcggcggcgggaacgcctttgagctgtccaccgttccccagaagaatatggccgttgccatgaaggccctgaaccccgtctcccagaggcgcatccgccacacgcgctggtgcgggctgcgctggccgtcagagggaatggcccagcaggccgccatgagcacggaagagtttgaggatttctatttccgcacctgcctgatggattacggcgccctgcgccccgccatgcagaagctggccgccatgatggaggcggcggaccacgtgcgcatcaccggaccgggaacggacatttccttttccatcaaggggctgcccgccatcccgtgcgcgggggaatgcaacctgccggacggggaggtgttcaccgcacccgtcattgacagcgccaacggccgcatttccttcaacaccccgagcctgttccagggcattccctttgacaacatcagcctgacgctggaaaacggcctggtggtgcatgcggaggcgggggacaagaccgcggagctcaactccattctggatacggaccccggcgcgcggcggctgggggaattcgcctttggcgtcaatccggccatcacccgccccatgcgcaacatcctgtttgacgagaaaatctccggctccttccacctgacgccgggacaggcctaccacgtggcggacaacggcaaccagtcccgcatccactgggacatggtatgcatccagacggcagcagccggcggaggcgatatttacctggacggcgtcctggtgcgccgcaacggcttgttcaccatgccggaactggctattctcaatcccgcccaatcatgactacggactccaccccctccaaaaaacgctccctgctccgcaaactcctgtacgcagccgcggcagtcattctgctggggtccctgctggcctcctacatgaactgggaggccaaccatctggaattcagtgaaaacaccgctcccgcgggctgcgttccgggactttccggactgcgcatcctggtgctgtcagacgtccacaccaatcttcccctgctggaaaaagcggcggccatggcggaacaggccaggccggacatgatcgtgttcctgggagacctgtacacggattttctgcgggccacccacgcaggagactacatcacgcagatgaaacggctctcttccatcgccccggcctacgcgtgcctgggcaaccatgacatggccctggtggacaacgtggagcgcatcctgaaggaaggcggtttcaccctgctgaggaattccgcagccttcgtcaccatccccaggctggggaacgcggaattcaagctggtgggactgggagacctgcgcgagggggacttctttccggaccggtgcatgagtccgcgggaattgggggaagaatccgtgatgcccaccatcgtcctgagccacaaccccaaggggagggaattgctgggcggctatcactggaacctgatgctctccggccatacgcacggcggccagatcaaactgcccttcttttccacccccctgctgacgtcggagggggaaacgatgtactccggcttccatccttatgaagacaagcaggtcttcgtcacccgcggcataggctacatagggccgggacgcttcaactgcccgccggaaatcaacctcatcaccattccatagccccttttcccgaccgccatggttctctctctgctggcttccggaggccccaacgccgcgcctcccttcttcaccctgctcaccgtcgtcttcatgggcatcattgcgattgccctcattctggcccatttccggcagtccctgctggcgggctacttcatctgcggggtgattctggccaactgcggcatcctggaccacatccccaattccgacgtcagcatccaggccctttccgaggtgggcatcatcctgctcatgttcacgctgggcctggaattttccattgacgagctcaagcacctgcggaaaacggccctggtcggcggcggcatccagatgttcatctgcaccgccgccttcggcatggggctccattacgccacgggcatggatatgagccattccctgacagtcggggccatcatgggcctttcctccacggcggtggcgctgaaatccttccaggaattcggcctgagcggcacctccggggcaaaaatggcggtaggcatcgccctgttccaggacattgccgccatcatgctggtggcgatcatgccgcagatcttcgccgccacgcccgactcctgggaaaccgccctcaacatcggcatggccgtcctgcgggggctcgtcttcctgggggccgcatggctgatcggccactacctgctcccgcgcatcatgctggccgtggcccggaccaagagccgggagctcttcaccctgatggtcttcgccatctgttccggcatcgccatgctcgccagcttgctgggcctgagcattgcgctgggggccttcaccgccgggcttttcgtcagcagctcctactacagccaccgcgtcctcagtgaagtgctccccttcaaggaccttttcctgaccatcttcttcgtttccgccgggctgctgattgacattgacgacctgtgggagcacatcggccatgtggcgaccttcgccgcctttgtcctcgcgatcaaattcgtggcctgcatcgtggccgcaagcttcctgaaaatccccggccgcatgggcatcatggcctccaccgcgctgaccaacgtgggggaattctccctggtgctcatccccttcatgcaggaaatcacccccattccggcgctggtgaccaccaatgtgtacgccattgccgccgtctccatgggcatgacgcccctgctgatgaaggcggcgcggaagctcacccccctgctggtgcgcattccgggcctgaagacaaaaagggaacgcctcagcgtggaaaccatgatcacgcgcgtggagggaatcaagaaccacgccatcatctgcggctacggccccgtaggcaggcggctgcatgaaagcctgtcccagtacggcatcccctgcatcatcatcgacctgaacgcggacaccgtcaagaccctgctcaatgacggccatctggccttcctgggggacatccagcaccagatcaccatggacctggcgggaatccgcaccgcgcggctgatcgccttcacgttcccggacccagccccggccctgtccacctacatgcagatcaagggagccaacgcgaacatcacggtgatagcccgcgccaaattccgttcggaagtggcttccctgcatcatgcgggcatcgccaacgtcatccatgatgaaatggaaacgggcgccgccgcagtgcgcctggcgaagctgagctttgatattattgaacccgcagacgcgcccacgctgtcccattaaacaatgacgaatcttccggacgcccacacccaccccgctcctgccgcacccggcacggcgccgcgcttcatctgcggcacctccccggcggactgggagcaggtggcccttctggcggaacgggataaaaacgtcacgcctttcttcggcattcatccctggcgcctgaacccggctgcatggaaggaggaaatgcgcctgctggaatccttcctgaaaaaattcccccgtgcgggcattggggaaacggggctggacaagtgccgccgcggcattctggggctgcccctacagcgggaagcgctgaaacagcacctggagctggccgcgcgcctgaaccgccccgccgccctgcactgctgccgcgcgtggggcacgctggcaggaatgctgaaggaatatccccggctgaaagccgtgctgcacggctggacgggtgccctgaaccccggcgcgcagctcccttccggcaactggcttctctccgtggggcctcgtgaaatggatcgcccgggcctcctttcctccatcccgctccatcggctggcgctggaatcggacgaacacccggaggccttgccggagctttaccggaacgccgcgcaagccctctccatgaaagaggaagaactggccgccctggttgcggacaatatggagagaatctccgcccgctagccgccggaaggcgcaacgccctcccggaacgcgggtggcaggaaacagcggcttttttccttggcaggctcctgccgccggctatcatgcgggcatgggcctttttcaggatcaaaccagttctctgtcggaaatcaagcggcttgccgccctcgtcatggatccctcgcgcagggatgaaatcggtccggaccagtggcccctggccatgatcgcctatgggctggtcacctgcaatgaaatgggcagggaagaagaaggcgtcaccatttacaacatcttccagtcctgctgcgcgccggacgcgcggcgcaaatgcgcgctgcaactggccaccttcatccgccagcgcaagggggacggatggcgggccctcctgcccttcgccatgacggatgaggccccggacatccgccggcaggcttccttcctgatttacacgctggccgcccccaaaccggaggaacgctttcccggaatcgccgggctggcagacatcatctgtgcgaatccgctacccggccaggcgagcatggccccggcgctggacgccctgatgagcctgggcgacatgcgggttgccccttatctggcctccatttccaaaaaacttccttccgaacgcctcgcggacctgctggccggaacggaagccattcccacggacctgggctgcggatggctgctggatgttctggacgaacgtccggagctttcctccgccattgcagcggtactggccggaatgccgtccagggccggagaagtcctggatgtggtggtgcccatcccctcctggcaattcaccagctccgccgttcagccgctccattcctggagcattcccgaataccggctgcgcatgagggaacggctttccaggcgccttggaccggaagaacaggaagccgttgaccgggcatggagctgattctccgcgccctgcggaccagggcccacttcgtttataaattaaaagagccgttccacggaaatgaggaacggctcttttaatgttcagaaaaaccaagctcaggcacgtttgcggcgcaccaggagcgccgtcagcccgagaagccccagcgtagcggtggccggttccgggatggacaagggcatgccgtgcgtatccaggtaggcaaagtcgtttccgttcaacacgccgtcgtacacagccaggttatcgacaaaaaggccgttggccccaggattgtgatccccgctccccttgatgctggtaaccttggaatcaccggaaagactcgtcgtgaccgttttgacaagctcgccatcgtggtaaacctgcatctcatttcccttgaacgtcagtccaaggtagttccatgtatcatcagaagcagcaaacaactcggttccgtccggaattccgatattccccccgttgtaaatcacccatttattggcggccgtcatctccaccctgatcgtcgtgcccgctatcgtcatggaaaaagcatccttccagtcagcactggaagaactgtaatacatgtggatgcccacgctgaaaccggtggcaaaattcaggccgtcaatgccattagtgctggtgatgttgaacgttccaccgttgggacagtgggaataaccgccgtccgtcatgggtgtaatactattactccaattgatgtacccggtcgtttttgaaatggcagtggaaccgcttcccagattgatgaaattctgattgctcccaagctggttgaaatccagtccgtacaacagggaagaagcctgtacgccggaaatgaggcataaggctgccgccactgccgttcccttgaaagttaaatggccatggggattgaacatgcgtccactgaaacggataacaaatccggtatttgaaaaaaacaagcagtaaatgatgaaataaattgaaatagaacaaggaaccgcctgttctttttcttaaagaagcggttttaaggaaggccgccgctctattaaaagagaaatataaatctttacttatcaaaaatacacgcttgacaccggatttgttatccgttggcaaatcattccccatcatactcaatcctcccggcattttgaacgcacggaaacgatgtgacaggatcaggaaataaaaaccaatacgctaaaacggaaaggaagaagacgccgaattcaacagctctttttccggcgggcccttttcccggaaatgcgcctacctcgccaccacgtgattgtggtggaaatcaacaaagctccggtacgtttcctcgtccagcaaggtttcatgcgtcatcagcaggagggggaaaggcttcccttcatccgtataagggggatgaatgtaatcaaactggggattgggcacaaaaccgtgccgctggtaaaaccccaggcggcggcgtgaaatcccgtcctccggaggatcaatctccagaataaccttgtggggaaaagcgtccctcaattcttccagaatcctttggccggcgccctgtccgcgcagggaggcatccacggcgaaatattccagatacacgaatgcctcacgctgccagctcaccagcatggcaaccacccggcctgccccgtttaaaaatacctcataacaaaaacccgggtcttgaaacgccagcggaaaatcctggacgcgccgctgttcgtgcaccggaaaacttgtccggtaaatatccagggaatccaggaatagaggatcatccactcccgtcacacggtgcttggtcagcgattcaggcttcatgccccatatccaaccacacccgtcttccttcggcaaggctcccggaaaaacttccccagtcatgcaacaacgtggccagacttaacccattcaccttccagacgattcactacttttctaacatattatataaaccgttgacaataaataaaataagaagatagagtgataagagtgcagaaatagttcatccatcctccatgtttacaccgattctccgccttttatttcttctgctgttcctggtatttccgggaggcaccaatacggttcttcatgcggaagaaactccagacatggacgactgctccctgtatattgaatcaaagacggatgtggcgtccgcccaatgcatgattgacggaggaaaccaggaagacgacaaaaaacggactgatgtgggtattggagaagaagttgaactgaccttgaccgggaagcggttaaaagaggtggatttggattccatagaatggaccatggaaccggataatctggccaccgttgaaaaatcggaggatggagataatcaggcaattctaaccatcaacaaggatattactgaaaacaagattcttacaatccgagtcaaaacaaatctcgacgaagaactgccggagagaaaacctctgattcttcatatttttattccatctgaaatcatggcagtacatacggggaaacgaatgcccaagtgtgcagcagatggagaaaaagaccatgcgggagcatccaccgtcctggatttaaccctgcatccattaaaagtgagtttcagtaatatcgccttcattgaacgggcgaatgatccggaaggattcaaaccggaacatgatcccggcgccgttttgttccgccccaacgccaaaaacaaggcaattcccagtgactatatcggatggaagtttaaacccggaattcgattgccccaattgcaggcttccaatcttcccaagcccttttcatgggcatgcggctggcatgtccgttccgatgacaaggactgccttctgattcatggcaaaccctatccccaggattttaatttcacttatgacggagaagaaaccgatgagaattctccaaccaaaggattacaaaacgtcaaagtaaccgtctccaaattccgccgcaccgtggcacgcagtacggcaggcaaagcgcttcataccaactcataaataatccttttccatatcattccatgaaccctgtttatgtacctattctcctggcttggacggccctccttttgttccattctcccgctttctccgatatccgcctgcccattccctcagccaccaggaaccttaacaagcagaacacgaaactgctccaacttaaaagactgctcgacgaggacagcatcattcccttctaccaggaagccgacaaaatgctgaaggaggccagcctttacagaaaaaaaaatgtcactccacaggaattgaccgacggcctcttcctgtgccgcctgattgcgaccgcgccattcatcgacgttaaccggcacagcaacgtcatgtggctgatgaaccacactaacctggactataaagttaaagatttcatgtcccggagcatgccgctagccgccttaacggacaagcattccaccttgccggaaaaggaggaagcgctgcggttttttctaacagcgagagcactggttctccagcaattccggagcagtttcaatcacgcctttgaggccacctggatctgttcggaaatgcttctggaccatgccccccagctcaccggcgaccgggaagcagccggcgaattcgccaacaggctcgcgaccaacgagtcaagaaacaataaacttaagaacatcatacccagaagggaaagaatattcgtccgcgaattaatgcagtgcttcccgaccaaagcggtggaagttaaaaaatacctccgcatggccggctacggcgacaaggatatccccgccctccttgacaggaccgtcggcaggattcctgaagcccggtacctgtacaagggtttgccgaaacggaaggattgaacgcttccccttcatctccattcaattcacgttttacctgatgcataaagagaagtggcgtgcttcatgaaatccatttgaagtttcattccggaaacattagaattcagctaaagccatgatgccgcccatgaaaattttcccgctgctgtttttcacctgggcagcttttccctgcaccctccaggcgcaggaaaaaccgcaaggggaaagcccctggccgcgctgtgcccctgcacgttccgggagccatattcttttcctgggaaacagctatacgtttttcaaccgcatgcccgccatggtcaaggccatggctgactccaaaggactgcggccggacgtgcacatgcacgcggctccggcagcctccttccagtcccactggaatgacgggcgcgcccgtgaaaagctggaaggaacggcctgggacttcgtcattctccaggaccagagcgccactcccgtcgtggccccggagcggaccatggaattcggcggcaaatggtgctcccaggtacgcgccgcccagggaacgcccgtcctgatgctgacgtggggaagaaaggacgcctccggcgttccggacccgcaggagcaaaaagccctcctcgccacgtatttgaatctcgcccggaaggaaaaagccgccgtggcccccgtgggaattgcctgggaaaactgcctcaaacgccatcccggaattgccctataccaggcggacggccagcacccaacggaggagggaagctacctggcggcctgcgtgatgtactgcaccctgttcggaaagtctccgctgggcctcccggccaaactgtccctgaaaggagtgcggctgtgcagccttcccgcagacagggccaaaatcctgcaaaccgtcgccagggatacgtgcaaacagctcttttcctcttctgccggaagccgccccggaaccgccggaccataggccgccgttctgctgccgcatagcgcaaaatctactcgcaaaacgggcgccgttcctttaaccttgcggcgatcacttacacatattatgagcgaacaagtcattatcatcggcgcaggctgcgcaggctacacggcggccatttacaccgcccgcgccaatctctctccgcttctcattacgggctcccagatcggcggccagctgaccaccaccacggaggtggaaaatttcccgggctttccggacggcgtgatggggccggacctgatgttcctgatgcagcagcaggcggaaaagttcggcacccggtttgcgtatgaggacgtcaagagcgtcatcagggatgaagccaccgggctgttcaccgtgaagaccagcggccagaattacgaagcccgcagcatcatcgtggctacgggagcttccgcccgctacctgggcattccgggagaggaagggctggtaggccacggcctcaccgcctgcgctacctgtgacggagccttttaccgggacgtgcccgtgtgcgtggtgggcggcggagacagcgcctgtgaagaagccatgttcctgacgcgcttcgcctccagggtgtacctgatccaccgccgcgacacgctccgcgcctccaaaatcatggcggagcgcacgctgtccaatgaaaagattttccccatgtggaattccaccatcgtgagctacaagacggacgacaagggagaactggaagccgtcatgctgaaggacctggtggaaggggatgtaacggaactgcccgtcaagtgcgtcttcatggcgatcggccacacgccgaatacgtctttcctgggggatctggtggaccgggacgacgccggctacatcatccgggaacccggcctgatggcgaccaagacgccgggcctgttcgccgccggagacgtggcggaccctcactaccgccaggccatttcctccgccggcatgggctgcggcgccgccattgaagcggaacgctacctgctggggctgtaagcccatcttccggaacggggcggagtttccgcgggaaattccgccccgccccgctacaggaaaacggacatgcaccattacagcatttttgagcttttcagcatcgggataggcccctcctcctcccataccgtaggccccatgcgggcggcgcaccgttttctggaacagatacgccattccccccggctgccggaaattacgggcatccgctgtgaatgctacggctccctggcggccaccggccacgggcacggcacggacacggccatcatgctgggcctgctgggggaagagccccacacggtggagccgcgcagcattcccggaaaaatcgcccgcctgcaccagcaggaaacgctccctgtcacggaggaaaaaaccgtccgtttctcccccacacgcgacctggacctttcccactaccagcccctgcgcctgcacccgaacgggatgctgttcaccgccgtcaaccaggagggagaaccggtggaagacgccgtgttttattccacggggggcggcttcgtcgcttccgagcaggagcttctgcatccggaggaaccggaccgggaacccttccccctcccctatgaatccgcggaagaactgctgcgcatggcggatgaacgggaatgccccctctcctccatcgtcatggccaatgaatgcgccctgcttccggaacgggaagtccgtgaaaagctggacctgatctgggccaccatgaagcaatccatttccagcggcatgagcgcgcgcggcaacctgccgggcgtcctgcaagtgccccgccgcgccaagacgctccgcaaatcccttctggtgcatggagaatcggccctgaaagaccctctctccatcatggactggatcaacctgtacgccattgccgtgagtgaggaaaacgcggccggcggccgcatcgtcaccgcccccaccaacggagcggcggggattgttccggcggttctcaactacgccaccaaattctgcgtttcaccgtatccggacgccgtgcaccgcttcctgctcaccgcgggtggcatcgccatcctgtacaagaaaaacgcctccatctccggcgcggacgtcggctgccagggggaggtgggcgtggcctgctccatggccgcggccgcgcttgcggagtacctgggaggaacgccccaccaggtggaaaacgccgcggaaataggcatggaacacaatctgggcctcacctgcgacccgatcgcggggctcgtccagataccctgcattgaacgcaacgccatcgccgccatcaaggccatcaacgccgcccgcatcgccctgggcggcacgggcgcccacttcgtccctctggacaaggtcatccgcaccatgctggataccggaagggacatgcagtccaaatacaaggaaaccgcccagggcggcctggccgtgaacgtggtgaattgctaaagggaaacggaaatcatcccatgggattccatgtgcgtctgttccggtaaaaaacactccggcgggttgacagacacggggagcaaaggtagggtgcgggcatgttttcacgcctttttctcgctctggccctgctggcgggcggcacgggactgtcccaggccgtccacgtcgtcatgtgcggcggtcccgccctcagacaatgggaaggactgagaatacagcctgacaggcatgacaactggtgggccaactttgtaagggcctccaccatccgcatcgcccagatccagcagaaggacccctccgccagaatcacctggatcgtttaccgtccgggctatgcgacacggggaagggaggacggcaagccctatacccgctggattgccgacctggcttccaagtacaagatcaagctcatctgggtggacagcgcggaccaagccatccgggcgctgaattcctccccgcgcttccgcggagacttcgtggaatccttctactacttcggccattccaactgttttgcgtggatgctggactacggcaacaacatcatggccgtctccacggaatggattcatgaaacagacctgaaccgcatccgccgggacattttcaccccgcggtccgactgctggagcttcggctgctacacgggggccagcatgtccggctggtggaagcgcatcgtgggcgttcccctctggggcaacacggaatccacccgctacggccctgtctccgacggcaggctgccggaaggcgtgggcaaatgggttaaataagcatgtaatagttaacagtgaatagttaatattgtttataccttgcatattaacctgcgctgttcatctgctgccgatcccgtattgcctttccgggaaaaaacctttatcatcatacccatgcggaccgaattccgccattttctgacacaaccatgaaccaagcaccccatgttgccatcgtcggcgccaccggagcggtgggcgttgagatcctgtcctgcctggaaacacgcaactttcccgtaggctccctgaagcttctggcctccgcccggtccgccggaaaacaggtcgccttccggggagaaatgctgactgtggaagaattgacggaaaaatcctttgacggcgtggacatcgccctgttcagcgcaggcggcggcatttccctgaagttcgcccccattgccgcggccgcgggctgcgtggtcatcgacaattcctccgccttccgccaggatccggacgtgcccctggtggtgccggaaatcaacccggaagcggccctcaaccacccccgcaacatcatcgccaacccgaactgcaccaccatcattacgctgatggccctcttccccctgcaccagcgcttcgggctgaaaaccgtcatcgcctccagctaccaggcggtttccggaagcgggcagcacggcattgcggaactggaatcccaggtgcgcgccgtggtggacggccatcccgtggtgaaaaacgtttatccgcaccagatcgccttcaaccttcttccccagatcgactccttcacggaaagcggctacacgaaggaagagcttaaaatgctcaatgaaggccgcaaaatcctttcccttcccgacctcaaggtgacgtgcacctgcgtgcgcgtgcccgtgtaccgctcccattccatttccgtgactgcccagtttgagcagcccgtggatgtggaaacggcccgccgcgcctatgacggaaaacccggcatcgccgtgatggacaatccctcggaaggcgtgtggcccaccccgctggacagcaccaacggggacacctgctacgtggggcgcatgcgcatggacatggcgatcgacaatgccctgaccctctgggtcgtgggcgaccaggtccggaaaggggcagccctgaacgccgtacagattgcggaacttctggtcggccgctgaactatatctactatccccgcacccattccttaacgtcatgtgtgaagaacaatccctgaacgactacattacagaacagtgcgccttgattgacgccgcgctggacaggcttctgcccgcagaggacgaaagccctgaaactatccacaaggccatgcgctacagcatgttcgcgggcggcaagagaatgcgccccgtgctctgcctggcggccgcggaagcctgcggcggtctggcggtgaatgccctggtgcccgcctgcgccgtggaaatgatgcacacgtattcccttattcatgacgacctgccggccatggacaatgacgacctgcgccgcggcaagcccaccagccacaaggccttcggggaaggggtagccattctggcgggagacgccctgctgacggaagcctttgccgtgatcgcccaggtggacgacacggaacgctacactgtccgggattacgtccgggaactggcggctaccggcggcagcacgatgctcatcggcggccagattctggacctggaaggggagcacaagcagctctccgaaccggaagtgcgcgccgtgtacgaagggaagacggcggccctgctgaccacggctctccgcttcggcgccatgtccgcgaacgccacggaagcccagttggaagccgtcacggacttcggctacaaccttggcctcgccttccaggtaattgatgacattctggacctgaccgcctccacggaaaagctcggcaaaaccgccggcaaggacgtgaacgcccagaaatccacctgcccggccctgataggcatggacggagcccgttccgaagcgaaatgccgcacccaggcggccctggacgccctgatgatcttcccggaagaacgccgcacccgcctggtggaactggccaactatctcctcaaccgcgaatattaagccgcattttctttcatgcccgcagaaaccgtatccgacaacgtggaaaccctgatcaatctggcgctggccgaagacttcggccccggggatgtgacttccacatacttcgtcccggaacacctgaccgccagagccattctgacgccccggaaaaagggcgttctttccggcgtcaacgtggcggcggaagtcttccgcaaggtggacccctccctgaaggtagaagtctacctgcacgacggggaggccgtagcgcccggcgccgtggtgatgctcattgaagggtccgcccgctccatcctgggagcggaacgcaccgcgctcaacttcatccagcgcctttccggcgtagccacgctcaccaggaaatacgtgaaggccgtttcccacaccagcgcccgcatcctggacacccgcaagaccactcccggctaccgcctgctggaaaaggcagccgtggcccacggcggaggcaccaaccaccgcatgggcctttatgaccgcgccatggtgaaggacaaccacctgatgacggacggcaacacggaacacctccagcagtgcatcaacaggctgcgcgcggaaaagcccggcgtggaaatccagctggaagcggacaccctggaacaggtggaagccttcctcaagctggaaggagtggaccacatccttctggacaacatgacgccggagatgctgaagcaggccgtcgccatgcgcggcgaccgcgccacgcccctgatggaagccagcgggggcgtcaacctggacacggtggccgccattgcggaatccggcgtggacttcgtttccgtgggctacgtcacccactccgccccctccctggacctggggctggatttcagcgtggaataacacttacctttcaccctatcatggacctgtccaatttcagagaagaatacctcaagggccagcttcacagaaaagacctggcggaaaacccctttgaacaattccagacctggtttgaacaggccctgaaagcggacattccggaacccaacgccttttccctggctacggtgaacgcccacggcaggccctccctgcgtacggtgctgctcaaatactttgaccagacaggcttcgtctttttcaccaactacggcagccacaaggcccatgacattgaagaaaatccgcaggtctgcatgatgctgccctgggtgatgctggaacgccaggtcatcatttacgggaaggccgtcaaggtttcccgcgcggaatccctgaaatacttcctcacccgtcccaaggaatcccagctcggcgcgtgggtctctcagcaaagctccgtcatctccggaagaaaactgctggaaatgaagctaatggagctgaaaaacaaattctccaagggagaaatccccctgccctccttctggggcggctaccggatcattccggacacctttgaattctggcagggcggtcccggccgcgtgcatgaccgcttcatgtacaaacttcaggaaaacggttcctggacgatcgaacgcctccagccatgattacccggcgagcaacagaccagggagtcactttcctggacgtggaaacaccgctctgtacagccaccctgtgcctgcaaggggcgcacctcacgtcatggaagccggaggggcaggaagaatgcctcttcctttcccccaatgcggtctttgcgcccggcaaagccatccgcggcggcattcccgtctgctggccctggttcggtccgcggaaaggcgaaccgtcccacggcgtggcgcgcacctcggaatggcgcctccatcaccaggagacggacaagcgggggaacgccctgctttccctggccttctatccggaagacgaatcctaccccgccgccatcctgcgcctggcgctgggccgcacgctggccatgaagctggaaaccaccgcccgcatgcagccctgcaagctcacggaagcctttcacaactactttgccgtcggcaacctgaccaaatgccgcgtacacgggctggacgacgtaccgttccgggaagaagcggcccagcccatgaagcacggagaacgcccgctggcccccctggggtgcctggaccgcgtttacgactgcccggcctgttccgggaaaatcgtgctggaagacttcgtgctgaaccgcgccatcaccgtggagcgggaccacgcctcttccgtcatcatctggaacccgggacagcagggggccggaaacatggcggatctgggcgcggaatcctggaacaaattcctgtgcgtggaaatgggcaatgccggttcccgctgcattcccctcgcctccggacaatcccacaccctgtgccagaaaatcacggtgggaccgctggaatagcaggcattccccctcccttccgcctccggatgaacggacggctggcaggaaaccccatgcgcggggaatgacctcccaggccgttccgtaccgcttccggacaggggagcatgaagaacggccgcctttccgtcctccctttcaaaaggtgaaattggactcccccggaacttttgttccctgaatcatccctccgtggagctctccggcaggattcggcttgcaaaaaccccccttttaaggtttggtagattccgagccttttggcgcgttccctaccaagatgcatacaaacccaccttccgatgttggcaacgccgcaaccttcattgcggaaatttacggtcaggatgtcttcaacatggagaccatgcgcaactacctgccccgtcccgtctacaagaaactgctggctaccatccgcaaggacgaaaagctggacccggacattgccaatgaagtggcccaggccatgatgacgtgggctctggaaaagggagccagccattacacccactggttccagcccctcaacggaagcacggcggaaaagcatgactccttcgtggacgtggacccggaaggaaacctggaactcaaattctccggaaagagcctggttcagggcgagccggacgcctccagcttcccctccggcggcctccgcgccacctttgaagcccgcggctacactgcctgggatcccaccagccccgccttcatcaagcgcacggaaaacggcgccaccctctgcatccccaccgccttctgctcctataagggacaggcgctggacaaaaagactccccttctccgctccatgaccgccgtcacccgccaggccaggcgcctgctgtcctgcttcggcggcccggccaacatccacgtcagcgccgatctgggcgcggagcaggaatacttcctggtggacaagcagctttacgccctgcgcccggacctgatgatgtgcggccgcaccctcttcggcaacgtcccccccaagcaccagcagatggaagaccactacttcggctccatcaaggaccgcgtgctggaattcatggtggacgtggacgaagccctctggaaacttggcattccggccaaaacgcgccacaatgaagttgcgcccggccagtttgaaattgcgcccatttttgaaagccagaacctggccgtggaccacaacatgctggtcatggaagtgctccgcaagaccgccaacaagcatgacatggtctgtctgctgcatgaaaagcccttctccggcatgaacggctccggcaagcacaacaactggtccctctccgcgcccggttacggcagcctgctcaacccgggttccagcccgcaggaaaacgccatcttcctcaccctgctctgcgccacgatcaaggccgtggacgaacacgcggacctgctgcgcgcctccgtcgccaaatccggcaacgaacaccgcctgggcgcccatgaagcgcctccggccatcatctccatctttctgggggatctgctggatgaaatcattgagcagattgaaaagggcggcaccaaaaaggcgtgcacccagaaaaccatcaacatcggcgtggataccctgccgatgttccccctggacgcctccgacaggaaccgcaccagccccttcgccttcacgggcaataaattcgaattccgcgccgtaggctcctcccagacctgcgcctggcccatgacggtgctcaacaccatcgtggcggaaagcctggatgaaatctgcaccatcctggaacccgtcaaggacaagccggaggaattccatgccacgctgaacaagctgcttcagaacatcatcaagaagcacaagcgcatccttttcagcggagacggctacggggaagcctggattgaagaagcggaacgccgcaaactgcccaacgttcccggcaccattgaagccctggccgcgctggaaacgcccaaggccaaggccctctttgaaaaatacaaggtggtcagccccgtggagctccacgcccgccatgaaatccagacggaaatcttccacaaggaaatcagcattgaagcggaaaccgcccttctgatggtggaaaccctctacatccccgccgtgacggaacagctcacgcagctcaccaccgccatcgcccagatgaaagccgccggcatcaaggcgggcatgaaagccaccgcggaccgcgccaaccagatcggcacgctgctggaccttctccccacccaggtgcaggaactccgccgcgccgtggacaaagccgagacgaaggtcatccagacgggcatggacaatctgagaagcaccatcgacatgctggaaagcctgacggacgcagacctgtggcccgttcccacctatgcggaactgctctttctgtaaaacaaagggctccctccggaacagaaaataactggctatcaaccataaacatcgattatcccagtaccttccccaagaaaaagggcaaattaatcgcctgacggattgacaaaacagccaaaatagttatcctttccgtccggttgtgcataggccgcttagacggacggcactgaatctagtaattcacaagaagcatctttcaacatcatgagcaagaggacttatcaaccatccaagcgttgccgcaagcgtcagttcggattccgtgcacgcatggctaccaagaacggggcagacatcattcgccgccgccgcgccaaaggccgcaagcgcctgcttcccaagggagccgaaatccagtacaagcgccataccatccagcacggccgttaattcagccgccaggacttggttaacgcctccttggaactttttcacgggccgacccgcgggagatgcgtcttactcgtcaacaaagcatgaccagggcattccaatttgcccgggtgcgcaacgagggaccatccgtagcaggtcggcttattgttttaagtgcagccccgctggaacatccggaggaaccctccaaattcggcatcatctgcacgaaaaaaatcggctgcgccgtcgtccgcaacaagctgcggagacgcgtacgggaaatcctgagggcgcacggagccccctttgaacacggcgtgcacctggtgtgcgtcctccgctggcgggccgtggaagccagctatgcagacctggagcgggactggcagaaagccgcccgcaagctcaaacttcaacttctttcccgggaacaagacaaagcatgatgaaatggctgctcattgccctggtacggggctaccaaaccttcatcagcgcccccctgcatgcgctggggggccccggcagcggctgccgctatactcccacctgttcccagtacttcatccaggccgtccgggtccacggagcctggcgcggctttcttcttggctcatggcgcattttaagatgcaacccgtggggcggttcagggtatgatcccgtgcctccggcccgcacgccgcattaaattacctttctctcccctccctcccaaccaacttcaatcaagctatatcacattatggatcgcacagcatggatcgtcataggcgtttgcgccgcccttctgggcctgaacatttacatgggcaacaataaaaaggaagagcccgtccccgccgcctccgctcccgtccagcagacggccgccgctccggcaagcatcccggctcccggagcacaggcgcccgccgctcccagcgccccggaacagtcttccgtcaacaaggcccttgaagaagacaagaccagcccgatcacgctgacggccacgcaggaagcggacggcaagcaggaacccttcatcacgtacaccttcaaccgcatcggcggctccatcggcgccgttaccctccacaacgacattgtggactcccaaaaagtcgcggaccacaacatcaccatcaacgaagcccagcagaggggcattggcgagctcgtcttcaacatggacgccacccaggacccgtcctatgacaacaccgtgtacaaggaagtcagccgcacggcggactccgtcaccctggagggctatgatcctgcacggcagctcttcatctccaagacctacaccctgcaccccgtcaagaatctggaaggaaaagtactgcccggcagcaaatacctcatccgcctgaccgtctccctgctcaacaaatcccccaacgtccaggatctgcgctacatgggcatcttcggcggcagcgcctaccccatcgccaagagtgaaccgaaggacacctacacccacttcttctaccatgcggacggttccctggaacaggaagtgccctcctacttcacgggcggctttttcagcaccgcaaaggcccgcgtcctggaaggccccttgcaggacctgacctatgccggcgtgatgagccagtattacgccaccattcttcttccccagaacgaatccaagggctccaccgtgtacgccacccgccaggaattcccgctggagcatgaaaacaacacgctggtgcccggcgtcaccgtagccatgggcatccccaacctgaccatggcgcccaacgaaataaagacactcacctacgacatctacaccggtcccaaattcaacgcctacctgcgcgacctgaacctcacctaccctgccatcagcgacatcatggcgtacggctggctcgtcttcctgagcgtgccgatgaactggctgctcaacctcttccacggatggttcggaaactggggcgtggccatcatctgcatgaccatcgtcgtccgcgcgctcatctggccgctgcacaagaaatcctacatggccatgaagcgcatgtccctggttcagccggagatggccaagctcaaggaaaaatatccggacgacccccagaaggtgaacatggagatgatgaagctgtaccagaagtacggcatcaacccggccagcggctgcgtgcccatgctcatccagattcccatcttcttcgccttctaccgcgtgctccagtactccgcggaattgaggggccagcccttctgcctgtggatgacggacctgtccctgcccgacaccgtaggccacctgttcggcatcccgatcaacatcctgcctctcatcatggccgtgaccatgattgtccagatgcggatgaccccgcaggcgggcgaacgctcccagcgcatcatcatgaacctgatgcccctgatgttcttcctcttctgttataacttcgcttccgccctggccctgtactggaccacgcagaacctgatttccatcggccagacggccctcatccgccgcctgcccatgcccgtgctctccgccgccaaaaagaagaagcccggcttcttccagaggatgatggaccagcagcgcgtggccctggaggaacagcagcgcaaggccaagggccgcaacatgcgcaacataacgcccaagaagtaggggcgcgcctttactctctcttccctgcaagtgcggctgttcacacggccgcacttttttattggggcggatgatggaaagaaaatcccctccatgacaagcgctggaagaaaagggaaatttccatacggcagccccctcaaaaaaaccggactcctccattcggagaagcccggttttcctcgtcatatattctttgtgtagctaattggagcggcccggcagaaaatgccaaacacccaccagaatcaacttagcgaatttggaatccggtatggattccatagccggaaatactgcccttcgctatgctccaaaacggtccaaattgacgctccgccaatatttctcccatctccttttcacagccgcatatcgccccgggagacagggcatcccggtcctgatggaccgcctgtggagaggcccgggggctattggataagaagcttccgctgcgctacagaaagagtttcaacaacgaaaggagggagccttccgttcccaggcgccgcaaccgcaaaaccgccctccatcaatattccaccgttccctttcacagccgcataccgtccgggagacagggcacccggctctgatggctaccgccgccgaagtgtaaagacggttattaatgattgccggaacgaaaagaaagcccgtcacatcacgaactccctatggcaattcccaggatattggcaagttcaatcccctgaaaacgtttttctttcagttttgtaggcttgactccggattccaaatccgtctgccgctctaaagcctgaaccccagcctgcggcacagccgcccccgcaccccttctgaaaaaagagcccaaaaaaggaaatatggcggacgtcttcttacggcgcagtcaaatcttccggcatcagaatagccgccacggcaaaggcggcgatgccttcccggcggcccagcgcgccgagctgttcattggtggtggccttcacccccacgcgcgccggagagatgcccagggcggttcccagggcgcccttcatctgttccaggtagggggagatgcgcggagcttccgcaatcagggaggaatccacgttcaccacgcggccgccgcgctcacgaatcagggaaacggccttcgccacgatgtccagggaagaaatatccttgcagccagggtctcccggcgggaaccagtagccgatgtccggcaatccggccgcacccagcagcgcgtctgcaatggcgtggcacaaaacgtccgcatcggaatggccgtccagcccgcgggcggaaggaatgtgcacgccgcccagcatcaggggacgcggagcttccgcaaaacggtggatgtcatatcccagcccggtcagtgcaatcatgtctttcatacaatactgcggcaatgtcgttcaagttattcgtccagcgcttccatgatcggaatgcggccgttccaggcgacgatggcgaattgttccggattgtcctcctttggttccaggacaaccttccctcccgcagcttccaccagcagaaccccggcggcgatgtcccagatggaaatgacgctttccacataggcgtcaaacctgccgcaggcaatatacgccagagccagggccgcggaaccgttgttgcgcaccttgcgtacctgccaggcgatttttgcgaagcgttcgattcccttttccttggaaccgtccgtcttgccgtgtcccacgaacaccacggcctccgccatcttttcccggcggctgcaatgcatgggatggtcattcatgtacggaatgcctcccttttccacatgccagcattcgtccatcatgggatcgtaaatcacgcccagcactatttccccgcggcggcgcagggcgatggagacgcagaaccagggaatggtgtaaaagtaattcaccgtcccgtcaatagggtccacaatccattcatattcactgttgcggtctccggtatacccttcctcgcccaaaacggcgtgggtggggaacacggagaggatttcctccgtaatcagtttctgggagagcttgtccagctccagcttgatgtcgttctggctggcttcatccaccttcttctggtcgtaaaaatgctttttcaggaaggctccggcggatttggcggccaggatggccgcggtcatttcaggtgagtggttcatgatattctattaatggaaaattggatgccatcaggtgtcctgctccgcaggagcttccttctcccggcgctcccggacggctttgcggcggttttcctccgcccggtcatacacttccccggccagcgcggcggaggtcttcgccagtgcggaggcaacgcccttctttttatagacggcttcatccggctcgtcgaagcccacccagacaaagaccgtgaaataacgccccatgacggcggagaaatgccccgtgttttccggcagcctgacattgacggacgtcttcctggagcgttcgtcgtaacggaagggaggaagggccgctaccaggtgggcggattcacgcggcaggatttcccggcggctttcttccggagagggagcgttcaccatcaccaggtttttcttggtggtgcccacctgcctgacggaggaaatctgcacgttgcgcccgtcgttgccgatgaggtacagcgcattgacggcatgcgagagaggcgcgcggaacctgccggcatacaaatccggggaacggggaaggtcccccttgtacccggccttctgcgccgtttctatcaccgtattgaaccctaccccgcgcccggtcacttcaggactgctacgaataacagtcctgcgctggtccacggcgcacaggttgacgacgggggtaaacaggtcgccgggcatcaccatcgtctgccaccggtccacgccgtccagcgcagagcgcccccccgtcacggccagcaggtcccctttgcgggaatccacgcacagcacggctgcctgcacgcaattcttcaactggttgtccactctcctgggcagtccggcccacacgggggaagcttccagcgcggtcagcgcaggctcgcttatttcctccaccatccgctggaattccaaatccagcgtagtcattacaaaaatgctggaagttccctcctgctcgtcgcagcagtccaggtcactcagctcacgggaaatgaccaggatgggataggagccgggacgcgcttcccgttctcccgccaccgtcatcggttcgcgggacgcctgccatagttgttcctgggtgatgaattcgcactcaaacatcctttccagcgtcgcgttgcgcaccttgacggccgcctccggactgtaaaccgggttgtaaatggaaggtccgcgcaccagcccggccagcgtggcgcattccgccagcgtcaggtccgccacttttttgccgaagtacaaatccgccgcctgcgcaatgccgtagcactgctgtccgaagtaaatgcggttcaggtaggccgtcagaatttcatccttggagtatttgccttctatgcggcgcgccacggccatttccagaaccttgcggtccagggtcttcccccccagttcatagcaattccgcgccagctgcatcgtgatggtggaagccccctgcgcataggacagcgtggtcaggttccggcaaatggagcggatgatggaggaatacacgattcctccgtgatcgaaaaaggcttcgtcctcccgggcaatgaaggcattcaccaggttgtcaggcagttcattgcgggccacatacacccggtcgtggtccgtcagggtgcctatccactggccgttgcggtcatacgcggcgcaattttccagtggggccagcacctcgtccagttcatactggtccgccctccaggcgtaaacgagcaggacgatgatgaaggcaataggaatgaggcccagccacagcagcagacggcccagattgcgcggcagcaatccgaacagatcataccatcttttacgcctgttctccattccggttccgatccttggggacgcctagcgggcatccgggggcagtgattcgtcatcctgcttccaatccgggaactccttctgcaggcgcgcccggtactgggaagcctccgacttgcggccagccttgtccagcgcttccgccgccttgaacagggccttgggtttcaattcggcgtcattgacgaacaactcggccgtgacgccgtaatgcttggctgcttcatcaaactttttctccgcataggaaatgtcccccagaacaattttcagggaggccatcagggggccttccactcccagggccagcgcttcctccgccgtcttccgggcgtccgcgtacttgcccagccccagcaggatggaggccttgtccagcatgccgtccgcacggcggtagggctggtcctcatccttcaggaagttgttggaagccaccagggcgcggtcatatttcttgagcgccaggcgcaccttcgccaggttgcgccagatcacctttttcacattttgaagctggtcgttctgcgtagcccaggtcatgtacttgtccgccgtttccaggtccttcatgccataggcctgaaggcccagccatgcggggatgacgtccggcacgcgggccacggcggaggggttttccttttgcagggtttccagggcctccttcaatttattcacgtcctggagcttgtgataggacagaacggaaagcacattgacctgttccccgtacttctgggggtccagcgtcttggcttccgccatgtggctgatggaggatttgaagtctccctggtcaaacgccgcacgccccagcaggaaatgagcttccgccagagcggcgggggacgccttcgggaaattctgaatcaggccttcataatacttggccatgttcaccatatcctggcggcccgcataaatctgggcggcccgctgccacgcggcggcggcggattccgccttcggccagcgagcgatcacccggtcaaaatccatcagggcctccgcttccttcttggtcttggcgtacatgtccccgcgcagggtcagcgcctcgcaaatgcgcgggtcccgcgggaaatcgttgatgaaatccgtcagcagtttggcggccacgccccggttcccggcctgggcgatcgcccacgcgctcttgtacaggatatccgcgcgcatcctggggggcaccttgtcaaaatcaatgctggcgtaaaaccgggcggcatccgccggattggtgttgaacaggttctccgcggccatcaggcgcaccatgtcgtgcagttcgctggtcggaaaggccttggcgtaatggttcaggaagctctgtgcccgctggggaaggtccttctgcttgagttcattatagcacagcagacggtaaaaggaggcctgcatggcttcctgcgtatagggaacggccttctccgcctccaggaagaaatccgccgccttctggtactccttcagcttgtaggcagactggcccagaagcatcagcaggcgcacctggccgtccttggtcggcatcttcatgtccttctgctgctcgtgctgggaaaggatctccttgtacttgcccatgttgtacagccccagcagcagccccatgcgggcttccggcgccatttccttcagggattcgtccttcaaaagccgttcatagaggttctgggcctccgcggtttttttcagcctggttgccagcatggcggcctgaagggtggcgatgccccggttcctgtcatccacgcctggcgtttccagcaccttgcggtattcggaataggcttcaccaagacggcccgtatccgcacacagggcggcataccccatccgggacaccaaaacaaatttcgcatccgcttccggattgcctatcaccgcgcagaacatggtggcggcggcgtccggattcccgctggcaagaaacagacgtcccaggcggtactgggcgtccactttcaaatcattctgttccgcattgcggaccacgagctggtaatactggatagccttatccgtttccccggcagcggaggcgtccgtcgccaggcggtaggcggaagcggcaaccagagccgggccgcccgtctgggtcagcctgcggaacagggtgtgcgcgtcctccttcctgccgagctcctccaggcacatggcggcgcggtactccgccaggggagcctgggcggactgggggaaacgctgggcaaattcaagatacttgcgcaggctcaaatcaagcaggcggccatattcctgccggtttgccttcgtcgccggttcctgggcctgcttgtacagcatgtccgccatgtccagggaatcctgctccggattggcgaccagcggaccgtccgcaatgggagcggcgtccggaatgttttcctgcgcggcggcgaacgccgccaaagtcattaaacctgcattgatgaaaaataacgctttcatgaagcctgggggttgggaacattgacggaagagggagccggaggccgcgtggagaaggaaacattgttcagcccggccttcaggcaggcgtccatcacatgcaccaccacgccggattccgccttctcatccacgcggatgcggacgagcatggttttatccagccgggcgacggaaagaagcttgtcctccagctgcggcatggtatacgcctggcggttgatcaccacggtgccgtccttccggatattcacgatgatttcattggaaacgttttcaccgggcttgggagtctccgcggaggggaggttgatggaaaggtccggctcgtcatcctcaaacgtctgggtcacgatgaaaaacaccagcagcagaaacacgatgtccagcatgggcgcgagctggaacccgatggggctgggcattttatagtggaatttcatacgttcttccggtgtggtggggatggccgcttccggctaaagcccgcgcacatcgcgcagggaggtggggtcaacgggaaccctgggaagttcttcctcatggaaggctccggctaagccggcacgcggcttctggagctgggtggctactacggaaacgctgtgcgtcacggcggcttccaggtcccccacgcgcttgtgaacgcggctgcggaagtacacataggccaggatggcggggatccccagcatcaggccgcccgcggtcgtaatcagggcttccgccacgccgcccgccatgtcgatgcgctgcttgccgccggagaaatcaccgttggcgatctcaaaaaaggtcttcatcatcccgactacggttcccagcaggcccagcatgggagccagggcgccgatgtccgacagccaggaaatctggcggctcaggaagcccgcctggcggccgccttccgcggcggctatttccctcacctcttcaaactgggcggaaggattgcgcagcatgaaactggccaccgtcagcattacgcgcgcgtagcaggagtccccatccttgcaaaggatggaaaggcccgtataatccctcttgcggatgaaggattccgcctgctccaccagcttggtgggcagaacggcggaggcgcgggtggaaaaacagcacatgaccagcaccaccaccccggcgatggataacaggagcagcggccacatgatgaagccgcctttcataaacagctcggagaggggatagtttctatctcccaccacaaagtccatggcggcagccagcgtggtaaacggtacaggattcatacaaaagacgtaggggattatacagaagaagtcttcctaggcaagccaagtagccgtaatgcagtacgtttccgcagtttcatttcttgccgcatatggcataataatccccgtggcagatcgtgagaaaccatctctgaaggaactctggaggcaaactccgcataaacccggcgtttacatcatgaaagacgccctggggaataccatttacgtgggcaaggccaaggacctccaccgccgcctgggcaactacttttcccccacgggggccaccctgtccaatcacaagacaagggcgctcatcaatgccattgcgtcattcgactactttgaaaccaggaacgaccaggaggcttttctgctggaaagcaagctcatcaagcagtaccgcccgcattacaacatccagatgaaggatgacaagcgctatcccctgctgaagattcccaagggggaaaaactgccgcgcttccagctggcgcgggtgcgcaaggacgacggagcgcgctacttcggcccctttgtccactcccaggcgctttacgccacgcaggaatggctgaaccggcatttccggctgcggacctgcaaggccaaaaatccgggtctccacgagttcaagcactgccatgcggacgtgatacgcaactgctccgccccgtgcatcgggcgcatttccgtgagcgactataaccggaatttcgaccaggcggcgcgcctgctggagggaaccggcaaaaaaagcactctggacgagctcacccgggaaatgatgcaggcctccgacgagctggacttcgagcgcgcagcgtacctgcgggacatccgggacaacctggtcaaggttctggagcccgcgcggcggttccagaagggaacgcccaacctgcccggcaccgtgcgcccggaagaagacatgaaggaactggggctggccctgggcctggaagagcctccagccatcatggaatgttttgacatttccaacgtctcctccaaccacatcgtggcctccatggtgcgcttcaccaacggcaaaccggacaacaaggcttaccgccgctaccgcatccgcacggtggacgggcagaacgacttcgcctccatgtctgaagtgatccggaggcgctactcccgcattctggcggagagcgacgccgtggcctcacggcccgcggacatgaccctgtaccagtggctcaagaagctcagcggagaaggaaaagcccccatcaaggttccggacctggtggtggtggacggcggcaaaggccagctctcctccgccctggccgatctggaagccatcggtctgggtgacatgcctatcgtcggcctcgccaagcagcgggaggaaatcttcttcccccaccagccacagcccctctgcctgccgcacagcacgggagccctcaagctcatgcagcgcatccgcgacgaagcccaccgcttcgccaacggctataacgaactgctttaccggaagcgcatgcgggaaagcgccctggacgacgccccgggcatgagcgcggcaaaaaaaagcatgctgctggaaaaattcaagtccgtggccgccatcaaaagggcggacccggcttccatcgccgccatccgcggcatttcggaaacctgggcccgcaacctgctgaactacctcaattcatcctccaactcctgacttctcatgcaattcctgattctggccgcaggcaagccggccctgggctatgcccgggaaggcgtagaactctacctcaaccgcctcaagcctttcggcaagacggaactcaaactcgtcaaagacggaagctccaaagacgtttcagaacgcctgctggccgccagcgagggctgcctgcgcatcgccatggacgaacgcggagaactctggaccacggagaagctggtcaaactggcgcgggactggcagatgcgttccgtgcgccgcatcgcgttcctcatcggggcctcggacggccacacggaagaactgcgttcccggtgcggccatatcctggccctgagcaaattcaccctccagcatgagctggcgctcgtcgtcctgctggaacagctttaccgctgccataccattctggcgggaacgccgtaccaccggtaaacggctaaagctttccttgctgccgcggtgagtccatcaaggctttcaccgtcacggaaacggccgcgagcacggccacaccccatgccatggagtcgcccgcaattcccgtggcaaacgccggaaaaggattgaacgccaccgcaagggaaccaaacacccagccccagccgggaaagcctttcttaaaggccacgtaagccagatagaaatacaaggccacgcctgcaaattgaaacaaagggaaagcaggaccgtattctaccttcctgaggccggagacattgcccgccatgcgatgggaatgtttcagaaaagaggctatcaccagaaaaagcggcgcaagcagtaaaggagcaatagggaaaacgcttctttccgttttttcttcttccggagaagaatccggaattccgtcctgctgccgaccttcttccataatagccaatcgtaacatcaaccagcttcccctgcaacgaaaaaggagtactccgcagggagcactccttttccgagaaagaaatggtaaagccagttccttcgcagccagccaagcttagcgcttggagaactggtaacgcttgcgggcgccgggacgaccgggctttttacgttccttcatgcgggaatcacgggtcagaagaccgaattcacgcagctgggcgcgggaagcttcatcaacctgaaccagagcgcgggcaatcgccatgcggatggcgcccacctggccgtgaatgccgccgcccttggtgacgacgttcacgtcgaatttgttcatggtgttggtaacctggaagggctggagaacggcgttctgcaactggacggtgggaaggtattcttcaaaaccgcgacgattgatcgtgatgcggccggcaccttcagtaagccaagcgtgtgcaatggcggtcttgcggcggccggtggcgttgtatggggttgtctgactcatgtctggggaaatcaattagagagtgatggcagtgggctgctgggcttcatgcggatgaccggcgccggcataaaccttcagcttggtcatttgctgacggcccaggcgggtgtggggcaccatgcccttgacggccagttccagaagaagttcggggcggcgggcgcggattttccgcggagtgtccacctgcttgccgccgacgtatccggagaaacgggtgtaaatcttggcgttttccttgttgccggtcagcaccaccttgtccgcgttcacgataatgacaaagtcgccacaatcaacgtggggggtgaaaattgtcttgttcttgccacgcaaaatgttagccgcttcaacggcaacacggccgagcaccttgtcggcagcgtctataacataccatttgcgctctacttcttgcggtttggctgagaaggtcttcatggttcaattcttcgttctcgtttttcggcatcctgccgtaatcttccaattcgggggcgcattcctaatgattattcgcgtaaatgtcaaatactttttctcttttactccccttttgcggccttttttccgtcccttccgcagaatcgcggcttaattgcggcgtttccacattcaggacttgccctcgtagaaatatggcctattattcgcctgcgcgaaaattcgtacacgcgcgttcattttaaccttacaaggagaatcctatcagcccgaatccaagacccagcaaccgccccagcggcggtcagaattcccgccccggccccaggccggcaggcagcagcacaagaccggccggcaacgccagccgtcccggacagccccggcccgccgggagtggcaccggcccggcacgcccggccggacagtccgctggcccgggaggcgccagaacaggcggaggaccacgccccggaggcggacccaaccggccgcgcccgcagggaggcgggggccgccacaccaagggcaggaggcatttcagcaaatcggcccccaaggaagaaaactccgaaagcgaaattgaagtggaaggcaccatctgcgccgtgctggcgggcaccatgttcaaggtgcgcctgcccaacgggcacgaagtgctggcccacatttccggcaagatgcgcaagcgcttcatcaaaatcgttgtgggcgacaaggtgcgcatggaaatgtccccctacgacatgaccaaggcgcgcatcacgttccgcatcggttaaccgcccccggattcactccttttgcgaaaaaccttctccggcttgcaggagaaggttttttaacgtacagtgcacactgaccccatcagcgcgccatgaaagtttgctccacggaaaatatgcagatcgcggaacgcgagctcatcatcaacggaactccggccagaaccctcatgaagctggcttccgccggcattgcggaagccgtcatgcagttctttcccgtccccgggttatgcatagcctacgtgggaaaaggcaacaacggcggagacgccctcaccgtcctcaatatcctgaaacagcatggctgggaaacaggtttccgcgccgcctacccgcgcgcggaatggggggaactgcccgcgcggcagctcgcggaaatatctcctccgccccaggaataccaggaagcgccgctgccccgtacgggcaagcccatgattctgctggacggcctgctgggcattggagcaaaagggctgctccgcaaggaaatctccgccctctgcgcggaaatgaactacctgcgggaccgctgcggagccgtgcgcacggtggcgatcgaccttcccaccggagttgacccggatacggggatgccccaggaaaatgccgtagaggcggatttcacgatgtgcataggagcggtcaagcaggggctgctggatgacgacgccaccctgcatgcggggcgcctggcctgcatcgaccttcccggcctccatgtgcaggcgcttcccgccacggaactcatcacctcctcccggctcactaaattcctctctgcaagaccctatacggactataagaacaaacgcgggcacatcggcgtcattgccggatcggaaggaatgctgggcgctgccaggctctgctgtgaagccgccctccgggccggagccggactggtgacgctccacgtccaccggaacgtctatcccctcatagcgccgtccatgccgccggaaatcatggtcaaacccgtggacagctatgcggacgtctccatccggacgttcagcgcctttctcattggccccggcatcggctccgtatcggaggaagacgcggaagccatccgcctcattctggaaaccggcactcccaccgtcctggatgcggacggccttaatctggccgccgccatgcaatggagcctgggagaacatattctggcgacaccccaccatggggaaatccgccgtctgctgccggacgcggacaactgcgccatccgggcggacatcgcagactgcttcctggcggagcatgaagcggccctgatttacaaaggggcccgcaccatcgtcacccagcagggaaaacctctcttctacaacatcaccggaggccccggcatggctaccgccggccagggagacgtgctggcaggcgtctgcggcggattcatggcccagggggaatccctgctggtctccgccgttctgggaacctatctctgcgggcgagcttctgaaatagccatctccgccggagattccacccagcagacactgacggcgggagacacgctgcgccatctgcccgccgccattctttccaccgcacgtctctgttactaaaatggcctaccgaaaactccaggaccttcccttccaatccctgccgcgggaaaagctgctccgccagggaaggcacagcctcagcaatgcggaactgctcgccatcttcctgcggatgggcatcaagggaaaaaacgtgctggacatgtcctcggacctgatccagtcggcaggctctctggacgccctggcccacatggaggccgcagaaatagcggacatctgcaagggaataggcatggcgaaagcggccacgctgagcgccgcctttgaactgggagcgcgggctctccgggaaacgctggcccggcaacctatccagacgccggaagacgtctatgactacctggtaacagccatgcgctggaaggacaaggagacggtactcgtcctgctgctggataccaaaagccgtctcatcaaacccgtggaaatttccagcggcaccctgaacgaatccatcgcccatccgcgcgacattctgcgcccctccgtcatccacaatgcctacggcttcgtcctggcgcacaaccatcccagcgggaacccggctcccagccgtatggacgacctcctgaccgaacgcgtgcgggaatgcgccaagctattgggcgtccggttcctggaccacgtgatcatcggaaaacctaccgaaaccgttcacagaaactattacagctacaatcatcccaacggagaccggctccgggaagccgacaagggcctccctctctatcattaaacaacggttcccgcgaatttccttccggaacgacgcctgataaaaacaaaaaacccgtcttgcgacgggctttctcttaaaaaaaactggcggagagagtgggattcgaacccacggtgggttttaaagcccacgttcgatttcgagtcgagtgccttagaccagctcagccatctctccgcttggaaatcgggagcgtttgtatccggtttgcgggatgctgtaaagaacagaatcaccgccaaccgttatttgaacgcctttaacgtcttggcgaagccaacggtcccagcgtagcttccgcttcaaatctctgggtcttgttatggggaagagcgctcttttccgggccggggggcggctgcggaacacgctcccgttccttcggctccatcagccaggagcaggaagagaccagaagaagggagaaagacgtaagcaaaagggaggctgtgaatcgtttcatcatttccttttaaaaagttgaaccccactatgccggagggcacagcggggttcaaggaaaatacgcggcagaaaccttatttggcggactgcaacggacgcagaagctgcaccatgtcgccgggctggatgctcatgccggcgggcacgctgtccttgacgatgtcagccaccgtctggttcttttccagggaggtcaccttcagtttgccgatgctgcggccatcacgggtaacgagcagaaccgtattcggatcaatgttgctgccctgcccggcgccaatcaccacaaagccccactgcgggtccacggacagaacgggatattcatctccattcttggcgagggcggcgcggtattcggcctgttccttctggcgtccggccagctcggtagcctgctcggcacgcttcttggcggccacttccgtagcgctcttgatctggtcaatgtcttcctgaagcttcttgttggaggattccatggattccatcttcgcctggatttcctgcacgctggaaacgccgaagtcgttcagcttggccttgagctcatccatctgcttattgatcttggacaggtccgcattcagctggacttcttcttccttcagctccgtttccttggagagctgttcgtcacgctgctgggtcacggaggccttgttggaggtcaggctcaggttttcctccgcagccagaccgcggttcttgatcatgtcattgcgcaatcccgtccaattccggatttccttgtccagaaccttgcggtaggtgatcatctccttgaagtcctgatactggccgttgacgccgaagaggccgctgagaccggagaaccaggcgcccgcacctgctgcaagaatcaataaaactactaagacagttttcattgtgtatgtatgtgagagtgtatggtgtgtattgaaccgggaaaggactagggacgaacggatacaacgacgtctccggcttcaacacgttcgccggcggttaccgtgctggggagaatggtggccgtggaaacacgggattcaacggcgcttacgtcaagttcggcaattttgttgccatccctcatcacggccagcttggagccgggcactacgcccaggtcggcagcaccgccgtcaatcacaactacattgaaatcattaatcacctgggaaacccgcgttttcagattgggcggggaaaggtgcgcatcctggtccgccttgagctggcgaagggccgcattgttcacgacaagctgttccgtttcagcaacgatggcgtcatgcttgccctgctccgcctgcttgactacttccagctgcttggattcttcttccagtcccttgatcttgtccgcaatggcctggatactttccatgtccttgctcttggactgaagttccgccaaggctgtttgttgcgcctggaggtccgtcttcttggcctcattggcggcggccagctcctggttcttggcttccagctcgtccttctgcttggtcagggcgttgatatcgttcgtcaaagcctcattcttcaccaggaagtcgacatattttgtcttttcttccgtaaactcgccgcgaagaccgttcaggttcttataacgggagacgcattccttacgctccttggttagagcttcctcgttatcaagataatacatggctccgccgagaagagcaatgaccaaggctgctattgatactttgacccacataggaaataatagagatgagaaggttcctgttacttttgtgagattggcatgaacattttcagatttcaacatcaaaatgtcatcctcactgttttcttgatatttttttcagggaagctccgtaacaggataccgcaagagttctcttatcaacattttaaaacaattacgctctattttcttttcaaacacggactcatcttctagtctttctgaaccgtgagttaccaggtctttgccagaaaataccgtcctctgacattcgatgacgtccttggacaggatcatgtcgtccagacgttgaaaaacgccattgagcacaaccgcctcgcccacgcctacctttttgtaggcccccgcggaacgggaaaaacatctaccgccagaatttttgcaaaagccctgaattgcagcggcggtcccagagtggactttgacccgcatgaagacatctgcgaggaaatagcggaagggcgaagcctggacgtcctggaaatagacggcgcatccaaccgcggcatcgaccacatccgtgacctgagggacaacgtgcgattcgctcccagcaggggcaatttccgcatcgtctatatagatgaagtgcacatgctcaccaaggagtccttcaacgccctgctgaaaacgctggaggagccccccccccacgtcaaattcatttttgcgactacggaaccccacaagattctgccgaccatcctgtcgcgctgccagcgcttcgacctgcgccccattccctctgaaatcattgcggaacacctgcttcacatcgcctctgcggaaggagtgagtctgagccgggaagcggcctttgccgtcgccaaggtggcggacggaggcatgcgggacgcgcaatccatgctggaccagcttgtttccttctgcggagaccacattgaagaacagcaggtgcttcacatcttcggcatcacgtcccgggaaaccgtagcccatgcgctggcgctgattctgaacaaggagctcccctccctcctgcacctcctgcatgaacaggcggaagctggaagagacatgggccagttcctctctgaaatcatctccgccgtgcgtgaaatcctggtctccaaggtggacccggaggccagcttcgattccctgccggaatcctccaaggaggaactttccgaactcgtcaaacgcacccagacggacaaaatcctgcgcctggtggaagtgctggcggaaacggaagacaagatgcgctggtccaccaacaaaaggctgcatctggaaatgggcctgatcaaggccgttcacgctctcgcggaagccagcatcagcgatattatcatggcgctggaaggcgcccccctggcatcctccgtcccatcctcctctccggcacccgctccgcgccaggaacaggagatgcccgcgcccgccgccccggcccctgcgccggagcctccggcaaacgcccagccgccccttcctgcggaaaaaccggagcccgctccggaagaacacctgatggacccggttccggacttttccccggccaaaccattcccggctcccgcggtacaggcgagcgaacctgccagtgcgcaaccagccccggctcccgcagaagaacccgaaccgcagcccactgatcccgcgccggaacctcccgcaactgctgcaaaagccccctcccccgccattccgcaggaagagccttcctgtcccgcacctgaaccgcggccggagcccacttccgacaccccggaagagcctcaacgtcccgcctctgccatctccgatgccccggtggctcctccggattctccggaacccactttcatggaccctgaggaaaacctgccgccggaaaggcgcaccagcagcttctttgacaacctgttcgacacggcaagcgctccttcccgcacccctgctcccatggtaaaagaggaaccggaagcccctgccccgcaatccggaagaaccatcacggaggaggactggaaagcggcgctggaacgtgccgccgccaacttccccctccaggcggactttctggccaacagcgttttctccggccatgacggcgcattcgtcgccatctccttccatccctccgaccatcagggaatggacagcctcggatccggccccctgcgggcggccctggaagcggacctttctcaacgcggcggagtccccgtcaccatttccatccgccaggattcctccgtgccggagccggttcaggaagaactggccccgctgccggcgcctcccccccccgcggcctccgcaccttctcccaaaccccaggcgccgcgggaaaaacccgccgcagccgttcaggaacccgcccgggagaaagatgaagataattcctactatacggaccccctgattgacgccgccatggagatcttccgcgcccgcatcatttcccaataaacaacatcaacccatacttccaaatacgacagccatgaacatgatgaaaatgatgaagcaggtccagcaaatgcaggccggacttgccgccgcccaggaaaagctggcctcccagaccgttgccacggaaggcgcgggcggcaagctgaaagtcaccgccacctgtgacggaaacctcacggagctggtgattgatccctccatcatcgacccgtccgattcagaattcctccaggacctgctcctgcaaaccatcaatgccgccatagccaagggcaaggaaaccgcggcggcggaaatgaaaaaactgacgggcggcatgggcctccctcccggcatgggcctttaacctaccaccaccgtgcatcggctcagaagacgcaaacatctggcggaaccactgccagcgttatccggggtcaaccacctgggaatagcgctgggcggcgtctctctgtgcctgtgggtcatcgtcgtcaccatcttctggaccggttcggacacaatggccttcatgacgtcactgcccacttgggcatgctgcctcatcttctccttcccggcgcttattgcatggctggtcttcggttcccggataggcctgcttggcgtcattatctggtttgcgtacggcatcgtcattacggactttcttcctcccatttccagaacgggaatggagtattacaaaatgccgccggctccggatgcccggcaaatcagggttctcaccctgtacgggggttgtgtggaaaatccgcccattgaacaaatctccaaactccgcgcagacgtcatcttcatccagggatgcagcaaccacaaccggacactcaaattcgcctacagcattttcggacgcacttcctacatcaagcagataggcagctgcgccatcatcgtgcggcacgggcagattggtccggcccaaagcatcacggacacagccggactcatcgtggactggataccggaaaactcctccctggcgatacggctcatcaacatcagcctggagccttttgaacaccgctttgacttgtactcccccgcctgctggaaatacttccacacgctccggttcattcaccgcaaacagcttcaatacctgtttgacaccctgcgggaggtaggaagccagcacggtgaactgcccatcatcctggccggaaacttcagcgccgcgccccaatcccctattttcgccaagctcagcgccgactttcaggattgtttcaaactgaagggagccggatacggagccactcaacccgtcaacttcccgctgctgcgcctggaccgtgttttctgcacgccgccgctcaaacccgagcgagccgcgaccgtgctgataccggacaccgtccgccgctccatcctggcagacattgccatgccctgattcccctttccacacggccgcgccattccgctccggcagaaggaatttctccatccgcctccccaaacggaggcgcttttactttatggggaaagaattttctccggaaacctacaaggttttcagcgcacgggaaatagccgggaaaagctgcttcttgcggctgaccacatcggcggcggaaaacaagttggggcccagccgctcgtattcgatgtgctccagcacctcttcatccccgacggccagcagcatggaatcatgcgtgacaatgtccgtgaccaacaggcacgccagcttcaatccttcctcttccaccagcttctgaagctccttcaccagatcatcctgaacttccttcaggccgaacatgcctatttcctcaatctgtgaaatgctgatcttgtgcccgtactcggtaaaggttttcctgtccgcctggacaatcgcgcagggcgccgttttggaacgcagcagggaaccggtggcaaaaaattcctccgtgaacttcttggcgtctatcctggcaatgccggtcagccattccagcatttcccggtccgcccgcgccgtcgtgggagacgtcaggttcagcgtatctgaaagaatcccggcgcacaggcaaatcgccaccgcctgcgaaggctccgcatcacggtggtaaaacctgcgcgccaccagggtggaagtggagcccacgggttcattcaggaagcggatcgggtcccgtgtggaaagctgggtgcccaggcggtggtggtccatcacctccacgatttccgcttcctccactcccttcacggcttgtgaaaactcattgtggtccaccagggccacgcgcgtacggggcggatccaccagatccgtcttgctcagcacgccgatcatcttgttcgtcttgatgctcatcacggggaacagcgcctgcttgcgcttcacggcggcctgcctcaactcgggcagcggcatgttctccgggaaaaccgtataatccttgtggacctgttccctcaccttccgggagcagcggataagctgccccacgctggccgtatcccacggggtgcttaaaatgcatgtacccgtcgtctgggccgtctcaataatatccagggaagggaaagccccggacgtggtcaccagagcgcgcacgccgtgctccacggcatacagctgcacattcgggcggtccccgcagataacgatcagatcgcggacgatgccctttctcttgtaattggcaagcctcgtccggacgctcggctcgctggaagcgcccaccagaagaatattctgcgtttcctcctcgctcagggtctccccggtcaggcacttgccgtcaatggtggtggcaatgttgctcaggctggaaaaaacggagcgcacattcatctccgtcatgttcaggggcatcagcaggctcagcaaatcaaaataacgcagcaggccgtaaagattgtggtccgcgtcaatcaccggaatggtttgaagggagttctccgtcatccggcggtacgccgtcaggaacgtgtcgttcggactcacgctgatcacgtcacggcggcagatggttcccgcggtaggcgtcacgtcatgaatcagcaccggttccggcaccccggctttttccagcacccaggatgtcctcagcgtcatctccccgcatctggcggcaaccgcgtcaggttcgccatgggttcttaaaaactccgcattccctatggcggaacaaatggcatccgtatccggattctggtggccgatcacgtaaatgggccttttctctattttctccggaagcatctctcttatctcctgcgcaggttaatctatattcaacctgacgggcaccaccaccttggaagcaatgggcgcgccgtctttttctgccggatagaaagtccaattctctttcacccagcgcatgaaaagacggtccagttccgcatttcccgttgattgaaggagattgacggatgaaggttcgccacggggattcacccccaccactactttcaccacggcattcaccttcccgactctagaagaattgacggaattgggcaaggacggagcatgtttataacgcacctttttatcaggagtcacgttctcatccgggctaggctgccccggcagggaaaccgccggagtcttcacgggacgcctgggctttacctccctcatggaaatccgcatgctggaaagctcctccggcaaatactccgtgggagtctcctccggaagaaaatccttcatgtcggaacaatcctcattctccggcagcttcatcgcaagcaggtcttcatccgcggaaatttccggaacggggttgaccgtggaaggggccgcgaccggctctacgggcacgggctgaacttccgccagctcctgaagaacctcctcggaaggaggcacaaactccatttccacctccccgttctgcacggcgggcagccacagctcctgaaaatgaatggctaccagcacggcgcacaaagccacctgaacgcccacggccaccgccaccgcaatcagcatggcggacttggaagtggaacggggcgtgaatcttacaattccgggcttttcatccataaaaaacgggcagggagaagggcagtgcctgttcaatataccagcgcccttccctttgacaagcgcctgcaccgccataagcagcccgttatcattttgttatctgccggaaaaacgcatggacatcaataacccaatgcctcccggatgctctgggcgaatctgccggccttttccgcaaagccaagctccggattctggtacatgatgccgcgggacacgttaatcagggggggggccgcatggccggaaccgctcaggctggaaagatcgccgccctgggctcccaggccgggaatcagcaggggagcgtccggaatgcgctccagaatggaggaatccgcattggtcagccccaccaccatgcctacggaagttttgcgcccttcctgcatggaacggcgcaccatgtcccccaccagttcataaaccctgcggccgtcggccagctcctgcctctccacgtccgcggaaccgggattggaagtgactgccagcagataaatgcccttcccttcataattcagaaaaggctccagcgtatcataacccatgaaagggctcaacgtgacggcatccacgcccaggcgttcaaaatacgcctgcgcataatacttctgcgtctccccgatgtcgccgcgcttggcgtccagcaccacgggcacgtctttcggcatatccggaagcaattcctcaagcatctccaggccgcgcaggcccatggcttcaaaatacgcgatattcggcttgaacgccgccgcatacggagcggtttcttccacgaccttcctcaacagggaaggaaccgactgcaaatcatccatgacggggcgcgggtccagccccacgcacagggcggaaccggtctttctgatgcgggcggcaagtttatccgtaaaagattggctcatgccgttcattaaaccacgggctccacgggcaggcaagccccaagcggggggcgttccggaggaaaggaaaaggcagatacggcttttccaccgcgcccgcacatgctatgttccggcccgtatggcacctacggaatcccagtcttcccccgctcctctctcctgcctggaaaagccgctgcccctggacggcttccagggcacgccggatgaaatcgaacagcaatggtatgaccgtgtctacctgggctccggagacagaatgaagcagcttacctggagagccgtcatcgtaggaatgctcctcggctccatcctctccctcaccaacctgtacgccaaccttaagatgggatggtccttcggggtggccctgacggcgggcatcatctcctttgccctgtggaacgccttcgtgcgcctgggcatctccaaatcccccatgaccattctggaaaacacgtgcatgcagtccgccgccagctccgcgggctactccacgggaggcacgctcacctccgccgtggccgccctgctcctgctgacggggcagcacatgccgctgggcgtcaccttcgcctggatattcttcattgccgtgctgggcgtcaccatggccattccgatgaagcgccagatgatcaacattgagcaaatcaggtttccggacagcatcgccacggcggaaaccctcaaggtgctctattcagaaggcaaaaaggcggctggacaagccaaagcccttctttactccgccctcttcgcctccgccaacgccatcgccatggcggcgggaggggaacaatggctgggcaccgcccagcagcaaatcctgggcaactggtaccagcgcaccattttcttcaaatgggacctcatgttcgtgggcgcgggcgcgctggtaggcatgaaaacttccctcagcctcttcatcgggggcacggtctgctgggcgctttacgtaccgtggctggaaagccagggactgcttcctgcgggagcgggctaccgggacagcgtgggttggaccctgtggggaggaaccgcctgcatggtcgtcgccagcatcgtggccttcctgttccagtggaaaagcatcgtccgctccttctcctccctgggcgccatgttttccctgaccaaaaggcgcgagctgacggacgtggaaaaaatagaaacgcccatgagctggttcctggcaggccagctcgtctccctgggggctctcggttatctggcgtacgtcacctttgacgttccgtactggatgagctgcattgcagtagtcatctccttcttcctggcgctggtcgtctgccggatcaccggggaggccaacatcacgcccaccggagccatggggaaagtcacgcagctcatcttcggcggaatcgcgccgggacacgtgacggccaacctgatggcggccaacatcacctccggagcctccagctcctcggcggacctgctcgtggacctcaaggtgggctacctgctgggagccaatccccgcaagcaattcatcgcccagttttccggaatcttcctgggaaccctcgtctccgtgctggccttccgctccatggtcccggacgtggacgcgcttcaggccttcaatgctcctggagccagaacatgggcggccacggcggaagcgctgggcatgggattcagccacctgcacagcatcaaggttctctccatcatcgcgggcggcatcctaggcctcattctggtgcttgtcccccgctaccttcccgccgcaggcaaatggctccccacccccatcggcttcgggctggcgtgggccatccagtggaacgactccttcctcttctttgccggggccgtactcggctgggccgcggaccgctttttcaaggccaaatccaaggaatataaaatccccaccgcctccggcatcattgccggcgcggccctgacgggcatggccatcctgatgttcagcatttaccaggcggcacgctaaataccttgacgggctccggatctccggaaaaaagcatattccagagatccggcccagggtcggcatcgcgtcagcgggcttccttcttcaacgtcatttcacccttggaatccccttcggaaacgccgctcacctccgccttcaaggtataggaatccaggttggtgcggtacttcttcagatcaagcctgtaggaattgtccttattctccacgccggtccagccttcatggttatctgcggccacctccctgttcccctcgtacaacttgacggaatgaattttcagggcgctgggaccgttcttccactggaaggtggcggtgtacgttcctggcccggttacctggtccgtcacgttgaactgcaacggggaaccctgctggagatcccacggagttcccgtggaatgtctttcttccgcgctcagggcgtccagcatttcccggtgggcacccatcacgcggttggcgacggccagagcatccccggacggcttggtagaatacacctttccatttccggcaaaggccagttcctcccggaccgtcttatccatgaaggcggcctgggcggcggcacggtccttctttccagtcagcacatccagctgggattcaaaaaaattcttccagcggggcagataaaaatcggccacaagcccggcccactggcggttggaataatcattcagcgcacggggagcctggtcaatccacgtagtaacaagcattttggcggacttgtccatcaaggccttctcctgccgggtgctcccccaatccagcgccttcttctgccaggttcccagcaggaactggctgtccgtcgccaagagggcgtccatatccgaaactagggacaggaaaagcttcacctgcttcctgtaggcaggtacgtctccggcgtcaaaagcgctcctgacccgctggagctggtaaaaagcggcgtccgcgagcgcctggcggacgacatccaccaaatcatagcggaaggtctcctccttcaccagggacggctggtcattggccgccttcaaataaccgcgggccgctttaacgatgtctcccagatggtaatacctctctccgctggaccacgtggaagccttgcggacgtcccaggacgggcgggcgcagataatggactccgtacacccttcctgcgaacgggcgggattgtaaatggaggaagacaggatttccaaagcctgtacgaccgcttccggagcggcgccgtaacgctggcgagcatacttcctgagccagtcccggacgggaatatcctccgccgtccataaacggtcgctgaagagggcgtaatgcaggggattcgtttccagcccttcggacaaggtgcccattcccaccaggcccttgtccctgtagctggccaaatcactccccagccgggacagaaggggaaccccgccgtacagtcccgtattgccgccgaagttggccagctcgcaccagacccagggaataccgtcaaaagtcctcaaattcttcccgccgtcagccatgtccttggtgagctgcagcacaagagcatgcctcgggtccgtaccggccagcagctcgcgggaaggattgcccccccaggcctggatcacccaggaagaacccggtgaagccttctgcatggcaccctgcaccgcctgcgccgcgcgcgtcacgttaatgtcgcccttgctgccgccttcatggaacaaatccccgccgaacatctttccggaaatgccgtataccttgcggagagccttgtaccagcccgcggccagcttcggaaaagcctcgcaagtggggtccacaacccatggccttttgaaattgacccattccccctgcggaataagcttcagccccttcatctgcacgttctccgcaaaatctgcaggaacaaaccccacataaccctgaaggacgggagtcatgcccaactgctccatgcgggacacgatgcgcctacccatctgcgccatcctgtcaatctgctgctgggtcaacggtcctccgtgtccttccaggttgcccatattccaccaggcggcaaaagcgggattggggatgaagcggagagccttttcacggggatatcccaagccaatgaggaaatcctcccaggtcttctccaggcctgccgtcaccagcgcgtgcgtaaacccgctcagagccagaaaatcaatctcgcgctgccagcggttccagtcccagaaagccgccgtataggacagcgtgcagtaattatacgcaaaaacggtattccacggggactcaatcgtgacaggggtggacggagcaggcaacggagagagaagcgtcagacggtctccgttccatgaaaaatgtaccttggcaatatttttcagataccatccgtaccccgctaccaggcggcgcacgtcagatgcttccacccggatgcctccgggagcgccagaaatagtaatcttgctgcccatagccggattcaagcggaacgacacagcgccttttgcagatggagtcacacgagccaccacgccttcagcagccgctacgggagacatttccgcggcagagacgcaaacaagcggggacatgaccgttcccagaaccgaaccgactgcaaaagcatgtgaaagcatagcaccaactatacatgcaaaatccgcggtgtctttcaaggagtaatgcaatggcgggaaaagctggatagcccccttattgattttctaccgaagagcttagaggaagcaaaggcgcgacggctcggacagggggcatgtaccaaatgttccacttagccggagtagaggaagaaaagcctggccatcaagaaaacgaacaagccccgccagttgaggaactggcggggcctgatgaaaaaaatcccggcggcgacctactcttgcgggacctatcgtccgactaccattggcgcggcagcgtttcacttccgggttcggaacgggaccgggtgggaccactgcgctctggccaccgggcttcagggggaagagggctttttttctcttcatcctgcctgcccgggagcccttggggggctttgagggggattttttaagggttgttgtgtgtgtggctaagaagatttcctctcgttacgaggggaaggaatcagcgtaaactgacatctgcgtggctggtggtgttacttttaaacatacatccaatgaacaagacaacggcaagttgttattcacgaacgggagtgatgtaatatgatgaagtctattggtgattagtatcgcttggctcaatacattgctgcacttacacctgcgacctatcaacgtggtggtcttccacgaacctatagggaaaactcatcttgggatgggcttggcgcttagatgctttcagcgcttatcccgtccgcacttagctactcggccatgcacttgacagtacaaccgatgcaccagtggtgcgtcagacccggtcctctcgtactaaggtctgaacccctcaattttccaacgcccacagaggatagaggaccgaactgtctcgcgacgttctgaacccagctcgcgtgccgctttaaccggcgaacagccggacccttgggaccttctccagccccaggatgcgacgagccgacatcgaggtgccaaaccacgccgtcgatatgaactcttgggcgtgatcagcctgttatccctaaggtaccttttatccgttgagcgacggcaattccactttctaccgccggatcacttgggcctgctttcgcatctgctcgacttgttggtctcacagttaggcgggcttatgcccatgcactcgacacccggttgccaaccgggctgagcccaccttcgcgctcctccgttactctttgggaggataccgccccagtaaaactgaccggctgacacggtcctctggccggattcacggctcagggttagatcctccagtttcaaagggtggtgtctcattgatgactccgacgccccctaaagggcgtcttcagcgtctcccacttactctgagcattaaaaccgaagaaacaatgacagcttacagttaaggtctatagggtctttccgtccttctgcgggtaggcggcatcttcaccgccactacaatttcactgagcgcctggttgagacagtgcccaactcgtttcacgattcgtgcaggtcggaacttacccgacaaggaatttcgctaccttaggaccgttatagttacggccgacattcaccgggacttgggttcagagcttcgccttgcggctaaccccttgccttaatctttcggcattggtcacgtgtcacaccctatacttcgacttgcgtctttgcagagtgctgtgtttttgataaacagtcggttgggccatttctctgcggcctgcatcgctgcaggcaccccttcttccgaagttacggggctaatttgccgagttccttaaccaggtttcactcttacgccttggtatattctacccacccacctgtgtcggtttgcggtacgggtcgcttagcatacgctggggcttttcttggcactcgatccaatgatgcgctgagtccgtggactcaactcggaattcaataacctagtcatcttttctcatgcgtccccccagtttaagggtcgcgagctcaggattattaacctgatatccatcgcctacgcctctcggcctcggcttaggtcccggctaacccagggacgaaacacgttgccctggaaacctcgggtttacggcggccggggatttcacccggctttacgttactcatgtctgcatactcacttgcatgtgctccagggtcagtcgccatcacccttcaacgcgcatgcaacgctcttctaccactctaccgtaaggtaaagtccagagcttcggtataacgcttgatcgccaatcattttcggcgcaggatcactcgatgagtaagctattacgcattttttaaatggtggctgcttctaagccaacatcctcactgtctgtgtaatcccacatcctttccactgagcgttatttaggcaccttagctgctggtctgggttgtttccctctcgacaatgaagcttatcccccactgtctcactgccacgttccattgcacggtattcggagtttgataaggtttggtaagcgggtgtgccccctagccttgtcagtgctctacccccgcgcatcagcacgtgacgctgcacctaaatgcatttcgaagagaaccagctatcacggggtttgattagcctttcactcctaccctcagctcatcagagaacttttcaacgttcacctgttcggtcctccacatggttttacccatgcttcaacctggccaagggtaggtcacctccgcttcgggtccagtacctgcgacttaattcgccctattcggacttgctttcgctgcgactccgggccggaagcccttagtcttgccacaaacactgactcgcagactcattaaacaaaaggcacgccatcgcagattgctctgctctgacactttgtagacatacggtttcaggttctatttcactccgctcacagcggttcttttcacctttccctcgcggtacttgttcactatcggtcgccaactagtatttagccttgcgcggtggtccgcgctgattcatacatcgttccacgtgtgatgtattactcaggatcccactaattcccacgctggatttcgtctacagggctttcaccttctacggccagcctttccaggctgttctactatccagtatggtcgaatatgtcgtggtcctacaaccccgaaggagtaccttcggtttgggctccatccgctttcgctcgccactacttacggaatcgatttctctttcttttcctccgcttactgagatgtttcacttcagcgggtttcgcgtttcataccctatgtattcaggtatgaacgatcgagtattgcctcgatcaggttaccccattcggatacccccggatcatcgcttgcttgcagcttcccgaggattttcgcagcttgccgcgtccttcttcgcctgttggcaccaaggcattcaccgtacgcccttacttacttcatcatattgcaaaagttttttaccacttccacaataccacaaagccctttcgtgacttactgtattgtcttatttcttggtatgcatgttttaaattgtgtattgtagttgtttttcaactacccactttgttggaaagcaattgcttctcagcaattgttttctttgccacgcagatgtcaattttcgctttccctcaataatcgatttttttggtgggcctgacaggacttgaacctgtgaccccgcgcttatcaagcgcgtgctctaaccaactgagctacaggcccggttttgggtctcgcagaggcagttaacagcgaacaggtaatagttaatagccatttaccgttctccgttgccgccttcttaccgaaactggtggaggcacggggactcgaaccccggacatccagcttgcaaagctggcgctctaccaactgagctatacccccagttgcggttctttttgaaaaaaggtcgtcacgcacgtcgtgcctagtttcgctccaagcgaactggctgtttacacatctttggttcgttgcgggccctcgcgggttccgctctctcttccctcgggaagagatccgacctgtgcatttttcatgcactttctccatagaaaggaggtgatccagccgcaggttcccctacggctaccttgttacgacttcatcccagttaccagtctcaccttaggaccctgcctccttgcggttggcttcagatacttcgggtgcgaccggcttccatgatgtgacgggcggtgtgtacaagacccgggaacgtattcacggcgccgtagctgatgcgccattactagcgattccggcttcgtgtaggcgggttgcagcctacagtccgaactgggcccagtttttaggatttcctccgcctcgcggcttcggccccctctgtactgggcattgtagtacgtgtgcagccctgggcataagggccatactgacctgacgtcgtccccaccttcctcccagttgatctgggcagtctcgccagagtccccacctttacgtgctggtaactggcaacaggggttgcgctcgttgctggacttaaccaaacatctcacgacacgagctgacgacggccatgcagcacctgtgtaacgcctccgaagagtcgcatgctttcacatgttgttcattacatgtcaagcccaggtaaggttcttcgcgttgcatcgaattaagccacatactccaccgcttgtgcgggtccccgtcaatttctttgagttttaatcttgcgaccgtactccccaggcggcacgcttaacgcgttagctccggcacgcagggggtcgattccccgcacaccaagcgtgcaccgtttactgccaggactacaggggtatctaatccctttcgctcccctggccttcgtgcctcagcgtcagttaatgtccaggaacccgccttcgccacgagtgttcctctcgatatctacgcatttcactgctacaccgagaattccggttccccctccattactctagtctcgcagtatcatgtgcagtccgggggttgagcccccgcctttcacacacgacttacgaaaccgcctacgcacgctttacgcccagtgattccgaacaacgcttgagacctctgtattaccgcggctgctggcacagagttagccgtctcttcctcttgtggtactatctttttaatttgctcccacatgacaggggtttacaatccgaagaccttcattcccccacgcggcgtcgcaccatcagggtttcccccattgtgaatgattctcgactgctgccacccgtaggtgtctggaccgtgtctcagttccagtgtggccggacatcctctcagaccggctacccgtcatcgccttggtgagccgttacctcaccaactaactaataggacgcgagcccatccccaagcgcattgctgctttaatcttgcgattttatgcggtattaatcccagtttcccggggctatcccactcttgggggcaggttactcacgtgttactcacccgtgcgccactagagaattattagcaagctagcaattctcccgttcgacttgcatgtcttatccacgccgccagcgttcgttctgagccagaatcaaactctccatcaaatataatttttgaaattgctggaccaaatggaatctttcgatttcatctgcgccatgcttcagtcagctcttccctcaagttgtgtctcttgaggtcctcttcgctctgccaagcacggcgcgcgtcacgaccttttttctttccccttgcttctaccaatccgcccctctcggagctaggtcgctccttcgggttttttctccctcgcacgtcctctcgacgcattcaggaaaaccctcggcgggttcggtagtcattcccttgaaatcttcttatcggcccctttaatgaggctcttccgggtggccggccccggcttcattcaggccctcttccgagtccctcctgccgccgggcttttcatcccgtcgccgtgttggcgtgccgagaagtctaccattttcacctcccttgtcaatttttttcgagtcgtttttgcggagatcctttcatccattttgtcacgtccattcataacttccaatttataaaatagttaggcttttgtcatacttcccctccctcgtgccatttttttgaacattttcttttcggatggcgcagcagtcttcccaaaggtccaggagcccttccctttgccggcgagaacgagagggggttttcttcctttttacgatatcggctccccggagaaaagaaggggggaagaagggctggccgagcgaggagtttcaacagcccaagggggaagaggttttcttttttccttttacaagggccgacggctcgccttctttgccgatacctttatttctatcccttactttctttttctccaaggccacgcacggacggagattcttttttccgcgccctcaccgttcgatatttccgcgacctgtctcacttaacccttcccatgaacaatccccgcctgaattttgtctaatcgcgcatgaagaatcaggaaatccacttgccaacgcccgaccccgagcatccttatggaggagggaacggacgttaccgttttccggatatcaacggcatgaatttgctgggggataacgtttcccttccacccatcgtgcctaaaagcttccatatcatgctgaccgtttttcatccggaaaccctgtacagcatgaagaagtggcttccgttctgcgaagacctccgcaagcagtacaagcatacgcccaccccggtggagtacaatattctgctggtcctgcagccgcctcccattgagggggacgttcccgcctttacacaggccctgggggatattccggatttctacatgaagaccaattcccttatttcctattacgaccaggctttcgtgcgccgcaggctttccctccacaagaaggcggagaccgcgattgtactgctggacggcaacggcaatatcatctggaaggatgacggcggctttacgcctgcacgcgcggaacatttaaaggttattctggaaaccctttccccgctggcgcctaagacaaggacgcattagaggcggattgcatcttctttgcctcattcgcactttccgtttgagcttccttccggaatgcctcatactggccccatgcctaccatttctcttgctctcggggaacgttcctacgatatccacgtggaaaacggcgcgctggaccgcgtgggtgagtttgcctaccgcgccggactggacggcaagattgcgattattacggatacctgcgtagccccgctttatgcggaacgcgtgatgaagtccctggagagcgctgggttcatgcccagcctgcatgtggtggatgccggagaagcgtccaagaatatgctgcaggcccaggaactgtgttccgagctggtacgggcgggcattgaccgcaccgggtgcattgccgccctgggcggcggcgtggtgggagacctggccggcttcgtagcttccatttattaccgcggcattcctttcatgcagattcctacgacggtagtcgcccaggtggacagttccgtagggggcaagactgccgtcaatattccggaagggaaaaacctggcaggcgcgttccatcagccggccgttgtcgtgatcgaccccaccacactggtgaccctggaccgccgcacgctggcggaaggcctggcggaagccgccaagcacgcggccatccgggatgcttccatgctccatgaattgaaaggcctgggaccggagctttccatcggcttttccctgaataccatcgccaagctccccgatctgattgcccggaacgtggcgatcaaggcccgcatcgtggagaatgatgaattggaaacgctggatatccgcgccctgctcaatttcggccataccatcggccacggcattgaagccgctgttccctacggcaccatcctgcacggggaagccgtggcgctcggcatgcgcgccgccctgttcctgagcgaacggaaagccgggttgagctcttccgacgccaagaagattctttgtaccctccaggctctggaacttcccctggttctcccggatgacattgatacggaaacggttctcaagaagacagcgtccgacaagaagttccgggccggaaccatccgcttcgttctgctttccaaggcgggggaagcaggcatttccaagaagattacgcgggaagatatggcggaagccattgaagaattgcgccgccccctgccctgagcttcctttttacggcgttgccccatcagacgggcaaaaaaattccggagaacggaaggggagcatctttccgctccttttcctccagcatgtttttccagcaggagaaagattcagagtgtttccctgaaccgcagaaaaaccgtcccctccggaacagtctggaagccgggacatttattttccgtatccggcgcccgaaaagcaacgcctctcccttcccggaagaacgggacgggagaggcgcaaaaacggtccctcgtttcccggcacggggaatttacttcttcggctcgtccggggtaggttcaaagccatccacgtccagaggcacgctgcccgtgtattccccggcgtcaaactggatgcccttcaaggcgtcttccagggacagggagccatagcattcccggctggccagacggagcagttcattcatgatgttcacgctttcttgatggggaatgtccttgggaagggccacggccagctccttcacctccgccgcatgggcgtttgccgtagcctggtcctgaataagaaggagaacggccaggattttttctcccggcgttttgggaacggcctgttcgctggcggcagaggcatccggggattgatcctgttttttgccgccgtcacaggaaacaagggcaaatgccgccaaaaccgctgtaaaaggaatgagattttgcttcatcatgatgattggttggaaagccggaggcctcattggatttatcatgaacactggggattccggagtcaaatcagttttttactctcacgaaatgttttttcagacaaaatattccgcagcgtgcgctttgctttctgaacagggggagtagccctgttcaacctaatagccagaatatagtgcattcattggttccctcagtagacgcaatttccggaaacggaggttgcgtctactttttgcgtcaccatttcaatacagcgtttgattccatgggctgacgccgtataattccgctgagatgggttaccctatttggaacagacgccgctttttgagaaccgccgctggaacggccgggttcctggcagccatgccctatctgaacgccgcggaagccctgacggacgcaagaccgctcaaggtgggcctggtaggctgcggaggccgcggcctgggcgccatgaagaacgcgctggacgccgaccccggaacggtagtctgggcgctggcggacgtgtttcgggaacggattgatttcggctccaatttgctgacggaacagtacggcagccgcgtccagctggacaagagccgcctgttcgacggcctggacggttacaagaagctgcttcaaacggatattgacgtggtgctgctctgcacgcctcccgccttccgtccggagcatctggcggcggccattgacgccggcaagcacatttatgcggagaagcccgtggcggtggatgttcccggcgtgctttccgtgctggagtccgcgcgtctggcaaagcttaagaatctggtaattctggacgggttctgctggcgctatgacaaggcgaatgaggaagcccaccgcaagctttcctccggagaactgggacgcgtgctttcctttgacgggctgtattacaccacgccccccaaatccccgctggccctggattcccgcccttcctcggatacggacgtggcgtgggccctccgcaactggaccgcctggaactggctgagcggcggccagttcgtggaacagatcgtccacacgatcgacggcatggtatggtccatgaacgagcagcttccgctggcggccttcggctccggaggacgcgcccagcgccgggacgacggcgacgtgtgggaccattacgacgtttatttcgagtacgaccacaacgtggccgcccatatttcatgccggcagtgggtaggctgccacggggagatcgtggaccggacggtttgtgaaaaagggatgctggtcaccccgtaccgcccccatatccaggcggataagcgctggcgtttccgcggggagcggggcaatatgtacgcggacacgcacgtggccttttaccgtttcctccgctccggaacctggaaacaaacgctggaaagcgcggccaataaaacgctggtcgccatcatggggcgtgaagcggcccataccgggcagcgcatcacctgggaacagattaaaaagagcgccacgcggctggtgcctgaagacctgacgatggatacgcctctgcctcccgcccgcattccgcggccgggcagagcagcctgacggcgggtcccgccttttctctctaccggaccatggccaacatctttccacccaataccaacaggcgcttttacggaggcgtcgcgctgattgcgctcgccgccgcgctggcgctgggtggggtgtattacgtcaatttccagattccggagtatgaacccgtgcagccggtgcgtttttcccacaagctccacgccggagacctgaagatgagctgcacggcctgccacagcgccgcccagcgctctcccagggccggcattccggatacgaagtcctgcctgggctgccaccagcatattctcccggacagcccgctcatcgctccgctgcgagcggcggcggacccccaatttcccggctacacgggggaaccggtccgctgggtcatggtcaaccgcctgtccggccacgcctatttcaaccacatggcccacctgaaccgcggcatcggctgcacttcctgccatggggacgtggcaggcatggaacgcatcagggctccgcgcgatgcccgcatgcagtggtgcctggactgccaccgcgaccccgccccgcacctgcgcccgctggaggagacggccagctcccattattccgccgcggattaccttcgcacgcattccatccgggacggggagggaaaccgcatccaaactccgcttcaattgggagatttcctgaaacaccagtggaagattcagccaagaatggactgcaccgcctgccaccattgaccaccgggcgcaggccggctcccggcaaacatgcctttccagtcatcataccttccattttcgcgatagatgaatgccggaccgttactgtatgatgaagttatggaattggacctcggcattgtttactcctgccctccggaagaagcggtcccgcatattctggcttattttcagcaggaattttccaaacccttctccgcccccaaacctgtttcgcatgaagaagaacttctcctggaacaaatagattccgcctttgacggcgtcattctggaagacggcatcggcctgatgacgacggaactcatcgacatgtacgcccccagggaaacctgtgacgccatcggtccctatgaagagcggaccgactggcgccgcatcaccccttccatgatccgggcatgccgggacgccctggtttttaccgatccaaagggataccgttttctcctgccggcatggctgacgctggacctccgcggccagcttgaaacctgcgacgccatggactaccttcccctcgttccggaaaattgcggggattatgaatccagggccatcctgctgaacgatccccagcttgaggccgtaatgaattacattgaataccgtcaaaaaaaggacggatgccctttttccacggacttccgctgccctgaagatgggtgcagccggtaatcaccgcttgatttcaccttccggattgcctaaaacaagccgttcccatttcccgttaatccacatcatcctccggtttgactccccttcccccatttcaccagaatgaagctccccagggccaccccgcttttcttccggaagaagagcgggaaatgacgcggcgctccttcatgaaatggatgggcgcgggcgcagtcctggtgggggtggggcttccggcctgccgccgtgtggaaaaatacctggttccctataatgaaggaccggaatggtccgtgcccggcgtggaaacggcttacgccacctgcctggccatgggcgggagcgcgctgcccgtgctggccgcctgttatgaagggcgtcccgtcaagctgcttccctccctgcaatatccggaaggcccgggcttgccggccacggcccaggcttccattctggacctttacgacccaggccgcagcaagcatatcctctttaacggcaagccggcttccggggacgaattccgcggagccttttcctcctggtcccgcaacctgcgggacggcggccatatcggcatccttcttcccgccacggattctcccctgatgaactccatgctggaggaaatcggcaggaaaaaccccggcgtgcggatttaccgctattctcccgttcccacgccgggctccggcatgcaggcaggcttgccgcaggaggcccgcttccgcgtgcgtttcgcacgcgccaaacgcatccttgccctggattgcgatttccttcatgagaatccctacggcaatacgcgtgatttcattgccgcccgttccccggagggcctccattacaaggaagaaaaccggaaccgcacgcgcctttacgccgtggagggccgcgtttccctgaccggagcccatgccgaccacaggctgcccgtttcccccgcgcgcctggtggtctttctggaggaattgttccgctatctctccggtaaaaaaacctcccttcagacgctagagcctccccggcagacggaccgctccctgacggaaagggaattcacctggctccgccactgcgcggacgatttattcagccatcccggagaaagcgtggtcctgctgggggacaattatccggaactgtccgcaagcgtctggaagctcaacctccttctcggctctatcggaacgtgcgtccagttgttgaaggctccgtccacgccgccccacggaacgctggaggatttcatccgggacatccggaagaaagaggtggatatcgccttcctgctggattcgggaaatcccgtgctggattccgggcacggctccgcactggcggaagccctgaacggaacggagagcattcatctggggatgtatgaagatgaaacctcacgcgcctgccgatggcatttgccggcggcccattttctggaatcatggggagtggaacgggactgccgcggcagattctgctaccgccagcccgtcattcttcccctgtacgggggcatttctgcggaagaagtgctttccgggctgctttccaccaagggccacctcatcacggcggacaattcgcccacgcacctttcccccgtttaccaccgggcgcgcaaatgttttgaacgcgccgtgaatccggaaaacaagactgcggcctggacacaggcgctccagcgcggctattcggaagaaacggcttatccccccctgtccccgcaggaagaaacggtcctcggaaccgccatggcgcaagcgcccgttgctccctccggcaacggcggaagcggattggaaaacggcgtgctggaactgcaattctgcccggattattccatcggggacggccgctggaagcgcaacgcctggatgcaggaatgcccggaccccgtaatgggcgtcagctgggcggcgtccgcacaggtttcccccgccaccttccggcggctgggaggcgcggattccgggccgatgctctgcactctgaccgtccccggcggacggatggaagccatcctgtgccccattcccggagtggcggagaatctgatggttcttcccctggggtatggcggcatgaaccacgtagcggagaggcaggagaattccgacggttatgcattccgcagtcaggtgaaaaaaacgacaggctgcggaatttccccggaacaggccgccctgcgcgcccttccggaacgtacggaagctattcaaagccccgtcgtgcagccctcccccttcgcccttcagtccggcgcctctccggctccgttcacgccgtccggcgcggagggcgtgtaccaatggaggatggcgatcgacacgtcccgctgcatcggctgcaatgcctgcgtgatcgcctgccgggcggaaaataacattcccgtggtgggccgtgaccagatggcgaagggacgcgcgctggactggattcgcattgaccggtatttcacggaggcaggggcgctcaccgccattcccgtggcctgccagcagtgcggcaaggccccgtgcgagtccgtgtgccccgtgaacgccaccgtccacaccacggagggcctgaacgccatggtatatgcccggtgctggggtacccggtactgcgccaccaactgcccgtacaaggcgcgccgcttcaatttttttgattatgccaaggcctccggggaagccacgcgcctccagcgcaatccgaacgtgaccgtccgctcccgcggcgtcatggaaaaatgcacctactgcgtccagatggtggaacgcgccaaaatcaggcacaaatcccgcctgatgaaggaacacccgggccagccctccacttccatccacgtgacggagaaagacctgctcctgccggacggcgcggcgcaaacagcctgccagctcgcctgcccgatgggcgccatcaccttcggcaacgtgctggaccccgccgccgccgtctcccgcgccaaatccctgccgcgccacaggagccttctttcctccctgggcacggaccccggaacgggatacctggccccggccgggaatcccaaccccgccatggaagcatgaaatcccgccggaagacttgttaaagacgcctttcccaccaaagaataaggccgctcctttcagggagcggccctaccagtcaaaggtctttacaagctgatcatttagtcttccacaatttgttccacggtcgtaatcgtttccaccacttcaatgttggcggcgtcagcgaaattgttcaccgccttgagcagggcgggcgtcatgagcttgtccttctgaatgcgttcgcaattttccagcatgtccacgatggtatcctgggcatctccgttcagtttggtgatccggatggcctgttcggaagtgagcttcattttttccatggccttgtccaattgcttggcctgctgggtcagggcattgagctgcttgatggcgatttcaaccgccgcattgtccttcacgtcgtccagaaccttgttggcggacgaaatcaggtcgacattctgcttaaccatctgcacgggatcggcagcgttctgagcaagagcggaggcggagcatacgatggccaccacggggagtatttggtacgtttgaatcattgttttatcggtgttcgggttgaagaagaaatatcttctttgcctctttagattcattccaagagagaaaccgttgcaccccatatctgtcatacagtccttaccgtctgactgtcagcaaacggcaggaagacaatcttaccccgtcacacgtttttcctccccgttttccagcagaaaacggagggggcggtacttggcggattccagattgggatcctccgccagaatggcctccgccagctcccgcccgcggtgaatcaggcgcgcgtccagcagccattcctcaaagagcacgcccttcaggccgctctgggaagtgcccagcacgtccccgggaccgcggagcttcaaatcctgttccgccaggtcaaaaccgttggccgtggtctccacaatatgcagcttttcccattgttcatcctccggccgggcctccgtcatcaggatgcagtaggacttgtgcgccccgcggcctatgcgcccgcggagctggtggagctgggagagcccgaaactctccgcattattgataatcatgaccgtagcattcggcacatccacccccacctccaccaccgtggtagctaccagcacgctgatgcggttggcgcggaagtccttcatgaccgcatccttttcctcggaggacatcctgccgtgcagcagtcccacatccacatgcggcagcagcgccttccactcgtccagctcctttgtcacggctttccctttccgggaatcctccccgtcaatgaggggggaaaccacataaacctgcctgccttcctccaactggctccggacgaacttcaataccttttcctgatccttctccgtgcggatggccgtaaccaccgcgccgcggcctccgggaacgccgtccaggatggaaacgtccagctccccgtaaaaagtcagcgtcagcgtgcggggaatgggggtggcggtcatcaccagcacgtcggggcgctcttcgcggtcaatcagcttttcccgctggttcacgccgaatttgtgctgctcgtctatcacgaccaagcccacccgttccggcacgttcttcccatacagcagggcatgcgttccgaccacaatccccccctgcttcccgaaggatacgtgggattcctccttcctgtccgccgtcaccagggacacggaaacgtccagcttgtccagcatctgccggaacttcaaataatgctgttccgccagaatctgggtgggggccatcatcacggcggaatacccgtgttccacagccagcagcatcgcgcacagggccaccagcgtcttgccggaccctacatccccctggagcaggcggttcatggaacggggcgccttcatatcccggtaaatctccctcacgcagcgcttctgggcctccgtcagctcaaacggcagagaatccgccaaatccttcaccagatggctggagcctgccgtctgcatgccgggcacttcatccgcccgccttctcctgtaagccacgttcaactgctgcgccaggcactcctccagcgcaaaccgccgcctggtccggtcgcgcacttccgcggtctccggaaaatggaggtccctcaacgccgttttgcacgggatgtccggcacaaactcgtaaatctccggttccggagccggggaaagccgggccagagcctcccacacgatttcccgcagcctgcgcacggcaatccccatgcggccgctgtaaacgggaacaatgcggttcaaatggatggactggtcatccccctcccggatgatctcaaaatccggatggacgatgctgagcttcttcccatacggcttcacgcgcccgtacacgatcatctcctgcccggcgcacagcatcctggctacgcccggcatgctgaaccacaggcaggaaaaacgggcctgccccaaagattgctcatccaccagcacggcttccacataccgcccgcggcccttgccgcccttccctccccagcctttccagcccacgtccaccacccgccccctcaggcagacgggcgcaccggatgacagggaatcataacggtcaaacatgcggcggtcctcatacctgcgcggcagcatgaacagcaaatcccgcacggaggccattcccgccgcctgcatggccgccagctccctggggcggatgaaggcgcactcctccaggggggacgttaaaagcagctctccggccatgggtccaggcgtattcctcacagatcgcatcatgcccgcgcgcccgtcagagagcggcggcggggcgggtttccagacagcgcctgtaataatccacgcgggagacgaaccagctccatttatgccccgggcggccgttggtcagcagcggggccgggcagttcttgcccgtccagtaataatggggcaccacattgcggaggggaatgttgtactgcttcatcagcaccgccgtcagcttggcagaacggttccaggtgacgatggggttgtggcttctcacctcccccatctcaatcccgatggaatacatgtctccaggaccgccgcggtccgcatggcgccccgtctcgttcagcggaatatgctggatggcccggtattggtccaccgtaaaatgccagttcagggaacccatggccccccttttcagcgcacgggcatgcgccgcggcgtctcccgtggggttggccgtgctgtggatggtgatgaagcgcggatgcatggaatgggaggcgcgccgcgcgcgggagcgcggggacatgaaatcgcggctgatgtgcacttcccgggacatctgggacatggtgcgcggcacgggaggaacgttctgaatcttgaagctgacggcaggcgggcgcgaggcgtccgaacacgccgccagcagggccggcagcaccagaaacaccgcatttgccatcaacgttctaacattcatgattcttccctagactatccggcgcgagctggcaagcagatttccagtcaaaacaggctttttcacccttcccggagcacagcagcggggaaacgggagcccccgcggaacgctccggagcggccaccgccggaatcagggcaacgccttcccctgcacggggtttcccctccgggagcaaccaaaccgccccataaaaagccgcacgggagacttgccaacggccatttccgtgcatacactatttccaccatgagtaccactcacgaagcagctaagaagtgggccgacgaaatcgcccagctttgccaacccgactccatctattggtgcaacggctctcaggaagaaaatgatgagctttgcaacatgatggtagaaaagggcacctttatcaaattgaaccccgagaagcgccccggatgcttcctcgcccgttccaccccttccgatgtggcccgtgtggaagaccgcacgttcatctgcagcgagaaggaagaagacgcaggcccgaccaaccactgggccgaccccgttgaaatgaaggccaaactgaagggcttcttcaagggctgcatgaagggccgtaccatgtacgtgattcccttctgcatgggtcccctggactcccccctggccaagatcggcattgaaatcacggactccccctacgtcgtggtcaacatgcgcatcatgaccaagatgggcgaacaagttctcaagcgcctggaagacgaagtcaagggcggcggcaaccccaagcgcgacggctacggaaccttcgttccctgcctccacaccgtgggcgccccgcttgcagacggccagatcgacgtgccgtggccctgcaacgaagaaaaatacatctgccacttcccggaaacggaagaaatctggtccttcggttccggttacggcggcaacgccctgctcggcaagaagtgcctggccctgcgcatcgcctccgccatcgcccgcaagaacaagtggatggccgaacacatgctccttctgggcattgaatccccggacggcacgaaggcctacgtcggcggcgcattcccgtccgcctgcggcaagaccaacttggccatgctcgttccccccgcctcctaccgcgaagccggctggaagacctccatcatcggtgacgacatcgcctggatctggccccatgaagacggcaccttccacgccatcaacccggaaaacggctacttcggcgtggctcccggcacgtcctacaagacgaacccgatcgccatggacaccatcaaggaaaacgtcatcttcaccaacgtcggcctgaccgacgacggcgacgtctggtgggaaggcatggacggccccgctcccgcccacgccatcgactggcagggcaatgactggaccccagactgcggccgcaagtgcgctcacccgaacgcccgcttcaccgctcccgccgcccagtgcccgacgatcgaccccgaatggcagaacccggaaggcgtttccctctccgcgatcctgttcggcggccgccgcgccaccaccatgcccctcgtcttccagtcccgcgactggacgcacggcgtatacgtcggcgctacgatgggttccgaaatgaccgccgccgccttcggcaacatcggccaggtccgccgcgacccgatggccatgcttcccttcatcggctacaacgtaggcgactactggcagcactggctggacatgggcaagaccgttgccaatcctccgctgatcttcaacgtgaactggttccgcaaggacaaggacggcaacttcatctggccgggcttcggcgacaacatgcgcgtcctcgactggatcctccgccgcgccaagggcaagacggaaggccagaagaccgtgctgggcgtctccccgacctatgccgaactggacaagaccggcatcgactacagcgaagaacagttcaacgccaacatggccctcaacccgagcgaatggaaggctgaactggaaagccagaccgaactgttcgacaaggtgggcaagaagctcccggccgaactggaagaacagcgccagattctcatcaagagcttctcctaagcagaactcctgactgagcgtcaactcaacagcagaggctgtcccgtccgcgggacagcctcttttttattcccctcatcttctcaaaatgcacttggggaccgcggcaggcacgctcagacgtcatggtcaaaaatctctgccagttaccggtttcccattaaaagatggcaggtagccacgtctttccatctacaggcgcgtgggaatgaaaggcgtaaagagctgcaatgagattatatgaacagaaaaaataaaatcattttccgcctgaatataatattcagcattttttgggtttgcagctctatgtggacttgaaacgttatctttatttagggtttttctgaaagaaagaaatggggaaataggtatagtagggaataggttcaaccatgtgtctcatgggtttttatggccgcggcacatgttgaggagccattcccggtatgatgccgcgcttacttatcaactccggatttatctgggacggcttgagtaatgacggataacaatataaatagccggcggcctgcccgccaaaacggaaatgtccggtatttgaatgcaacgtcccggaaaaagaaaaaaacacggtcagcggattaaggcgcctttacgtcctgaaagagcgctgccgggcgctcaaatggaaaattgccctggaagaaagcctgaattaactcaaaaaagaaagaccatccattgatgaaaccattcccactgttgctctgcatcctgctggcgggccttgttgctcccgtattcggcaaactggacggcacttacatgaatgaggccggaatgaccctgaaaacgccccatgccgcatgggatgaaaaaggagagcttccccataagaaaatactttttatcatgcagcaaacggcctcgcgagagatcattgagctggtccagcgtttcccgggctttaagtatgaagtggttctcacagccaatgaacatagcatcggagcggatgatatttacagcaatccgatcgcggggctgagcaccgccgacaaacttcaggaactggatgccaaactggcaaaggattatgatctggtggtcatggcaaatgtcgattttgcggtcctgccggatgaacagaaattccgcctgatgtcgatggtgcggaacggaaccggcctggtccggattcaatccggcgaaccctggtcagaacttaagaaactgccttataaaaaaccgtacgcccagccgttgccccggccggaatgggttgccggaagcaacagccttcccggaaccaggcctaaaaactttgaatcgcgtattttcaatgcctggcaattcggcaatggccggatcgtcgaagtcgattacggcgcgggctaccggccaggagtggggctgacgccgtatttcaactacaccacggactggttcttcctctatgaaacgtcccaggcttttctggcccaggtgctctattacgccagcggaatagaactgccgacattctcagtacggcaggacaacgaccaatttgccgtgacctctccggaaaaaaccgttgccgagggccgtatccggcagccggataattccgtcatccggaacagccttgatttcacgaaccttccggcgggcagatataccgcagacgtattggtccgccgggatggcgcgctggtcaacttcggcgcctttccctttacggtggaatccgctttcggggccgtatcagtggaaacgcccaggctggtgcaggaccgcggccccttctccgtcacgttgaaactggcttcacccgcgcaggacggttattccgccaaagtggagctgatggacgcaccctaccgcaatgtatggttcagcaagacccttcctttggaagccggaaagaaagagctttcattcggccttgaaaattaccggatgccgaccatcggcggttatctgcgctgtaccgtttacgatgcccggggacacgcggcccatgcggaaaacccggtgattttcccggattattccctggaggattatctccagcttacctggggccaggttggctgcaccttcaacccggccttcggggaacggatcatcgaccgcctcggctggaacgtatcgctgcaatttttcagcaagggagatattgaaaacgccctgcggaacgaaaaactgtgcccgtatatctgccggatcgggatggaagccgggccgaacaatgaaaccagaatattgcgtaagctgtggtccgaacagaaagaaaatatggagcggctgggtacgttgaacggcgacgaatcgttctaccacccattggtccggaagctttggagcgacgatctgcgacgccaggcagaatacctgaaagacctgagccctgtgctgtacaacctgggcgacgaaaatttttacacctacgatgccgggttcggagagtcggataaacagccgttcgccgatttcctgcggcagaagtaccagaccattgaaaacctgaaccttgaataccgcgcctcctatgccggatttggtgaagtgccccacctccggctggacgcggccaaaaaagcggggaatctggtcgcctacaatgaccaccgggaatatattgaaaaaatgtacgtggacatgcatcatttcctggcggcggaaatcaaaaaggttcatcccggagcccgggtaggcgcggaaggctcccctcccggcaaccttgaagaaatgattaaggggctggacttctggggcccttacagcggcatgcaggagaacgaggcgttgcgcgcattcggcggggaccgggtccggaccatctggtggggcgggtattgctcggagcgttcatcctatccgtacaaactttgggaacacctgctgcagggagcgatcaacggccacgcctggttcctgatcaaccccgccctgggagaaaccagccattccggcgatctctccgaggcggaatacctgcgccagtacatgccctatcttgatgacttgaactacggcctcgcacagctactgatcaaaaccccgtttccggataccggcatcctcttctactacagccacacctccaattccgccgcccaggcggacagccgctgcgtcaagccggacgccagcatgaatccgctgctccggtattgctaccagcgcgggctgggcttcaatttcgtctcgcccaataccctggaacgcctgaaaaacgcacggctcctcttcctctgcggagcttcctccctgagcgacaaagagtgcgcggccattctggatttcgtcaaatccggcggcaccgtactggctgacgccaatatcgccatcctgaacgaaaacctgaaaaaacgcactgtgaaccccctgggcgaacttttcgggaacctgacgttcggccaggcgaaagagctcgaaattcaaccctatgaaagcacaagcggcgccctggccctggcgggagaaaaagcccatgcagtccacggcaatccgggcctgcagctccgcaaggccggcaaaggaaacgccatcctgctgaatgcctccctctccgttctggaaaataattccctgcccggctcctccctgaacacattccttgaccaggtggtgaaaaacgccggagtccgtcctctggccgtcatccccgatttcagcgacaccctgatggtccgtccgcggcaggccggagaattcgaactgctgggcgccctaggccaggaaaaagacctcggcaaatcattcaccgccaaattgccggaagaaaaatacatctatgagtgccgcaaaggactggtggggaaatcagacaagcttgtctttaaattctccaatgcgccgttccgctgctttgccctgtttgaccgggagcagcagccgcccgtggtaaccgctccggcccaggtggccaaaggcgcccgggccctgcttaagatttccggaccggccaatccccgggaacgcgcgtaccggattacggtaacggccccggacggcagggaaattctgcaccgcagcaaaaccatttacggcaagacggaatatccgctggatttcgcctttaacgatcttcccggcgcataccgcatcaccattgaagacgcggctacaggcttgaatacccaacacgaaatagaggtaaaataatcatgcagaaactcgccctgaccctgctggccggattgtgcaccacactgctgtacgccgccccctccattgaaaagaaagaagagaaacttgaccgcaagggaactaccgttctctcgacacgctatgccgtcaaccttggcaacggaaaaatcaattaccacaccgttaccaatcccaatgacaacaagccggttcagcaggaatggggggatttcagattcggcatcgaatactggagaaaccccaatactcccggaagctggagtcccgtcaatttcctcgccgcaatcggcaaggacggaaaaacactgctggaccggaaagtcgcggaaaaaattgacactgtggaaaacggcaagatggaaatggccgtattcacgttccgcccggaaaacagtgttctggacgtcaggatagcgcagttcaaggaccgcccggactggctgttcgtcaaggtcagttatcccggacaactgtatgaagtctgggcgtcgccggttcacggttacgggaagccggaactggagtcgcaattcgccctgaaagaaggggacggggaaaaaccatgcggaaagccggactggattctgacgaaaacaaccgggggaaacggggtgatgaatttcaaccgctatgcttacaaggagttcggcacgttcatcgtttttgagaaagaatccctccgccagctccggattcatggagatgacatcaaatttgagctgaaaccggagtcggacagcttcagtttcgccataagttatttcaaagaccggaacccggaagaggtgcgcccggaattcttcaacgtgacggttccggaagtggaaagcttcctgaagtccatcaattggaacccggtccccgacgggaagacgttttcagagcttgcggatgaaacccggaaaaatatctccatcctgaaaggggatggcggccatgcggcggactatgaaaagaaagtaaaagaactggaaaccgatttttccgaagtgccgagttttgaaactctggccgccctccgcgaactgaatagggaagtcatcaagaagaaccttgaaaacctataggaacacggtattcatcggcgccgctggcaaggcatcctgtagaaatttcctgggctcagggccggataggttccagccggccttggttcagggaaaacggcgattctgaagcgtcaggaaaattccggggcttcggcaacggcgatgacggcggctgcggcgctcaggcgggaatgggtcatggtcaggaaccagcccgtgacgccctgctcccgggccgtcaccccggcagtgccgtgcagcaggatggagggagcgcccgcatcattgcgcaccacttccacatccgtaaaagcgcatttttcccctattcccgttcccagggccttcgccacggcctccttggccgcaaaacgggccgccaggcgcggcacggggtccgcatgcttccggcaataggcccattcatccggggtgcagatgcgcagggcaaacgcctccccgtttttctggagggcctggcgcacgcggtccaggtcgatcaaatccattcccaatcctgcaatgcggctcatgttcctgcaaccgggggttaaagttgaaacgggaacatcagctcaggcggtcgatcgcctggcgcatttccctcacggcctgctccatccccacaaagagggcgcgggctacgatcgtatggcctatgttcagctcatgcaggtaaggcacgccgtccatcagctgttccagattctggtagttgatgccatggcctgcattcacctggatgcccagggagtgggccagctccgcggcgcgtttcaaacgggccagctccgccgtgcgttccttcccggcgtggttggcaaagcatccggtatgaagctccaccatgggcgctcccagacgggcggcggcgtccacctgggccagctccggatcaatgaacaggctcacctgaatgccgttgtcagccattcttgccatggtgggggccagttccttttcatgaaagacggcgtccaggccgccttccgtagtaatttcctcacgcttttccgggaccatgcagacatagtccggtttcagccgaagggcaaagtccaccatctccggggtattccccatttccaggttcaggggaagggccacgctctcacggacgctcagggcgtccgcatcctgcatgtggcggcggtccccccggacgtggagggtgatggaatccgccccgcccctttgcgccgcgtaggcggcgtccaaaacgctcggctccacgttgaaggaatcaagcatggtcgcatagcgggcctgcctcagcgtggcgatgtggtctatatttacacctagcaacatatcggttttaagacaaggggacggggccgatcattcaaattaatggaggaaatggcggtgccccgtgaacaccatggcaatccccgcggcgtccgcggcggcgatcacttcctcgtcccggatggaaccgccgggctggatgcaggcggtggctccggcgtcaatggctacctggaggccgtccgcaaacgggaacatggcgtcggaagccaccacgctgcccttcaggtccaggccggcctgtccggccttccagacggcaatgcgggcggaatccacccggctcatctgcccggcgccgatgccgagcgtgcggtccgtgccgccgaagacgatggcgttggagtgcacctgcttcacgacgcgccagttgaagcgcatggcggtcagttcctcctcggtcggggggcgcttggtcacaaccttggcttccagattgtccaggcccatcacgtccgtatcccgcttcatggtcatgaagccgccgggagcggagcggatgatgggttcgcggcgcgccttcatccaggcttccgtgttcatgcggatgatgcggcagtttttcttcttctggagaagggcgcgggcttccgcatcgtattccggggcgatgatgacgtccgtgaaaatggcgctcagcacgcgggccaggccttccgtcatcggacggttgaccacgatcacgccgccgaagggggcctgcgtgtccgtttcaaaggctttctgccaggcgttgcgcaggtcttcgtcatcctggcccacgccgcaggggttcgtgtgcttcaggatgcccaccgtcgggcggcggaactgggtgatcagctcggcggcgccttcgatgtccagcacgttcgtgtaggaaagctccttgccctggagctggttgaaaatgtccccgaagctgccgtacaggctggcttcctggtgggggttgtccccgtagcgcagttcctggtacaggggcgcgcagatgcagaagctgcccttggtgctttccgcgctctggtggcccaggtagttggtgatggcgttgtcgtaattggaggtgcgcatgaacaccttcactgccaggttttcgcgggttttcagggtcgtgtctcccttgtgggtctgcatttcatccagaatgcgcgcgtaatccgcgggatcggacacgacggtgacggaggcgtagttcttggcggcggaacggagcatggacgggccgccgatgtcgatcttttcaatcgcttcctccagcgtgacgtccggcttggcgacggtttcctcaaaggggtacaggttcacgcagaccaggtcaatgggcttgatgccgttttccttcgcctggcgcacatgctcttcattgtcgcggcggtgcagcaggcccccgtgcaccatggggtgaagcgtcttcaggcgtccttcaaacaattccggttccccggtatagtcggaaatttcaatcaccggaaggcccaggcctttcaggaaagcggcggtgccgccggtggaaataagctctactccaaactcgtgcaagcccttggcaaactcctccaggccggtcttgtcggaaacggatatcaatgcgcgctgaatagccataagatcaaatatctgtaatgtacccgcgggcgaaccctcctctccgggagcgaacgcgacaaatgcggttcctttccctacatactaccgccccgtgaagcaagcgcaatgtcacctatcatgacagccggggggattttttcctcccaaaacataaaaaaacgccctttttatcgctcttgtcttgacattcgggcgaatacttactacttcaaccgctcacaaataaccatttctttttagccatggcaacgatggaagtaattctcgcaacaaaaattgaaggactcggcgcggaagccgacctggtgaccgttaaggctggctatggccgcaactacctcatcccccagggtctcgcccacgaagcaacggcctccaaccgccgtttcatcgccaatcttcaggccgcccgcgccaagcgtgaagcggaagaactcagcgccgcccaggaagtggccgccaaaatcaacggattgaccgtaaaccttacccttgaagtgggtcagggcggcaaggcgttcggcgccatcaccaaccagaacattcacgatgccctgaccgctcagggagtggaagtggaccgccgcgcgattgagcttgaaaagccaatcaagagcgaaggcgaacacgaagtcgccatcaaggtgcatccccaggtggaagccacgctcaaggtggtcgtcaaggaaaacgcctaagcggcgcgcatccctttcttttttccggcaggcccggttcccaccttgggaaccgggcctctttttgtcatcctttttacttcccttccctgtacaaacaaggcatcatgcccgcgttgggtgtcactcgacatcatgcacggcatcgttccatccccccaccgaaatcaacggcatgattcgactctatcgtcaaaccccggaaggcattgagcgcaccacccaggtggatgcggcggaacagaacttggactccgtcttctggattgacctccttacccctgaaccggcggaaatcaagtttgtggaacgcctctgcgggctggagatgcccacctacgacgagatgagggaaattgaggccaccagccgcctgtacacggaagacggcgcccgcttcatgaccaccacggtcctcagccgcgtggatacggaatccccctccctgtcggaaatcaccttcgtcctcatgggggccaagatcatcaccatccgccattcggactcctattccttccgcgtcttctcccaccagctcctgcgccagaagcagatcagccgggaccaggttttcaccggactgctggaaaccatcgtggaccgccaggcggacgtcctggaacgcttcggcgcggaactggaccgcctttccaaaaacatcttccgcagggacgagccggaaggcaaggccagcaagcgcgtgcccgtctccagcgccctgcgcctcacgctccaggacctgggccgcgtgggggacctgctcacccgccagcgggactgcctggtcaaccttctgcgcctgctcacgtacgccagcaatgaagaggccctggacgacaccaactccaccctgtacatcaagctgcgccccctgagccgcgacgtcacgtccctctcggaatacgccaactttctttccagcaacgtgaacttcatgctggacgccgttctgggcctcatcaacatcgagcagaacgaaatcgtcaaaatcttcaccgtggcggccgtggtcttcatgccccccaccctcatcgccagcatctacggaatgaacttctcccacatgcccggcctggaaaacgaatacggctattacatctccctggtcgtcatgctcgtttccatcattcttcccctggtttatttcaggagcaggcgcctgctttgaacggcccctgccgcggactccctccctctctttttgtcaaccactcctaccgtttcatgattgatatggactccaaaatcacccgcctgattgaacaggcctccgtcattgtcggcgcccttccctacctccaggcctaccgggacaagacattcctcatcaaattcggcggcagcgccatggacgacgcccgcctggtcaagaagctcatgcgcgacatcgttctgctggaagtcctgggcttcaaccccgtgatcgtccacggcggcggcaaggccatctccaaggccatggcggaagccgggctggaggcccgcttcatcaacggcctgcgcgtcacgacgccggaagccatttccatcgtggaacgcaccctctccggaaccatcaatcccggcctcgtccagatgttccgcgactacggaggcaagggcgtaggcattcccggcacggaaatcttcgtgggggaacgcatccaggaaaaggacgaacagggcaaccccgtggacatcggtgaagtaggcaacgtcatcggctgcctgacagaccgcatcacggaagcgctggaactccagatcacccccatcgtctcccccctggcgaaagagctgggcacccacaagccgctcaacgtgaacgcggacctggcggcggcggcccttgccaaggagctcaagccggtcaagcttatctacatttccgacgttcccggcatcatgaaggaccccgccgacccgtccaccctcatcaaatccgtcacgcgcacggaagccctggacctcattgaagacggcaccgtttccggcggcatgattcccaaaatccactccgccattgacgccctgaacgcgggcgtgcgcaaggtgcacttcattgacggacgcctgccccacaccctgctgctggaaatcttcactccggacggcatcggtacggaagtcatcagggaacagcgctaaccacccgccgccatgcgccttttcccgcttcttccggccctctcactggcggcggcctcctgctccatgcagcccactccgtccagcctttccggctcctggacccagcccgttcccggacagccggggcacgtgcagggaatgcagctcctgccggacggcagggcgagatccatcaacatgcgcacgcttctctaccggagctggcaactggacggcaagcgcctgaccctgacggggaaaagcataggcaacgggaactccttcctcttcaccacaacctccaccattgacagattcagcagaactacgctgattctgaacacggacggaaaccgggaggcctacacccgcacgccggacgcggccggaaggtaagcatcccggcgccttccgctattcatcctccagaagggacttgttggccgctttcgccagctcgcaattcgggcatttgtcaatcaggcggtccatcagggcttcaatgcgggcgtccttcgccatcaactgctcatccttcttcttaagcaggttcagcgtataattcacggcaatcgtcagaacgcccaagccgccgatggctccggcggaagatacggccgtatctgcggaaatattgcccaggatcgtcgtgcacccgcctatggaaaacaagcacttagctatggaaaaattcatcatgggttccgtctagcaaaccgcttccccgtctgcatcacgcccaatccgtccacatccgccgcgcggcacgcctgggcggcacggcgcggcagccaaattcccgccggatacactcggagaaaacgcgctccccctcccccggaaaggcgctattgccggggaacacggtccaccggacccgcgcagggagcaaggccgcgcggcgcgggaaaaatacttatacccgttgccgcatttccttcttcggctttgcggtgtttgtgctaaagtggcgccaatctgcccggtccggggctcttaccaatacttcacttcatccaatagaaagacacaaacatcatgcatatggcggacggcttcatttcaccggcggtaggctgcaccatgtgggcggcttccgccgcgatcatggcgctctgcgcgcgcaaggtcaggcaggaaaaggaagtgcggctcatcccgctcatgggcgttctgggagccttcatcttcgcctgccagatgctgaacttcaccattccgggcaccgggtccagcggccatctgggcggcggcctcatcctggcggtcctgctggggccgtatgcgggcttcctggtcatggcggccatcctggcggtgcaggcgcttttctttgcggacggagggctgctggccctgggctgcaacatcttcaacatgggcttcttctcctgcctggtagcctaccccttcatttacaggcccctggccgggaaaaaccccggcacgggccgaatcacgctggccagcatcaccgccgccatcatcgggctccagctgggggccttctccgtcgtgctggaaacgacggcctccggcatctccgcgctgcccttcgcccagttcgtggaactgatgcttcccatccatctggccatcggcgtggtggaaggactcgccacggcggccatcgtcatcttcatcagccgggcccagccctccctgctgcgcccggctgatctggaaaccggccccgtcaaaaaagcctccttcaccgttctgggcatctttgcggtagcggccctgctctgcggggcggccctttcctggttcgcctccgcctacccggacggcctggaatggtccgtggccggcgtcaccgggtcggaagaaaccagcctggcggagccttcctccctccaccgcagcctggaatccgtacaggcatccaccgccatcatgccggactacgccctccccgccgcggaggaaacagcctcctccggagagacggagggagcctcctccatcgtcaaccctgaaaccagcctggccggcgtgctggggagcgtcatcattgccgccctggtctttgcggccggcttcctgttcggcagaaaaccgcacagccactgcccccgctgaccccccatgcccctgttcacggacgccgcgcggcaattccgccagatggaccggttttcctgcggaaacaccggattccaccgtctggacgcccgtattaaaataggggccttcctcgtctttcaaatctgcgtactctcctggccgccgcaggaaatcacggggctgctgcccttcttcctgttcccggtctgcgtcatccgcatggcggggctccccctgggctacctgctgaagcgcaccctgtggctactgcccgtcgccgtcatgatcggcatcttcaacccgctggtggacaggacgccagcgggggaatggttcggcattcccgtcacacagggcatcatctccttcatctccatcatcctgcggtgcatgctcaccatcctgggagccttcacgctgctggcctccacgggcttcgctccgctctgccggggcctgaggcagctcggcgcgccgcgcatcctgatcacgctcctggccttcctgtaccggtacgccttcatcctgatggatgaattccagaacatgctgatggcgttccgctcccggcggggaggctccggttccatccccctctccacctggggagccatgaccggccagctcctgctgcgcaccttcgggcgcgcggaacgcatttaccaggccgtcctgtgccggggaggggaagaccctgaattcgtcagcgcccccggcgtcatcaccatgcgcggcgtggcggccggcattctcttctgcgccctcgtcatcctgttccgctgctttaacgtcaccatgctggcgggccagtgcgcccgcagcctcctctcatgagtcaccaccttgtagaaaccatcgacctgtgcttcagctacccggattctcctccggcgctgaaccgcgtctccctgcgcatcacccacggggaatccgttgccgtcgtgggcgggaacggagcgggaaaatccaccctgctcctgcacctcaacggcctgctggagccctcctccggacaggtgcgggtgggggacatccccgtcacgcccaaaaccgtcgcccgcgtccgggaaagcgtgggaatggtattccagcaggcggacgaccagcttttcatgcctaccgtccgggaggacgtggccttcggcccgctcaacatgggcctccctccggaagaagtcagccgccgcgtgcagcaggctctgcgggacgtccatgcggaagccctggcggacaagatgacccaccacctttccggcggggaaaaacgcgccgtctccatcgccaccgtcctctccatgaccccggacatcctggttctggacgaacccagcgcgaacctggacccggcctcccgccgcaccctcatcagcctcctgcgccaattctcccataccaaaatcatcgccacccatgacctggacatggtcatggacctgtgcacccgctgcatcgtgatgaaggacggctccattctggcggacgcgcccgttccggacattttcgccgactgcgctttgctggaagaagcgcgcctggaacaacccctcagctaccgcctgatgcagtacggcagggagagggagaactccggccaattttaaggaggaaaaactccttacacaaactccagacgggcatccggcagggacttgatgaaccgcgccccgtacctcttggtggctacgcgggggtccaggatcaccaccatgccggaatcgctcctggtgcggatcagccgtcccaccccctgccgcagcttcagaatggctacgggcacggaatattcgtaaaacgggttccccccgcgcgccctgatgctctcaaagcgggactccaccagcggatggtccggcacctcaaacggcaggcgcgtcacaatcacgttggaaagggcctccccgggcacgtccaccccggtccagaaactgtccgtgccgaagagcacgctgttcacatccttccggaacgcctccagcatggcatgccgctgcatgtcctgcccctgcacgtacaaggtccatccctgttcctcacagaacgggcgcaccttttccgccacctgcaccatcagccggtagctggtgaacagcacgaaggccctgccgcgggattccgccagataccttttaatccactccggcagcacttccgcatactccggctggtccggctccggcatggagcgggccacgatcagcctcatctgctcccggtaattgaacggactgcctatctggagcttccggacgctttccgcgcccacgcgccccgcaaagtagcccatgtccgcatcccccgtccccagcgtagcggaggtcagaatggcggaacgcccggcggaaaacaggcgctccctcaggatatcgcccacctccacgggggcggagcacacgctcatgttccttccctccggaccggaccgctccgcccagtacacgtgcccctcctccgtcatgtccatcagcaccttcagggaggcctgcgcctcctccatgcgggcggccatgtccgccagttcatccttcacggccacgttttcctcctgcttcgcgccctccctcttcaattctccgatcaattccgccagaggcagggaaagaatgtcctgggaccattccggctggagaatgcggacaatcttgccggagcccgcaaaccccaggtcatcccgcgcattctggaaaaacaggcctgaagcgtcaatcacgtcctgcacccgctggaacaggtccggattgttcagcggtttcagcaggcccttgtgcgtgcgcggattgaacatccgcagcagttcataattgagatgcggttccgagagctgcacgcccagctgccgggcggcgatgttctcaatcatgtgggcctcatccagaaccacgaaatccccgggaaaaacgaaccccgcctcctcggaatcctccgcctgggccatcaggccgaaaaacagggtatggttcagcaccaccaccttggcctccagcaccctcttgcgggccacctggtacggacaggaggggccgcaatggcgcatgctgcacgcatgcggttcactgcacaccatggcccataccttgggagacggacggaacgccatgtcgctcagggtgccgtcctgcgttctcagcgcccagtcctgaatccgcgtcagctccgcggcttccccctgcgtaaacagggaatccatctgggccagcgcgcgccgcaggcgggtatggcacaggtaattctgcctgcctttcagcagggctgcggaaaaatcaatccccagggcggcgcgcagcagcggaatatccttgttgaacaactgctcctgcaaattgatggtatgcgtggaaatgaccgctttccggtcaaaatccagcgcaaacttcacggccggcagcagatagcccagggacttgcctacgcccgttccggcctccaccagcagcggggcgtccacctggagagccctcgccacggccagggccatattctgctgctccgcccggtattcaaaatccctggcgcgggagaacaacccgtccggggcaaatgcccggtggacataagcctcaaaggcgctaacgccttccacgtcatctgccccggcgccattcatacgggaacgctcccctactggcccacaggaagctggcgggaggaaaccggcggcagattcaccttttccggcaggtcatagaacatggagcgcagggcattcgcattcatcttggaagcatcaatgaacgtccagggccccttgtccttcaaatccttcaccagcaccagaacgcctgtattctctatctttacaggcatcccgtccggacgcttcatggaaatgaccatccgcgtggggagcaccaccagcacctcgtccccattcttcaccagatgttccgccgtaggctggcctatttcatacgtctccaccaccatgccgcgctctttcatcacggcggcggctccctgcatcttttccctcatggtcttcatgaaggcggcctcccctcccgggaaggaagaaacaagctgcttcttcatgggagcgtacatcttctcaatcatccacatcatgtcccccgttttcaccgctccggaaagctcccgggcggcctggacggcgctgtctccgtattcaccggcctggacggcgcacgcagccgccaccatcacacctgcaaacaaactcttcatcatggacggagtgtaacggcatgcatcccccgccgtcaaggcaaggcctcctgcacaaccatgtttttaccgggcgccctcccgcatcacaaggccggaccacatccacagcgtggggtccagttcccgcgcggcgtcctccatcaacttgcgggccgcttcttcatcctccgccacggcgaacatggtggagccggagccggacatcatggcgccgcgcacgccgggcctctccagcagccatcgcttcatctccgccaggaacaaatgcttctcaaacacgggcctttccaggtcgttgaccagcacatggccgtccacccgctgctccccgtacggtatgcccggcaattcccgtgaacccgcccagcggcggtaggcgtccggcgtggaaacgccgaacgacggcttcagcagaacgatccgggggcgccattccctccattccggcaggggctccaccttttccccgcgtccggtgcagcggcacgccattccataaatgaaaaatcccacatcggaaccgatctccccggccagctccgccagacgcctccgggacaggccgccgtgttccagctcattcagggcggacagcacgcacgcggcgtcgctgctgccgccgcccagccccgcgccatggggcacgttcttgaccaagcgcacatgccacggcatgggccgtcccagctcccgctccatcagccgccccgccttcatgaccaggttgctttcatccagcggaactcccggggcgtcgcagctcatttccaggccgtccgccgggaaaaactccagcacgtcgcacaattccaggggaaccatcacagtatccacttcatggaaaccgtccgccctcttacccagaacgcggagggaaacgttcaccttgcacggagccttgcaactgatcatacgccatggattccaccaagggacggcctccgggtcaagcccccattgggcgcaaatggacgggcacgcattttttcttcgcaaattccgggggctccgctataataggcgcgaccccgctgcacatggcctacgacgaaaacagcattaaaaccctggactggagggagcatatccgcatgcgtccggggatgtacatcggcaaactgggcgacggaacctctccggatgacggcatttacgtcctgctgaaggaagtcattgacaactcgattgacgaattcgtcatgggcttcggcaaaaaaatcaccattgacgtgactccggacggcctgtgcgaggtgcgcgacttcggacgcggcattccgctgggcaaactgctggactgcgccgcgaaaatcaataccggagccaagtacgacagcgatgccttcaagaaatccgtagggctcaacggcgtaggcatcaaggcggtgaacgccctttccgacttttttgaaatccaggcctaccgcgacggggaaacgcgctcctaccagttctgccgcgggaaggaactccccaaaggacggaaggacggcgccacggaggagcccaacggcacccgcacggcgttccacgcagacccggacattttccccgtaaccacgcagttccgtccggaatacattgaaaaaatgtgccggtactactcctacctcaacaaggggctggccctgcacttcaacggacgccgctacgtctccaaaaacggcctgctggacctgcttacggaggcaatgagcgaggaaccgctgtaccccatcatccatctggaagggcacgacatcgaggtggccttcacccatggcggccaatatggggaggagcactactccttcgtcaacgggcagcacaccacgcaggggggcacccaccaggcggccttccgggaggccatcgtcaaaaccctgagggactttttcaagaaaaactatgaggccggggacatccgttcctccctcgtggccgccatctccatcaaggtaaaggaacccgtcttcgaatcccagaccaagaccaagctgggatccaataccatcagcccggaaggggaaaccatccgcaccttcgtaggcaacttcatcgccagggagctggacaactacctgcacaaaaacccggagacggccaaagccctggaagccaagatcaaagactccgagcgggaccgcaaggaactctccggcatccagaagctggcgaaggaaaacgcccgcaaggccaaaatccacaacaagaacctccgggactgccgcgtgcactacaactccaagcacgcccgcgcgggggaaaccaccctcttcatcacggaaggcatctccgcctccggctccattaccacggcgcgggatgcggaaatccaggcagtcttctccctgcgcggcaagccgctgaactccttcggcatgagccgcaaggtcgtctatgaaaacgaagaattcaacttcctccagcacgccctaaacattgaaaacgggctggaagacctgcgctacgacaaggtggtcatcgccacggacgccgatgacgacggcatgcacatccgcatcctgctgatgaccttcttcatccagttcttcccggagctgatccgggagggccacctcttcatcctccaaactcccctcttccgcgtgcgcaacaagcagcagaccatttactgctactcggacgcggagcgggaagcggccatcgccctgctgggcaaaaacccggaaataacgcggttcaagggcctgggcgaaatctccccccaggaattcaaggccttcatcggggaaggaatgcgcctggaccgcgttcgcctggaagactcacacaaggtgaaggacctgctctccttctacatgggcaaaaacactagggaaagacaggaatacatcctgaaaaacttgcgtgttgaactggacccggtcatggactagagtagcggagccacatctatctatgcttaccattcccaaggaaaaactgccggttcatattgcctgcatcatggacggcaacggccgctgggcgcacagccgccatctgccgcgccaggccggccaccgggcgggagcggatacggtggagcgctgtgtggacttctgcattgaccatgatattccctggctcacgctttacgccttctcctcggaaaactggaaccgccccaagacggaggtgcacgcgctgatgctgctgctgcacgaattcctgaaaaaacgcctcagccagatgcaggaaaaaggcgtgcgccttcacgccataggcgacctttcacgccttcccaagcgaacccagaaactgctgcaatccagcctggaagccacggcgggaaataccaggctcaacctggttctggccctctcctacggcagcagggcggaaatcgccgccgccgccagaaaaatcgcggagaaagcctcccgcggggaactccacccggacgccgtcacggaagacctcttcaaccagcatctggacactgccggcatgccggaaccggacctgctcatccgcacctccggggaaatgcgcgtctccaacttcctgctgtggcagatcagctatgcggaactctatgtaacggaaacgctgtggccggacttcagcgaccgtgacatggaagcggcgctgctggactactcccgcagaaaacgccgcttcggcgcactttgaccccttttttaaaccacattcctacggaatcgccatgaaccaatacgctctcattctggccggcggcagcggcacccgtttctggcccctctcccgcgaccaccgtcccaagcagctcctgaacatgttcggggaaggcaccctcctccgccaggccatcgacaggctggacggcctggtgccccggcagaacatcttcatcctgaccaaccatctgcaggaggcggaagtccgccgccaggcccacgacatccccgtggacaacatcatctccgaacccgtgcgccgggacacggcgcccgccatcgccctgggcataggcctcatcaaggcggcggacccgcacggggtcatgctcgtcatcccttccgaccagctcatccaggaccaggcgtccttccgctccctgatgaaagccgccatggacacggcggcgcgggaaaaggcgctcgtcacagtgggcatcaagcccacctggccctgcccctcctacggctacattgaacgcgggaaggaaatcgcttccgcaccgggctgctcctgccgcgaagtcatccaattccgcgaaaagcctgacacggccacggctgccgcctacctgagccagggcaacttctgctggaacgccggcatgttcgtctggagcattccaaccgtgtgcgaacagcttgacaagcactgcccggagctggcctccttcgtggagcacatcgcggaatccccggacccgcaggaaaccatccgggaggaattcccggcgctcacgcccatctccatcgacttcgcgctgatggaaaacgcggaccgggtgctgaacattgaagccacctttgactgggacgatgtaggttcttggatatccgtagccaactatctggaaacccacaacaaaaacaccaccaatacggacatcaccgtgcaggacgcctccggcaacatcgtcttctcccagcggggggacaagcacgtggccctgctgggcgtggaaaacctgatcgtggtggaaacggcggacgccatcctgattgcggataaaaacaaggcggacgaaattaaaaaaatcgtcaaccagcttccggacgaactcagatgaccagccagcatccggccctgggcattgactacggagaagcccgaatcggcatcgccgccacagaccccgtgggcatcatggcgcaccctgtggaaaccatccacaggcacaaaacggacggcgtcacccgcatcgtccagctcgtccaggagcgggggatacgcaccctggtgctgggcatccctgtccgcatggacggcacggaaggaaccgccgccgccaaggtgcgcgcgttcggcagggaactggccgccgcccttcccggccttcccatggtattcatggatgaatgcctcaccaccgtcatcgcccaggaaaaactgcacgccgccggcaaaaaggagaaaagcttccgccccatcatcgaccaggtggccgccgtggaaatcctcaacacgtggcttgattccacgctgggctgaaacggcaaacggcgccgtgccgcggcgcaatccctgctttacgcgcctacggaactccgcacttccctcttcctcagcaggaccgttccgccggcaagcagaaacgccatcagccacagggcccggcgcgtttccggccaccagatgaagctgtccgccacacgggcgtcttccgggcgttccggcgggtagcagaccgtcacccgatcccccctggaataggaagaccagaaaagaaaagcgggggactggaataccacttccccctccccggtctgcggcaggaaccgcacttccggagcccagacgtccagagagggaccggacgtccccatggcccgcgaacggctccacaacttcaccgtatcctccgtgatgttccgcaccgtcccctccgtacacagcccctcccgggcaaagcggctcttttccagaaaaaaatcaccggcctgccatatggaataaaggctcagccccgccatcacccaggccagcagccaataccaaccgaaccacggaacgctgaaaaaatccctccagcgctccgcagcccgggaaaacaaaaactctctccccccatgcgtcaggcacgctccatgctcagcaccaccttgccgctgcggaactcttcctgggccttctccacggcccggcgcacgtcgctcaacggataaacggtatccacggcctgcttcagcctgccgtccgccatcaggcgcgccagcttgtcataagcggcctcaatctccggaacgggggcattcttgagccactgcgtcacccacaggccttccaatttaatgcccttgaaaatcaggaaaccgttcggcaccttgatgctcttcctgctcatggcgccgtacgtcaccatgcttccgccgggagccagcatgtccatcaggcgcagggcgctttccccgcccacggcgttggaggccagcacgggcctctttccgtccagccgggccagggtattcttcaccacatcctcgtcatcctctcccactaccaggtcggcgcccagcgcggtcaattcatccctcaattcatccggccttcttacaaaattcaccgtcttcacgcccatctcccgggccagttgaataatgcaccttcccacgccggaattggaggcgttctgcaccacccagtcccccggagtcagggaaacgaacccttccagcatgcgcagggcggtcagggggttcaccttcagcatggccgcctgcacggggtccaccttcacggggagcttcatcacgttcacggcgggaaccgccacatactcgctccaggaacccacgccgcgcagcagaatcacttcatcgtccttgcggaagccttctgcgcgggactcctgcaccacgccgcagccttccagtccggcgcgtgaatggggcagcacgggcttcacgccgtaaacgccctgcacaaaattgatgtccgccggattgatcggggccgccttcatccggatcagcacctccccctccgccggaaccggcatgggaccggaaacatactccagcacgtcctggggtttcatgctgcattcggaaaactctgcataatgattctctctcatgctttcaatctctcacgccgcctccctccgtgcaagcgccggatacgttttacacgggcaaacaagccatccggccgcgcgcgcctttccccggcgcctgcctccccggccatgaacggagggaaccagaccgcaggaaagcccggcagcgctgccgccgggccggcacaaattccgagtcttttgttcggttgttcttgaccttaggcgaaaatacgctagactacctctctcgcattaacaaataacttcgattgccatgtcccgaatttgcatcatcagaggtaccatgcctcacaaaggtcgtcgtatccatcgctccggtcttgccaagaaaaagggcggtattggtcgtcacgtcactaagactgtcaatcgtaccgttttccccaaccttcaggaaaagcgcatctgggttcccgaactcggtcaattcgtgaaaatgaagatttccgccaaggccctgcgtacgatcaacaagaacggtgcttacaacactcttaaaaaggtaggtctcctgtaaaaaagattcttttttttgaacgttgttacaccacttgaactctaaggcttcaacgaggtgagcaactggcagaaaaagatgtccaaaaagacaagggatcatctgcttaagtgaggcgcctccaagttgaaggttttattgaaacattaatataccaacggacgtaaataagacgtcccctactggaaaaagatcacacagatgaaagcccaaaccaaaatcgctcttagaattaatgatgacaaccccaaccatcacctgtggaacaacaggggggtttggtggtgccacgtcacggttcacaagcctgactccacggcggaacgcctgagattctctctgaagacccgtgacatcgaaaaagcccgcgcccgccgcgacaagattttcgcctccatccagcagcacttcggcatcgccgcttaaggaagctgtacggagagattaaggcaagtcacatcaatctctttataagaaccgttccggttaaccgggacggttcttttttatggaaaaaataaagactttcacgcggaaagggcggcagcggatttgccgcaacacaagccccctgcaaacaaggctgaaacagcccgtttcttaaagccgccgccccgccaggctattcttgcaaagccggctatccatttcaccctttattcctataataatggacgggcagtgaaacgcggcattcacgaacccgctggccggcaaaaaaggatgccgtccttgaaagcatccattcctgtccctgccgtcaattctttttgctgaaccggaacatggccgctccatggctgttcaactccacggccatatctcccgtcaccgttccctggtcggcgcgtttccagaggtccctggcttcatacgcgccggagagccccagctccctcaggttcaccttcactacgcccttctctttcccggtattgaaaaaccccgccgctacggaaccgtcggacagctccttcgtccagacctggaaatccccccggtgccacgccttgcgggcgggacgggcggcagggtcctggtccacggcaatcacctcgtcgttggtcaggagccccatcgtgaatgaatcgatatgctccaggtcacaggaaatgatgagcggggcggacaggaggcaccacagggtcacatgggtgtactgttcatccggcgtcagctgcgtctggacaaacgtggtattgggctggttgggcttgcccagcttcccgatctggagaatgtccggatcattccagtggcccgggcgcatgtgcttctgccagcgttcctgggaaaagccgatgccgctgacgctgccccagtggtcctggatatcccccgtcgtcctccacaaattggccagcttccccagctcttccacctgtttatacggggcggcattggatatgctgagcacaatatcccgcccggaatcgtccagagcctggcggatgcgttccgtcgtcggcacgtcattggggttccagtccaccttcacgtaatcgaacccccagtccgcccattgcctggcgtcacggtcaaacagccagacggcgcctacacggtccgccttcctgcgatgcacgccggggtaactcccgaaaatttgattcttctgcttgcggtccttctccggaatggccatttccccgtaatccgccttcgcattgggcgagcttcctccgatgaacccggcatacgtccccatccagggcgtggaataaatgcccgccttcatccccatggcatgaatggaatcgcacatggccttcatgtccggaaagcgcttgttgggctggatggagaaattccgtccgcctcgctcgccctgccagcaatcgtcaatattgatataggtccagccatggttgacaagcccccgctccacaaaaagccgggccgtcttcagcacattctcctgccccacggcctcactgtaggaataccagctgctccaacccatgggcggggtcaggcacaactcatcccccaccttcagaatccactccttcgcatcttttccatgcctgttggaagcctggatcttcaccttgtattcccccttcttcgccggggcggtacccgtaaccagcccgcgcgaatccatcctcaggccggagggaagcccagccgcctgaatcttcatgggacgctccccggaaacgggaacctggaacagcacccgcgcgccgggagtggcgccaacaatgcgggcgccgttgacggagggggaaagcggggtttcaggagtcaggcgcacgccgggagggggagccggataaggattcgggaactccgtgccaaatgaggaggatacggcggcgccaagcacggcaggcaggaaaaaacggtacaatttcataaatggtctatggaggtgtaccttaaaaaacgcgtccgctcccccgtttctttcatcatgctgtctatctcggcctccgtgcgccatcctgttcctgcgttccttccgcaaaacgtgaggaactccggaaaaaagccgggacggacactcccggcaaccgtgccgccagggagcggaaatcctcttcacgcatcacgttccccgccgtcgccagggcatccgccagcgccgcggaaggcgcctgcacgctcacctgcctgccctccgtcatgcccagccccgtgcgggggtccagcacatgggaatactccgcaccgccgatcttcgccatctggcgggcgttcccggaggtggagacggcggcatggctcaacaacagcaccgtattcttcccatcaccttcatccaccagcagccgccatccccgctcccccggtgggggggcgccggccataacgtcgctggtgctgtcaataaagaaggaacggattcctatttttctcaaaatctccgccatccggtccacggcaaaccccttgcccatgcctcccaggtccaccctcattccgggaaccgttttgaccgcggcccccttgccgacggacagcttttcccatccggacgcccggagcgcacgttccagttccccgccggacgggagaacgccgtggcggcggctcttcttccacaggcggatgcaaggaccgagcgtggggtcaaaggcgccctttgtcagccgggcataatccagggccagcagaagagccttttccagctccggggaaacggggacggaaacgccgttttccgcggcattcaaccgggccagaccgctctccgcatccatggcggacatcaccttctcccagcggacggcgcaggcaagagactccatgcaggccttttccgtctccgcggcatccatcccgtgcccgggataggcgcgcaccgtaaacaccgttcccatggccgcaccccgcaccgttacccttccatccggagcatgaacgcaggaaagcggctccggcggggcggaagccgtttccctctcccgcccccggcttgtccccgcagcagccagcaggcaggaacagcacgcagaaacaacggccagccggaaaaaagaactcatgtgcacctgcgggatcatgttccaaaacctactccgcacaaacaaacaggagcaaggaccgagtgcgccatggagacgccgtcatcccatccgctgacaaaaccgggatgacgttatttcatttgaagctggcgcacgccccccttttcatgataaatggaacggttccacgtttttgcaaattttgccctcttcatcgtcatgaccagattcctgctctccctgtggcttcttttaacgcttcccgtttccgccagctggtacggtgacgaagtaaaagccggttccgacatcatcatggtggacctgctctacccctactggccggaatccacctacttttcctgctggaacctggacatgttccccaagggcggctacttctatgccggcgtggcggccaacgccaacgacaacacgaatctggaaacctaccgcccctccaccgtatggtccttctggcccgctcccgtttacgaagggcggcaggtgcgcaacgtgtacgtcaacccgcacgtctacgcccagcaatacgtgggtgaaggagcttccggaaaggccggggggcgcgacgtcccgtggatcaagaccaagcagtggtacaccatgctcatgcggacctggggcgcggacgaagccaggaaggaatgctacgccggctggtggatgaaagatcaggccggcaaccggtggcaccacatcgccaccttccgcattccctatgcggccaccgggttcaaggggaacggcggctttctggaggacttcgggcacgggggccgcaagcaaagggaactgtggcgcggcaagggcttctacaggcacaacggcgcgtgggaaaaatgtgataccgtttccatcaacgttcccaaggaaggaggcatgaaatacagcggctggacggtccaccagacggaaaacgactccatcctgaccatgtcctatacggaaaacaggcaattccccagaaacctggagccgggccgcaagcacacgttcaagctgaaccagccggacaagcccgtgatggacgccatcgcggcggaaggcaaggctcgccacgacggcagccaggtgatcgtggactggacgctggcggaaacgtcctccccgcagttcgggtacaagatagaggtctttgataatccgcaatactccggaactcccatttacacggtggaggaacaaatcccgcacgtacgcaccaaagctgtcgcgctcccccgggacatcccccaatgcttcgtcaggctcaccatcacggacatctttgaccagcagaaaaccctgaaactcgccaaggccgccgcggaagcacccctcaaaggactgcccggcaaaaaagaactgtccagcggcctggaatacaaatacctggaaaacaaggacggatggtccaaactggcggaactggacttctccaagccgttgcggaccggcgtctcccatggatttgacacggccctgcgcggagccagggaaggacgattcgcctttgaatatgaaggcttcctggtcgtcccgcagacgggggcctacaccttcgccctccaaacctgtgacggaagccgcctggacgtcggcggaaaaaccgttattgacaacgatgggctgcacagcacgtcggaaaagcgcgcctccgtcttcctggaaaaaggcgtcactcccatcaagctgacctacttcaagaaaaagccggaacacgaattcaccgtggcgtgggtgggctggcaatatggcaaccgccccatggaggaaataccgctcgccagcctcatgcgccccaaacgggcggacataccggaagccaggctggaagtgggcggcaagggaccggaacgcgtgctgaaaacagccatctcctccggacgggtgaacaaggtggaatactacaacggcgccaagctggccgccgccgcggacgcagcccccttcaccgctcccctcatgctctttgacggagaaaacaaactgtgggcgcgcgtcttctacaacggttcccatacggtggacacccccgtcgtccccgtccattcccagagccgcatcacccccggctgggaagccatgctgcgcggggaaccggggctgccccactccatcagcggcgcgggaaacgcctttcgcttcgtgggggaaggggaatacctggtcagcaaaaaaatcaagggagacttcatgctgacggcccacatcagctccatcagcgataaggcgctggacaccggggacgactgctgggccggcatcatggtgcgcaaggacacgggagccaccaactacgacgatgaaatcgccgtcttccggaccgtgggccgcggtctccggtgcagcgcggacttcagcgactacggaacggggcgccaatctaccttcaccctgaacaaggaccactcctgggtgcgcatcatgcggcgcggcaatgaattcacctgcttcacctccccggacatgaaaaaatgggaaatgggcatgcagcgcatcatcccgatgaaggaggaagccatcgccggcatcacgttcaggaccattccgggcaagggcaagggcatcttctccgccgccatggacggaatctccatcaaacccgtcaaactccagccgcacaagataaccgccgccatgcctgccggaaaaatcatcggctattccctgctctccccggatctggcggtggcgcgctaccgttccggggcggacctgctggaacgcaaaaacggaacctacgcccgcaagcccctcacactgcccaggggcgtcaaaaccgtccgttccatggcgcttgccggggacaaaatgttcctgctggccccgacctcccagggaggagccctgttcagcagcaaggatatgggtaaaacgtggaccgtcgccaacccggatgtaaaagtggacccgtcccccatctccttcattgccggggagctcatctccgtcaatccccggaatccgcgggaaatcatcgtcggttcggaccgcgccggactcttcatgagcacggacggcggagacacctggaacaacgtgggcctggtgggggaacccgtcaccaacgtcggcttccatacgaccgcccagggcaggattggagccgtgacggcggaccgcaaggccaacaccagcaaaatcttcatctccaccaacaacgggaagaaatggaaccagaaaaacgaagtgcagggagcgggcttcctgagactggtgtacgacacccgcgccgcagaccagctctacgtcttctccacccagggcgtttacacctccttcaatgactgccgcaccatgaaccgcgtgctccaggggctgcccgtcacgcagcccacgctggcgatcgacaggcgccgcctggacgataccttcatgctcgccgtcccgctggacggcaagggcgtgtactccagcgaacgcaacgccagaaactggcagaagcgttccgacaaggaagactggggagccgccttcaacctgctgattgacaccgcgaacaacaagcacatcaccctgtacgcggaaaaaggcatctatgaaagcacggacgaaggcaaaacctggaaacaggtctatccgggccattgaaccagaatgctctccttcttctcccatgaacaaaggcactccggcgcggggcgttccctgcaacgccagaggaactcatgcagttctctcattttctccgccctggcgagcgtttccgccgaccttaacaagctccgcttccgggcgccggacggctttcctctgaaaccggacggattacgccatcctatgcaggaacagcctccatgcggctttccccatcacaatcatgcgcgcagccgcagtgcttcccgcactgcggcctgacaaaatctgcctgggaacgcctccttatctggcaaacagggcatggatgcggcggcagacctcatccacgttctcccgtgaattgaatgcggaaatgcggaagaacccttcccccctggaaccaaagccggaaccgggcgtaatgaccacattcgcctcatacagcatcttgtcaaacatctgccagctatccaggccgtccggacactgcacccagacatacggggcgttttcccctccccacacgcgcatgcccgcctggcggcaggcattcagcagcagcgcggcattccccaggtaatggctgatcagcacggcggtctgcgccatgccttccagcgtaaacagggccgcggcgccccgctggacgatgtaggaagctccgttgaacttcgtgctggtgcggcggctccacagctggctgatgagaaccttgttccccccggaatcatggccgtgcaactccttgggaatcaccacgtagccgcagcgcacccccgtgaagcccccctgcttggaaaaggagcggaactcaatggcgcaatcccgcgcgccgggaatttcaaaaatggacttgggaacggcggaatcctgtataaatgcctcatacgcggaatcgtacaaaataatggcgtggttcgcccgggcatactccacccatttcagcaattcattccgggaagccacggccccggtagggttgttcgggaagcacaggtaaatcaaatccacatgctcatccggcaattgcggcacaaaattgttctccggcgtgcaggggaggtacaccagtccctcatacgaaccgtccgcgctggaatccccggtattcccggccatcacattggtatccacatacacgggataaaccgggtccggcacggcgatcctgttgcccggcccgaaaatgtccagaatgttgcccgtatcgcacttggcgccgtcagacacgtaaatctcatccacttccacatgcacgccgtggacctggtaggcctttttggcgatagcctccctcagccagaaatagccctgctccggaccatagccgtgaaagcgctcatgggtggacaaatcgtccaccgcctcgtgcatggcttcaatggccgccatgggcagcggttccgtcacgtctccgatgccgcagcggatcagccttttggccgcctccggatgggactcggcaaacgcattcacgcggcgccctatttccgggaacaaatatcccgcctgcagcttgaggaagttatcgttaatattaggcatggttttaatagtaagtgtctcattccataccctccacgggaaggaatcaaggccccgttccggcatggctcccctccctgcgtcactatctccgcacaccccttttcctgcggttccctccgcgcggacatggagccgctgcctatttgcgtttcatgctccgcatcaaactcttgtcttcccggctaacacgcagggattcaataattttttgcaaggccctgttgtaagtgaaatcggacagggacgaattcctcaaatactccagcgtcaatgccgggaacttcacataacagacggaaaccgcccaggccaccgccatgcccacgtaataatcctcatgccgcacgccatccagcagggccagcacctgctccacgtaatcctccgtaatgaaatgggccagcatcatcaccacggcaaaacggacatcatagacccgtgcggacgttaaatacggctggatgaactcccagaccagggcaggatgctttttacaaaacttcaggctggtgcagaaagtatcgcagacagcccagttatccatgcggggcacgaagcgcgcgacctgttccaggcgctcttccggctccatgcgcgccagcgctatcagcatgccgtccagcatcacttcctccgcatacgggtcaacggctggattttccagcagctcccgccaattccccctcgccacctcgcgggcaaggttccggagaacggggaggcgaacgcccagcagacggctgacgccgggaatcagggaagcggagaacttctgaaactccggttccgccaacgcctcaatcctttccctcaactgccgcctgctctcaatcatgggcgccatcctacatggaggctgtgcgccgcacaagggggaattcccgtatgagaggcggcggaacccatgcggaatccctcttggaaggcccttccggagacgcgcctaaaaaggaattggcggcttcccgtcttctgtggtagcctgcggacaggcagcaagccgtcccctatgccctccagccttcaacaattcaaatgtcccggatgcggcactcccttttccgcggcggatgtggacaaccgccgggacacggtcacctgcagcagctgcggactttccaccccctggacgtccctggtccgggagcatgaattccatgatgtgcctgcggccccttccaggcatctgacggtaaaatccgcccatggaaaagtcacgctcacctacaggcattcctttaccaaaatacttctttacacgggactggccgtggtttggggcatcatcaccctggtgctcgtcctcctgtccttcgggccggggaaaacggacttcgcgctgcccgtcttcaccaccttctttgccgtcacggaagccttcatcatcttcctctgcgttgacatgatgctgggaaaagccgttctccgagtggaaccgggtaaagcgtcccttttccggggcattggtccggtggggagcacatgggattttctccttcccgcgcaggccccgatcatgatggagcgcaagggaggggaaaagacggactattgccgcatctccgtgccccagccttccggaaggccgttttacttttccggcggcatttcagacccggagactcttgaatacatcgccgccgttctgcgtcagtttcgcgcttgaacccggaattttcacggtcatgacgtggttccctggaacgaaaaaagccgttccatggtccaaaaaagacaataaaaaatcttatgatcatgaacgaactggaaatcatcgacgtccgcggccgtgaaattatcgattcgcggggcaatcccaccgtggaagtggacgtggccctggccggcggagccatcggacgcgcatccgtccccagcggagcctccaccggggagcatgaagcctgggagctcagggacggggacgccaagcgctacggcggcaagggcgttctcaaggccgtggaaaacatcaacaagatcatcgcgccggaagtctccgggcacgatgccaccctccagccggccattgacaaaatcatgatcgacctggacggcacgcccaacaagtcccgcctgggggccaacgccatcctgggtgtttccctggccgtggcgaaggccgccgccatccagctcaatcttcccctcttcaaatacctgggcggcccgaacgccaaggtgcttcccgtcccgatgatgaacatcatcaacggaggcgctcattcggactcccccattgacttccaggaattcatgatcatgcccaagggcgcgcccaccttccgggaagccctgcgctacggcgcggaagtcttccatgcgctcaaggacgtgctgcacgaccgcggcctgtccaccgccgtgggggatgaaggcggctttgccccttccctgaaatccgctgatgacgccctggaatgcatcgcccaggccgtgaaacgcgccggctacacgctgggcacggacatcttcattgccctggacgtggcttcctccgaattctacgacccttcccagaacctgtacgtcttcaagaaatcggacggccgcggcagaacggcggaggaactgacggcctactaccaggagctccagaaaaaataccccatcatctccattgaggacggctgcgcggaaaacgactggctgggctgggaacagctcaccaaagccatgggccacaatacccaattggtgggggacgacctcttcgtaacgaacgtggaattcctgaaccagggcatttcccgccatgtggcgaacgccgtgctggtgaaggtcaaccaaatcggctctctgacggagacgctggacacggtggaactggccaaggacaacaaatactccgccatcatctcccaccgctccggggaaacggaagacgccaccattgcggacattgccgtagcgaccaatgccgggcaaatcaaaaccggctccctgagccgttccgaccgcatggccaaatacaaccagctccttagaattgaagaggaactgggggatgacgcagtttatggtggcaaaatccacattttatgatcaaaaatgttttgtttaactgcaaagaatgctctggagacgccgctattaccatcgttttaccttggcggagcttgaaatccgccgggagaaacgtgccctgatcgtccagagggctctccgcctctttgccatcgtcctggccttgtgcctgaccatgctgctttccctggtgtgtttcaagccatggaaggacctgcgctccctggagcatgagcgttccttcctccaggcgcatctggaaaaatccagggagcagatggaacaggctaaaaacgaattcatctggatttcccaggacccccattattttgaaatgatcgctcgggacaagggcaacctggcccttcccggtgaacatatcctccgcatcgcggaacccaagcgcctgaaataaggcgcttttttaacgaaaaaacgggaccatgaaaaccatgtcccgtaccggtcaacggaacgttccagtccaaaccagggcgtttgatcccacccggcctccatccagcccggttatccacagcgggataggggcagccacgggaatggcaaccatgccccgcggcggaaagggacggttccgcatccccgctaccctgccggcaggcgccgctgcgtattaaccgcagcgcagggcccccggcgagatccaatgcggcctcattcaggctgtttgtccggcgtggccttgtcgtactccctcatcagcttggcggaccagctgatgctgtccggaaaacggcacgcgggcgtcgtggtcaggtacgttcccagcttcctggccagggaatccgcatcctggtgcctggaaaaatataaatccttctgctcctgggggtcatccgtaacgctgtaaaactgcggagcgcggtccggcaccagcaggtacttcatatccccgtccagcacggcggacgtataatccgtgcaccagaacaacgtgcgcggaacaggcgttcccctgttcgccaccagctccagaatatccatgccgtccagcttcttggggatttgacgtccgtttgccttcagcagggccggaagcaggtccacggtggaaacgggctgcttgcagacgcttccgggaatcagccgcttgtccgccggatacctgatgatgaaaggcacgcgtacgcccccctcaaaatgctgcctcttggcaccccggaaaggagcgttgcaggaagacgcttccggagcgccgccgttgtccgacaggaacacgacaatcgtgtccttttccagaccgtccttcttcaaggcatccagaatgcggcctattcccttgtccatcgcatacaccatggcgcaataaatccggcgctccctgtcctgcacgttcttgaatttggcgatgtcctccggtttggcttcgttgggccaatggggagcattgtaggaaacgaacatgaaaaacggctttttatccttgttggactcctggaggaactcaaccgccctgtccgtaatatcgtccgtcaggtaggtaatatccgtcttatccgtaaaattggacacaatcatggagggattcaggccttcagcctccttcttcacgggaaaataagaccgggaacctcccaggaacccccaccagcgcgtgaagccgcgttccggcggcgtatacccctgcgtgtggcccagatgccacttgccgaacaccgcgctccggtacccgcaagacttcaaatactccggaatcagcttctccgtctggggcagcccgtaatgggactccggaaggtaatccacctggatattgggattcgtagtaatgccgtagcgcttcggaaaacggcccgtcagcagccccatgcgggaaggggagcacatcggcgccgttacatacgcccgggaacagaacacgccctccttcgccagccggtcaagggaaggcgttttaatctgcctggaccccgtgcagcccaaatccccgtaccccaggtcgtccgccagaatgatcaccatgttcggcggagtggccgggcggctctgcgcccccgccgccccgcaaagcaaactgcacagaatcaacaatagatgcgctttcttcatcatagtttaatttacgcggcttgccttccatatcaatcaaaatattaattctgaaatttccggggcaatcctgcaagcggcatccatgactctttagcaacgaatttgctaaaaacaggacgatttgcccatccaattatttcccggaaatggatacgaagcctttccttccgcgctgctcccacggacagacgcccccctgctgccggagaaacagctccatcaaggcgtttccaatccggcggcaataaaggccggctccccctgtcattccttcacctttcctggaatgccggaacagcagccctaccctctcatctgccgcagaagggccgccacatactgctgggcttccttctccgcaatacctgtaccgaactcgaacggcttgccgtccggttgttccactacaatcttgttcagcaccttattattctgctgtatattactcgcctcaatggaaatgcgggaatccttcgccagaagaaactgctggcggcggcccaggctcccaactccccggaacagctctcccgttccgggcgacagggtcagcgtcatacggccgaacaacacataaacggcgcccaaaaacgtaccgaacccgaccagaacgaaaggaatcaggaacaattgcacgaataaactctcatgggccattttccccatcatcacaaatatggcggtgtatgtaatagcattccaaatcagtgcaaacagcaacaggaaaaatccggctcccttgggcttcctgtacgttacttccaatccccgtgccgtttttgtcacgctcatgcgccggggaatggaatcaaggatttcctcatccctttcctcctgaacaagctctgaaaacctgcttatcttgttgcaggcgcggcataaagccatatccgtggccatattcacatcttccatcgccagcaacgcgccgcacatcggacacttcaattcaacaggggtagtcatgcccggaactctaacaaacttttatgttcagaaaagcataaaaatcacagcgttaccggtctctccatcctccacaaaaataccgtttttccgggaataagggatagacggctttaagttgtccggaaaggaaattccgtctgccttgggaaactgctgtccttaagcgtttgtcctgcttcacggctttaccttctgcgcatccctaggcattcccttgtacaaaaattccgtggccggagtacgccccactgttcggttgatcaagtccgggatttccttgtccgcatagcccgccatccggaggtagttctttaccgccccgctctggcccggaaacaggttcaccagcatttccacaaaatacttcattctgggaacggaaatataattttttaaccttttattcctgatattgtttactgccagcttgttgagaaagacgtaatactggggattgacattgcaaacgatatcacgtttcttgagttcttcttccaaatacttccggtttaacggaacgaacgattttttcagagcctcgtgcttctcctccaaatccggatcgtaacggttccggaactgcgcatagatggaagccgcataagtggccagcaagtcggacagcgtcttgccccggagatggaggcggcgcgccatcggagaggcgtcacggctcatcacgtagaggaagaaaaacatgtcatgtttgacggcatgatcattattgtcaaaaatgctctccggcgtcgccttgtcgtagtcggcgggataaaggggagtttccgcgatataatagaacagccagagctgcaacgccagctcctcccgcgtgatctgcttattgctaacagaagcgcattggcccagcacggagcgtgcctctgtataaaactcccccagccgcccttgcgccagcttctcccgcaagccggacagctccgcagggggagatttaaacgggtccaggcacaccggggaaggtagggcatgtcccagccctaccatacagcatagcatggcgagaaaggtaaacactttcattggattatttccaaacatattcataattcattagatgatagcataaatcataggatatggcgcgaccgaatttcctgatggcaatttggatttcttcaaattctccatccattccttcgaatttcacatactcaaccttgaacctctgctccacggtttccactttgaggatatcgtcactggtcgactctttgccgcctttcccatcatggactttccaatcgcaagtccaaaaccattcctgcggcaacttagctccatgtatggcgttataatttgccatatatatcacccggtcaatgaatgaattattttgttcaatgctcctggggtcatcgcatccatgctccgtatgcgggacgcccaattttatttcatgtttttgcggatcgggaggaggggtcggcatgacataggtcaatcctccatcgcgttcaatcagttggatatttccaaaattcacctccgtaggttccaccgtcaatttaacatcagcagccacaataatgatattgtgatcactgggaagatcggccttgacgggaacaactgccgtcagctttgtcggtacaagaatctcaaaggcaatggttttttccaggccttcactcgtggtgacggtgacttccacctctcccttctcttgtattcgctcattcaccgtcaatgtaacctcttcgagcccctcggttttttcgggaagagaggcaagagcttctcctttggtaatcttccactgcaactgagaaacatcccccttgggctttccggtcaaagtcaacaaaacatcttcccccatgccgagttttttgcgctccttgtccgtcttctcatccacatcctttccctgctctttggcaatatagaaatcggcagaacacaacgtcgtttccgattttatttccagcgcctgtacttcatcaggaacatcttctccggcctgggcaaaagcgccaaaccagtggcccatcaatatcaggccgatagaacgtatttgaaatagagacaacatggcaaggatgggaagttggcatatcgttgccttatccgggtaatttatttatttgaagatgtaaagaaaaagttgaaaatactaatcgtactccatgaattaccaagctatttcccctatttttcccggaacgccattctcttttccgcaaaaaacggcggcttccgccatgcggaggacgccggaacgttccggttaccggacaaactgccggttcaagcatcccaacacccgaatatcaggcgctgaattggctgcctatgctgaccgtatcaaactccacgatcttcacaataatgttttccgccgtgtccgcctcccgctgccggatggcatccagcaggtcgtcatgcagcttcatggccccggcgtcatactgcttctcctgcagcaggccttccagattctcctgcacatggcggatcaccacgttgtacaattccgcaagcaccgggttatgcgtggcgcgggccacggcggcgtgaaacagcatgtcgtcctcaatgcccggccttaccctggcatggcagtccttcagggcgctttccagctccttcaaatcctcctccgtccttttaacggcggccagccgcgcaatctccttttccaaagccagccgcgcttccagaatctggggcagttcggattccttgaggcggttactcaccgcaacggcaaagcggtctgacgccatcacatacgtgccgtcgccgggccgggcctccagcatccccatgtgaatcagggattgaagggcctcgcggatggtgttgtggctgacggaaaaagcccgggccagttccgcctccgcgggaatgcggtcccccaccttccacttgccggaccgtatcatggattccatggcggtgagcacctggcgggacagggacactcttacaggcttcttcaactccattgtcttggatttcttcatgaaaagttagcgaataacagtccagaggcgtcccttctccgtcttgatcaactggatatccagttcaaaggcgtcctttagattttcctccgtcaacacctcgtcccggcttccgtgggccacgatctcaccggactttaaaatcatgccgcggttgaatacggggaggatgtcttcaatacgctgggtaatgaacacgatggtcaggtcaggccgcgtctccgccagttcctcaatggttttcagtaaaaattcgcgtcccgccaggtccaggtaaacgctgggttcgtccaggatcatcagctccgggttcgtcatcagcgcccgtgcaatgagcaccttgacctgttctccggaagacatggccaccacgggcctgtccatcaaatgctgcgccttcagggatttcatgatcccggcggctttctcttcctcttccggcgtcggctcccgcagaaggccaatagtgccgtcagggccggaaagcaccatgtcgcgcccgttccaggcgccgtcctccagccatttgtgcatgaacgggctcacccacgcgatggacttgcgcagttccagcagattcacgtgcccgaaggtcttgcccagcacctgtactctggcgccgaagagaggccatgcaaaccccatcagcaccttgaccagcgtcgtctttccggcaccgttcgcgcccaggatgaagcagcgttctccgcgctgcacctgccaggaaatattgtgcaggatttcgtggccgcccaggtataccctggcattctccacattgacggccggcaaggaattgtccataaactgaaaaaatagcgggcttccgcggaaagcccgggagtgtccgggccgttcctccgggatacggcggaacggcccgtgatcaacgtaaaagaaaccttagtttctttcaaacaggctgcgaatcttggcgcccacgatttccaccgggtgctggcccagggcttcgcgcttggccttgaggttgggagcgcccttggcggcttcttccagccagtccttggcgaacttgccggattcaatgcgcttgagagattccttcatgcgttccttcacgtcggcgggcagaatctgcgggccgttgtagtactcgccgaattcagcggtgttggaaatcacggagttcatcttctggatgccgccgttgtaaatcaggtccacgatgagcttggcttcatgcacgcattcaaagtaggccatttccggcggataaccggcttccgtcagggtttcaaagccgtacttcatcaggtccaccaggccgccgcacagcacgttctgttcgccgaacaggtcttcgtacgtttcctgggccatggtgcattccagcacgccgccgcgggtcaggccctcagccttggccatggcgagagccacgtcgcgggccttgccggagggattctggtgcacggcgatgaggccggggcagccgaagccttcttcaaacacgcggcgcacttccgtgcccggtcccttgggagccaccatgatcacgtccacgtccgcgggggggacgatggtgttgaacacgtaggcaaagccgtgggagcagcaaagcgtcttgccggccttcaggtggggcttgatttcagcttcatacacggagccgtggctttcatccggcagcagaatgtggatgatgtccgccttgtccgctgcttccgctacggtcatcacctggaacccgtcctgggtggcggcgtcaaaagacttgccggggcgaacgccgataatcacgttcacaccggagtcacgcatgcaaagtgcctgggcgcggccctgggcgccatatccgatcacggcaacggtcttgccgttcaatgcgctgagatcagcggcgttgtcatgaataatatccattgttactccttctttaagtaattcatccaaacatccaatgtttggatgaatgagaacatagccatccgccgcccgattgcaagcgcttttcaacgaatggctgcgttttttaaattatgtgcatggagacgggcccgctggagggaagagcttgaaagcaggagaatgaagaaaggaaggagcccatgggggcgcttacgggaaattcctgacaagggccatgaaaccgctttacgaccgggcaaccttcatggatgaacctgttccggaatacagcggaggcattttttacaagggccggaaggcccttgttcccggcggatgcccagcgggaaacacggagaaaatacgccttcccccggactgggtaaaaacatccctgggaatgaaggcctcccggccttcactgccaagcgaagcggaggcgtttttccacaaaggagcttggctcttccataaagccgttatccctaccccgcactcccatttcaagaacagtatccctcacagatcccgcccaatgccattatccgtggaagccagggaattggagtaaatcagctgggaggtatcataccccagttcctccgcgcaatggagcattggctgaagctcttcatccctcaactgcggcgtccgggccagcagccacaggtaattcagggaaccgccggaaaccacggcgcggctgtaatcctcatccagaaaggccacttcataccggccgtacaccagcggcacgaagtacactttcaaatgattgggggcgtctcccaccacagccttcgcatgagcctccttccgttccccggtacggacgtcataaccgctgttggtaacggaaatggtaccgttctctccatggtcataccgggcaagcaccttgcgaagcccgcgctcaaaccagttttccaggcgcgcgatttcgtgccattcccccagataacgttccagattgaaatccggcatggggtcggttttgacggaatggccgtgaaacagggaagtaacgatggtctgtatgatactcatgatttgacagggaatgctttgttaaaaaaggtgcggatatccggatattgaaactcaaatccctcccgcatcagcgtctccggaatggcgcactgcccgttggtaatcacctgggaggcttcccccatcagcaggcgcaggacggcgtccggaacatggatggacaggcgggtgtggaaatgttctgcggcagccttgtagaattcccggttggtggtgcgttccggagccgttacattgaccgggccggaaatgtcctccttccccatgatgaaaatcagggcatccaccaggtcctccagcgccacccaggaaaagggatggtccgggttccctaccgccgccgtgatgccgaaccgggccgggcgcaccattctggggagcgctcctccatccggggaaagaactacgccaaaccgggtgcggaccagccgcacggagtcgttcaccagttccgcctccttttcccaggccacgcacaattccgccagaaaggaatccgccgccggatcgtcctgttcgccatggcagccgccggccgggctgtaatacccgacggcggaagtggaaatcatcacttccggaggttcgtgcaggcgattgaccgcttccaccagcttgcgggtggtcataatgcggctctccaccagttcctgcttgtaagcgtccgtccaccgccggtcgatgggcgccccggccagattgatgacagcgcggcatcccgccagagcctccgccaggcaatccacgctgtcctgcgtgaacagatagcgccacaaaggcgtcacctgatgcccgaacaccgcaagacggctggacaagtggctgcctataaatccgctggaacccgtaatggctacattcatgactgtaaatcagatggcggcccgtctccgcggagggcgctccggaacactgctggaaatatcccgcacgggaacggacaacctttaccggataagacatttccacctctctcctccgttcagcggaggacatactttgccgccttccttttcctgaaacgcgctcttcaccggaatttcccctgcggccggacggaaaaagagaacttgattttcaccgggtgccttttatgttggaaaccgtcacaaccactactctctcatgaataaaactcccagaactttcctttccctgctcattcccgccattgtcatcattgctgcgggtgcggcggccttctccttttacaatttcagcaacaagcgcgtgctgtccggttttgccggctacgtctattccaagcccattttcggccagaacaagtttgagggcatcctgatcgggccatcctccacgggatgggtatggcggagggaagtcagcaaggtttccatcacgccggataccacggtggaggaattcgatgcccgcaacggcggcgccatcctgggcaaggacaaactgcccatctcctgcaaggcctccctggtttaccgcctggacccgtcccgagtgaaggaattcatggaggattacggcggcatcgcgcagagctccggccgcaatgacgacgaagtggcggacgagatcatgctctttgcctacaagaatttcatccagcagcccttccgcaccgccgtacgggcggaattgagccagtacaacgccctggacgcctccggcagcctgcaaaagatttccgacaacgtttacacgcagttgagcaagcgactggacggcacccccttcatcgtggattccgtagccgtgggagaaaccaatcctccgcaggccatcattgaatccgtcgtgaagaaagtgcagaccacccaggaaaatgaacggaaggagacggagctgcaaatcgcccggaaggacatcgccatccagcgcgcacgcggggaggcggaaggagccatgaaaatggaaatagcgcgccaggaagcgaacgctaatctggcacgcggcgaggcggaagccaaagtcatcgtcatgcaggggaaagcgcgcgcggaagcttccctggaagccgccaaagcggaagcggcggggctggcactgaaggaaaaggccatggggccgaacgtgctccgcgccaaggcctttgaaaacatgctgaacaatgccaaggtctaccttccctccggcaaggatgcggaagggaacatgtccgtgctgggcatcctcaatctggacagggagtccgccaaataagcctcgcttcccccggcgctgccggaacggcggcagtcatgaagcggcgggaccggagatggaaaaaccgccctcctcctcttccccggcaaattcatgcttgagcatgaacaagccgcacatgttcatcagcacgcaggcgacatacagcttcacgggcgccatggcaaaatccatcagaaacccggaaggaaggctcagaatcacccatccccccgcgcagatggcgccgagcagcccggcatagggaagaggcgcctttctgacaagcccccaccagcccgcgggagaaagcccggaaaaactttccagcacggaagtcctcatgaaaacgcccgggaaataagctgcacccgccgcaatgaacagccagataagggggctgtccatgtcccagtccatcactcccagataaatgaccagaggcaggaaggagactgccatgcacatcaccagccggatgtaaggcatcatcagatcgtccagccattcctccaactccggaaagaggcagatttcctcctcccccatggcggaccgctgcaccatcttcatgaaaaaggcgcacatgaacggttgcaggaaacaaaaaatggcaatccagccgatgaggggcgcccaggccgccaggaacatggcccatacaatgaggacggcaaaggcaaaaaccatgggccttccacggaaaggatagcccagagaagagagatagtcggacattcaaaaatgttagagcagtccattcacaccgtcaacgccttattgccgctctaacaaaatagttcctccttgtttcaggaataaaaattctccacggtccggacgacgcgctccatgtcctgcggcccgcagcgctggtctacgggaagcggcagaagatgcagcgccagcttccgttccaggctgccctccggggcctgttccagcacctccggccacagcaggggaaccaggatgcgttcatcaatcagcacattcctcagctcaggaaaagccgtccaaaacggatagcaaaacggagcggacaaggaatccggctccacggaaaggcggttcagatgtcccagcctttcgtgcagaaacaggaaattgtccatgcggcgcaatcgcgcctgctcgtaatcaattccgcgcattaaccgctccgtcagacgggacatcttacgcaggggggcgttttccagcctccgttcgttccgtccgcaggcggcggaagccctttccggcccatgttccaggcatcccagcagaaaggcggcatccggcagggactcatcccgttcctccggttccggcagcggctggtctgcgtccatgacggcgattcccccgtccggaaggccggaaaatttgcgcggactgtacagggacgccacgccgggacgggcgggagaatacaaggccagcgcattgtccacaaccagcctgccgccataccgggaggccagccggtccacgtacttctccttgatgccgaagtagtttgtatacagcaggaattccccttcctccagctccggcaattcttccggttccagatgcccgtcaatgcggtaaggaataacgggaatgtgaagccgttccatcggttccagcaccgttccacatgtataaaggggcacgtggacacggcgcacgtcccccaggcggcgcaggatatactccaaagcgcgcctgccggaattcacggccacgctccggccgggatgccactgagggaaattgccgtattccggcaattccaggccgaaaaagccgccgatgtccgtccgctcttccatacgccacgcaatactacatctccctttcaaaggaaagcgccatctggaacggcaccctttcccgtaccagggaaccaaccgaacacgactggaaggaaaaaatcaacaaggaatgaatctggagcatccgggagaaagccgccggacagcccggcagcaagcccctccacacaatctcctgatcccttcccctcattttgaacgaacaacactgaaataaaatcctgaccttatgccttcatcatttacactccacagcaaggacctgggcggcgttgccacgcctgtccaccggcacaccagcataggcggcggcaatcagtcccccgagctcttctggaccaatccgccggaaggaacaaaaagctttgccgttaccatccacgaccgggacgcgcctaccggaagcggattctggcactggctggccgtcaacattcccgcctccgtcagggaactgcacgcggatgccggaaatccggccacccgcctgatgccggagcaggcggtccaaattcgcaatgacgccggattcgcgggctacagcggcagcttccctcccccgggccacgggtggcacctgtacctggtcaccgtttatgcgctggatacggcatccctgcccgtggctccggataccccggccgcccaggtaggcttccagctctggcagcacacgctggaaaaagcgtccctcgtcttttacgatcaggtaccggcaaaataacctgtaccggagaaaatcaccgtttctaccgggcttccggcttggccgcctttccggcgcccatccaggttgcccggtgccacagcccttccagcaccccgtaacggtgccgctccagccaccagcggcagaaccatatctgcccggccatggcggcgcagccgattgcaaagctggccagatacccgcaagaaggagccagccccagcgcgtacgggaagaaaatcagggagcctatcagggactgggagacatagttggtcaggctcatgcgtccataagtcagcagaggaaccgtcactttcctgaaatattccagccggtacagcaggacgaacccggctacccacacgccggtaaagcagacattgtgccacatggtgaacacggtgtgcaccggggcaggcaaatccggcagggacatcaccacataaaacgccacggctccggccagggaaagaagcatcccccgggtccagaacatggcattccggtcattctgcaaaaagaaatcctgccgccccagcacgaaccccagcagaaacagtcccggagcctgcatcaggcgccccgcctcaatgccccaggccaggcttgcccactgccccaccgtcaggttctcccacgccatcagccagaaattgcccgtatccacagccgttttcagggcagcgtacgattccgcaacagccagggagggaggcgcccagcccggattcacccactgcgctgccgcatacgcccattccaggggctgggccaggaagaacagggataataccaccagagtggaagtcttcagccggcggcacggcaccaggagcagccctgcgatggcgaaggtcagcagcacgtcgccccccggaaaaaacaccgcattcatgcaggcgaacaccgccagcaggcacatgcgccagacaaacctgcccgcaaagtcacggcccttccgggcctggttgcggtactggatggcaaaggtgaacccgaacaacagggcgaaaatggtgtaggactttccggcaaacaggaagaaaaaagcgtccttgaactgctggttggccgcctccatcaccggggaggaagccacgggataggaattgtagatgaaatgttccaggaaatgcagcagcatgattgccatcacggcaaaaccgcgcagggcgtccaccacataaatgcgtttgctgtcgggagagagtaagggttccatggctatgataatacggcgtacggaacgcctctgtttcaacagaagtcacctatacaccatgaaaaagccttttacagccaaaatcgcagccggagcatccttccggaaaatttattccatgccgggcggcggacgcgtccccccggccatggttgctgcgcggtcaaggacatatccgtgccatccctgcccttccacattccggaaagctcaataccgcttcccagggatgagccggagaacgatcttccccctgcccccgcagacaatgaaacccggtgcaggtaccccggggctccccggaaacgggaacacctcagcacaaacggccgatatctgccatcaactcccgcacgtcttcctcccgcgtggcccagctcgtgcagaaacgcacggtactgtgggaggggttctcccggcgcaggtaggcaaagccgtacttcttccccaactcatccaggacggaatcgggcatcgtgacgaactgctggttcgtcccgctggcaacggggagcgccagtcccctggcgcggcagaaatcccggagcatcacggccagacggtccgcgtgggcccccaggcggaaataaaggccgtcacggaacagctccagaaactggatgcccagaagcctccctttcgcgagccggccgcccttctgcttggcaatgtagcggaaatcctccttcagggcatcatggcgcagcaccagggcttccccgaacagggcgccgaccttcgtgccgccgatgtaaaaggcgtcgcagagggaggcaattgccggcagatccagatcattgccttcatcgcacaagccgtagccgaggcgcgcgccgtccatatacaggtacagcccccggcggcggcagacttcggaaatctcctgaagttccctccgggaataaatggtccccagctccgtcggctgggaaatataaaccatccggggctgaggcatatgttcatgggtctcgtcgtcccaatgggcgtgccacgcatcctcaatctgccgggccgtcagcttcccgtccagggatggaatggcggaaaccttgtggccgcacgcctccaccgctcccgactcatggacgttgatatggcccgcatccgcgcacagcacgcattgatgggggcgcaaggccgccgcaatcaccgtgaaattggtctgggttcctccaatgaggaaatgaatgtccaggtccgttctgccgcataaattagcgatcagctcccgggcccggtcgcaatagggggcctccccatacccggctgtctgttccatattcgtttccgccagcctgcggagaatatccgcatgggcgccttcactgtagtcacagttgaaaagaatcattgccttcctgaaaaacgcggggactgtagcccggggcgcctgtcatgtaaaggaagatgaagaatacctccggaacaggggcaagccacgccgcggttccggcggagggcggcagggcgcaagcggtttcacggcacagatgccggaggctcagccatcctccgctccgcccaggccgcttattccggcagcttcacccttttcagcgtaaactccatcttggaaatatccccgctggcttcctgaatgcgggaattggtgaaatacaggtacccgtcatgaatgctgaacgtgtccggccagctgattccgtccccggaagccagaaccttgatctccttgcggtccggagtgagatagacaatgcggttctcttccaggtcccccatgtaaaggttgccccggtcgtccatgatcatgccgtccggggaaggcgttttcatggaaaaaatcctgctttcatccaccttccggtcaattagttggcgggtgggtattccatacagggttttacccgtcagggcgtggaaatacaggatgccgttcttccggtccagggcaatcccgtcggcatggacttttccgtcatgcctcttcccctcaacggtgacatggtcctgctccgccgtcgtataggggtgatggtccagcattcggtaattctctccgctcttcatgtccaggacgatcaaccccggatcgttggaatccgtaaaataaattttgccatgctcacggtccacgcgcaggtcattaacataggaatccggactggtggattccgccaggggatacttcctgacaagcttgtccgtattgaggtcatacacgtacaatgcaggaacggcgacagtcttgccgatcatgggattcttcgtatcaatcacataaagcctgtctccgtccgcaaccacggactgcacgcacacaaacgcatctccgtctccgggcattcccttctcccaccggttggttttctcatccggataaggggtatagctgccgtccttgcggacctccgccacggagcacggaatctgctcccgccaacggggaaaattgacaaaaatcctgcccttgtccgacaccgtcactccggtcacctgcgcccccttgaacgaggcgacgtcctcaatcttcgcctccgcacgcccggccggagcaaacgcgcacatgaggaataaaacaacggaagcggaaaagaaaaaacatttaacggggaacatgggattttaatctctctattgactgcaagacaatactgaggcgctccgcgttcattccccgcgggcgcagctttcctcgcagcaccactcccgtcatttgcaaaaaaatgccccgttttcccgcacctgatgccattttgaatggaaaccgttatccccaagaaaccagtaaggccgcgcaagcagttaacttgcacggccttgtttggtgcgcccgaaaggactcgaaccttcacgggggaacccccactagaacctgaatctagcgcgtctaccaattccgccacgagcgcacatggtttggtaagaacgggggttattatgcacagcggcggcggattggcaactattttcctgcacatgaaagaaaatattttccagggcctctttccccccggcaaccgggacggcatggaaacgatataagggcttctcaaatccttccgtatgcagtagtctcccctcagcatcagaggcaccaccatttcaggcttgtgaatgagacgagggaaaaaccgctattgaaccgttttgaggtcatggaaatggggttcggcctgtgtacgctggccgccctgatgtggctgctgtggtggaacggtttcggagagattcatgaggaccagctttccctgcgctatttccgtgagattctctccctgctggtgctcggccagctcacgggcgtcctcggcattctgcgggaaaagtggcttgccaagtccatccggaacccgcggtggatggaactggggctgggcctccttatcctggtcatgctggccgggaattttttcaattccacctttatttccagaatagagcttcagaatattttccgcgccctctgcctctgctacggagcggctcccctgctgaacctgaaggagtattttttccgcctggcccgccggaaccgggggttccacctgccgcgcatccgcccggccctgcttttcctgctcacgctgattgccttcattacgctggggggaaccctcctcatgtcgcccggcgctaccaaggacggcatcattctttcccctacggacgcctatttcatcagcaccagcgccgtctgcgtcacggggctggtgcccctgaacgtccatgagcatttcaccaattacgggcagaccattttgctggtgcttttccaggtaggcgctttcggcatcatgacgttcacttatttcgtctccctgatggtgggccagggcctgagcctgcgttccaaggtgaccatcagcaacctgctggatgaagagggcatcgcccaggtggaccggttcatcaagaacatcattgccgtcacgttcggggtggaggcgctgggagccatagccctttatttttcctggaggaacgtaccggggctggagggggacacgctctggtggtacgccgtgttccattccgtttccggcttctgcaacgcaggattcagcctgtttgcggacaacctggctacgccggacgtagcctacaatatgggcggccagattaccatcatggtgatggtgctctgcggcagcctggggtttgcgatgtatctggagatcgtccgccgcgccagggtggctctgggctgggacagccggaacactatcagccgccactggtccacgtacagctggctggtcgtgcgcatgaccgccgcgctggtgctgggcggcggattgatcctgttcctgatcaaggcgattgacggcagcctgttcacttctgccgatccctggtactggattctgtgggaaagcctgttcaacgccacagcgcgcaccgccgggttcaatatttcagacatggcgctcaacagcgtcccgtacgccctgttcctgggggcgctcatgttcatcggcggcaatcccggttccacgacggggggcgtccataccaccgcgttcgccgtttcctgcggggaggtggcgcgcatcttgcagggcaagcaggacgtggtgatgcacaagcgccggattgcccgcagcgtggtggagcgcgccgtcatcaccgttatcctggccggggcctgggtaggcatgatgaccacggtcatgtgttttgcggaaccgggactgagcctggaacgcctgtttttcgaggtggtcagctccttcgccacggtaggtttttcctggaacgtcacgccggaactcagcgatgcgggcaaatggattatcgtgtttaacatgatcgtgggccgcgtgggcatggtggcattcgtgctggcgttcatgaaacagcccagcaagtctccactgcggtatccggaaaccaggcttcccctcagttgacccgcggtttttctccgtttttcatgacatgcatggagacaaacgcatttctttcttgcatgaaaacggtttgagtcaagaatgccggacctttagtgcctgctcccggcagatcatgcccgcgggacgcccttgttatgaataatccctcctttatttcctatcaaaagatatggctcatgtcgtatcccctcatgatcagcctgatcattgagcacatgatcggcctgacggacgccattttcctgggccgcgtgggggatgtggcgctgggagcgtgcgcactgggcggcgtgtattacatggccatgttcatgctggctttcggcttcggattcggggcgcagatcatcattgcgcgccgcaacggggaacgccgttacaaccgcattggacccaccatgatccagggttgttatttcatgctgaccctggcggtggttctgttcaccgcctcccaatatttttcccccatcatcctgcgggatatcatcgagtccccgcaggtttacgacgccacggcggattacctgcactggcgcacctacggcatctttttctccttcctctgcgtgatgttccgcgcctattacgtggggattacccaaacgaagattctgacgatcaattccgtcgtgatgctcctgagcaacgtggtgctgaattactgcctcattttcgggaaaggcggctttcccgtcatgggcatcgccggggcggccattgcctccagcgtgtcggaggccgtttccctcctctttttcatcatttacacgggcacgacggcagacaagcggaagtacggcttccgccgggcgttcacgttccgtccccatctgctgaaaggcatgctgtccatttccggctggaccatggtgcagtccttcatttccgtctccatctggttcatctttttcctggcgattgaacatctgggggaacgccccctggccgtgaccaacatcgtgcgcaatatttccgcgctgctcatcatggtgatcagcgccttcgccaccacggcgggggccctcatcagcaaccagatcggcgcgggggaacagcgctacctgttcaggacctgcgggatgacgcttaacctgacgtatgccatcctggttccgctgcttgtcatcctgtgcctgttcccggaacccgttctcagagttttcacggataatccgtccctgattgccgccagcattaattccgtttatgtgatgtccacctccaccctgatcatggctccggcattcatcctgtttaatgccgtatccggcacgggcaacacgaaggcgggcttcatcatggagatgatttccctgactgtttacaccgccgccgtttattacatcgtcatcaggctcaagcctgacgtggctctctgctggttctccgaacacgtttacggcattgtcctgatagcactggcgtggtggtacctgaagagcggaaaatggcgcggcaagaaggtataaacaggaatacggcaaaaacgcaacccttccctgcttttttccaccgtaaaaggcggcggcaccatccatgcccatgacgttccttgatgagagcggcatggatggaggagtgtccatcccgccccaatcaagcaaaccgggttcaacccgtttccctcatccatgtcccggataaaaaagtccggccattcacaaacgccggaagaatagaccgattcgctcccattcaggaagaacctttaagcgtgaaacagggattttccattctgcaaatcaggggaaaacgacgccagcgcatttccggaacggcctttcctaggagagcacctccacctttcagaagtctttcccaagggcataaaaaagccccgcggcacaagccgcagggcaaaaacggaacaggccgggattattcttcgccggaatcctcttcggaatcacggtcttcctccggagaggaagctttttcctgctgctggggggcggccttctggacgtgcttgcggcgggattcttccatcatgaagaattccgcgcaacggaaggcacggcgcgcggcttcacgcgccgtctggtcgtccatcagggcaagcccttcttcagatacttccgccaggaacattttccaggcgcgggaggccactttcttgccatccagctgcttgaaggaagcggagtcctgcatgggctggcggtcttcggagccgttgccctttttattgcggcggcggcgcttgcgcttgttgaaggaaccttcagaagctccgcccacggtttccggctgggcaaaggagtctccgccatgctgttcatggcgttcctgctgttccgggttgcggttggggcggaaggattcgcgcttaaccttgaccggagcggcagcctggggcctttgggaagcctcgggagcggtatttttttcaacgggagcggcgggagccggagtcacggaaggagcctgcgcttcagcggcgggggccttcttgtcagccgcctttttggcgggtttcacggtttttgccttggccgcggttttcggggcggacttgaccgttttgattttgggcgcttctacggaagcggcgtcagcagcgggcttcttttcagccgcggcggccttcttggtcgtagaggccgtctttttggcagccgttttgcgggcagccgtttttttggctgcggacgcttccggagcacctgtttctaatggtttttttgccataaaatttcaagtgaaagaaaggattatgaatcaattccggagattgtcgagatttatcacggagcctcatccggaagggccggcaaatctttcaaaagcgccttgtactttcccgaatcaaaggggcggccgcccaccaccatctcattaatggtgatggcaagggcctgcgccatcagttccagggcttcctgctcttccagtttttcccggcccgtcaggcgttccaggcaggccttgacataggcagtgtccggcgcttccagctgctcccgcacggcaggcaccagcgtttcaatcatttcatccggtatttccataagattttccttctgctgtttggattaccctaacgaagttcaggagaattttcccctgtccgcccctgaattgcgctgccaggatgccggctccgtaaaggtaatattaatttttcaataatttgattccaatgatcaatcctcgatttttgcctttaattcttctttcaattcagagggaatgtcattccagtgcaagttcagcaacgccccttccagggaatacaggtaataacatacaggcaccgttttgtcaggatagttaccgcgtatttttttaaatgcctcaacggaagtcattttctcaagatcagccaaggtgaacacaccgatttcattaaggcatttttttatagccgccccgatgttttttgcctgccttaaatcgcttgttatcttgaatttcattttcattgcggcttatttaccgtcatctcactttcgattccctcccggtttttttatcgcaacatggctgatgttccgggttgctgctccgttccatttccacagggatgcctgctgttttccctacatggcgcccatgcggctgcggatgacggattgcagctccgtttcaaattccctcaggtcatccgccgtgggttccccgagcgtggcgtcccagttgatgcggcccgttcggtcgatgtcccacacgccctgggctccgctcctgaacagaatcttgccggccatcagggcatggggaggcgttatctcatccacggttacctgggttttacccagcagagaggcggggggagccgccgctccggaaagctccgccggctgctcggcctggggttccggttccggctgcctgatttgaatatccaggtcctgaagcaggaacctggtatccatgaatgtcagcttgatgcccaggtcttcatgcagcctcttctggatggcgtttaaatccagcccttcttccgcccagtcccggatggaccggacctgctccggagataattgatcagggttaatcatgatatgtatttgagttagaatgatgcctttttgttcgcggccagccatgcattccagcacggaatgaacgcgggggagaagtcctgcgggcggcgctccacccatgcctggatttgttccggcgtaaaccactgcacactgtccacttccgccgcgggaaaacgaactttcccggagtaccgcccttcatagagcgcgatgaattcccagccgttgttttcacctgcgtcaaagtccgcaattttccgcagctcgcagccggagatgcccagttcctcctccagctcccgcgccgcggcctccccatagctttccccggcatccagatgcccggcagcggaggaatcccacttgcccggctgcctgtccttccacagcgatcttttctggaggagcacagccccatgcttgttgaccaggaacatgtgcacggcgcggtggagaaggttcccttcatggatttcccggcgcgtgccctgccccgtcatctggttgagttcgtccaccacgtcaaacaattcgtccccgctctgcgccacgtccttgagggggttggcgtcgtaagcccgcgccagctccacccactgggccaaattcagttcctcggccctggcggaaggggaaagtcccagggaggcggctacttcctcccacggaggggacgccggaagctgttttttcaactgcttgcgcctctgggagaaagccttgcgcatcagctcgtccatcagccggtcgtcatacgggggcaggtcgcggacggggcgcggcgtgagcagcatcacggtggaatcaatccggggccggggatggaacgcttccgggggaatagttttcagggcgcggggaatccagtttttctggatgcgcagggacaacagcccgaaggcgtcgtcatccggagtcgccagaatgcggtcgatgaattccttctggagcatcaccacggcccgttccacggcgctgggcctggacaggaagttctggagaatggcgcctcccgcggaatagggaaggttgcccaggaacttgacgggagcttccgcaaacaatccccgcgggtcccaggacgcgccgtccgcatggtgaacctccacatgggggtctccggcccagcgctctttctggtattccgccaggcgggagtcgaattccaccagaatcaatttgcggcaaagaggggcggcgtgctccgtcagggctccggttccgggccctacttccaccacgcagtcctgtggctgaatttcaagctggcccacaatccagcgcgccacattttcatccgtcaggaagttctgtcccagggatttgctggggcgcacttcgtgatcttccagaacattcctgatctcggacggtttcataataaggggatgttctcaaaaatgcacatcaggagccagtaaaaagcggggcagtttccggcatgaaaacggaggcggcccgcacgccgccagaggaaagcgcccgggccatgcaaaggagccttgccccttgcgcaccggaacgggagcgttgccgccccatgcgtccggcatcctgcgcatgagcggcggcagacgtatcacaaattgacaaaaaggggaaaacatgtcacttttacaggtgtccggaacagtgacgcagcctgccgcgaaccggaagtttccgcaggttccggcgcgtacggacacccttgccggagaaaaggttgaaccggcccaacagcaatttgataagatcatgaaagtacttgtaaccggcggcgccggatatattggttcccacacggtgcgccagctcgtcaaaatcggcgctgacgtgactgtgctggacaacatggtgtacggccacatcggagccctcgtggatccggaggtgaaactggtcaagggagacctgggagacgcctccatcgtgtatcctctcctgatgaagggcggctttgacgccgtgattcactttgccgccttcatcaacgtaggcgagtccgtccaggaccccctcaagtactacatgaacaacatcgcccgtcccctcgtcctcctgggagccatgcaggccgccggcgtcaagcgcttcgtcttctcttccacctgcgccacgtacggcgtccccacccagattccaatcccggaaacggaaaagcaggatcccatcaatccttacggcagctccaagtacatgctggaaaaggtctgcaaggattgcgaccgcgcctggggcctcaagagcgttttcctgcgctatttcaatgcctccggctgcagcgaggacggcctgatcggtgaagaccacgacccggaaacccacctcatccccaacatcctgctcacgctgaccggggaaaaggaatacatcgaagtcttcggcacggattacgatacgccggacggcacctgcatccgcgactacatccacgtcaacgacctggcggacgcccacctgagagcggtggactacctgatgaagggcggctccacggaatgcttcaatctgggaaccggcctggggctttccgtccgggaaatcctggaaacggctgaaaaagtcaccggcaggaaaatccccgtccgctacggtccgcgccgcgaaggcgacccgccccgcctgattgccaatcccaagaaggccagggaaatcctcggctgggaagcccggtgcaaggacgccggagccatcgtggaaacagcctggaagtggatgaccggtccgcgccagggccactattgattccctttcctgccttaaaggatcattccctttccgccctgccatgcagcccatggcagggcttttttcgcaaaacgaacggcatccggctttttccatggtcagcctgtgcagggaaaacacgcgcctgaacatgcgggacattccttccgtattccccagccttcttcatccgcacccgggacagcccatgctccggcccgcaaacaaaaccaggaaacgctcctccccagcccgtacgactgccataaaactcgtaaaccgctcaccataaaacaccgttttattcatatctggtcatcatgcagaccagaggaatattaacatctttgcactcgccccaaccggaaaaaacgttatattattctcaggaacctcccttactgcatgagcctgcacattgaaagtaccgaagacgcccttgcggaattgaagaaacagcgcgtcaagacgctgaccgccgccatttccgtctccttcctcggcgtcgccctcatgggccttctcctttatttggtgcatatcatcgtcgccattccggaagatccccccatggtggcctatgccacccaggaaggcgacaatccggacatcgacaccccggaagtcacccagaccacccagcgccccagcagttcttccactgccgcgcaggtgaaagtgattgccgccgtagccacggcggacgtcgcggtggtcaatccggacattgaagtggacgtcccctcggaagagctttccatgggcatcgacatcggcgacggcttcgggaccggcacgggcgacggggacgggggcggcattcccggcatcatctccaagcgctgcgacctgaacgaccgcatgaagcgcatcacggaaaacgggggcactccccagtgcgaggaagccgtggtcaaatccctcaagtggctccagaagcagcagaacaaggacggctcctggggcgggactccccagaattacaagtgcgccatgacgggcctggccctgctctcctacctggcccactgcgagacccctctttcggaagacttcggggagaccgtcctgaagggcatctccttcctcgtggaccagggcgtgaagaatcccgtcatttccctggtgccccagagaaacgaggtcagctatgaccacgccgtagccacctacgccctgtgcgaggcctacaccttctgcaagcagatggacattccctccatcgccaacctggaaaaagtcgtcatcaaggccgtggacaagattctggacaaccagaacgtcgatggcggctgggcctacaattacaacacgaaggcaggcgcccacacggacctttccgtcaccggctggaacgtgcaggccctgaaggccgcggagcacggcggcatccgccccaccaagggggaaatacgcacggccctgcgcaaggcggcctcctattgccgcaagtgcggcaagcccgacggcctgttcacctacatgcaggaaggccgggaagacgcctcggcccgcccctccctggtgggcgtgggcgtgctttccctgcaaatgtgcggcaacggctcggacagcacggcgcgcaaggggctggactggatgctcaagaataccaaccagccgttcaactggaaggccaacaacacttcctccaacctctaccagcattactacggggtgcaggcggccatgaaccgcggcggcgacgtctggaaggcttacaacagggccttccgtgattccaccctcggcgcccaggcctccgacgggagctttgccccgaacggcttccccgggccggggggcctcgtgaacaccaacggaggcagcatcaacgacaagatttaccgccaatgcctcgccacgctgatgctggaggtgtattaccgcttcctccccgggacgggagaaggcaccaagaattcctaatctgattgacagaccggcgcgtctggttttagtatgctgccagcctcgtaaacaggcaggccagcagcatctacctgcaaccgggcaattctccccatttttcaaggatgcgggagcttttgccgttgcaccaaccagacacgtccctctatgagtctccacattgaaagtaccgaagacgcccttgcggaattgaagaaacagcgcgtcaagacgctgaccgccgccatttccgtctccttcctcggcgtcgccctcatgggccttctcctttatttggtgcatatcatcgtcgccattccggaagatccccccatggtggcctatgccacccaggaaggcgacaatccggacatcgacaccccggaagtcacccagaccacccagcgccccagcagttcttccactgccgcgcaggtgaaagtgattgccgccgtagccacggcggacgtcgcggtggtcaacccggacattgaagtggacgtcccctcggaagagctttccatgggcatcgacatcggcgacggcttcgggaccggcacgggcgacggggacgggggcggcattcccggcattctttccaagcgctgcgacctgaacgaccgcatgaagcgcatcgcggaaaacggcggcaccccgcagtgcgaggaagccgtggtcaagtccctccgctggcttaaaaaacagcagaacggcaatggctcctggggtgaaggccagttccgcgcctccatgaccggcatctccctgctggcctacctggcccactgcgagacccccctttccgaggaattcggggaaaacgtcctgaagggcatctccttcctggtagacctgggaatgaaaaatcccgtcatctcggaacagcccgccttgaaggaaatctgctatgaccacgccgtagccacctacgccctgtgcgaggcctataccttctgcaagcagatggacattccctccatcgccaatctggaaaaagtcgtcatcaaggccgtggacaggatcattgacgcccagtgccccaacggaggctgggcctacagctacaacaacaagatcaatccggacatcgacctttccgtcaccggctggaacgtgcaggccctgaaggccgcggagcacggcggcatcaagcccaccaagggggacatccgctccacgctgcgcaaggcctcaagctacgtgcgcaagaatgtgatgccggacggcaagttcgcctacaaggaaaacggcaacatgccccgctcctccctggtaggcgtgggcgtgctttccctgcaaatgacgggcaacggttctgacagcgccgcccgcaaagggctggactggatcaagaacaacgtcaagaccctccagtggggccagggcagcggcacggaaaacgtcaagagcaacctttacatgcactactactgcgtgcaggcggccatgaaccgcggcggagacgtctggacctcctacaacaaagcgttccgggacgccgtgctcagcggccagaatgcggacggcagcttccggaagaacgatgtgggttacgtttccggcatgaccggcaagtctgaaaacatctaccgccagtgcctggctacgctgatgctggaaacctattaccgcttcctgcccggtacgggtgaaggcaccaagaattcctgacgaaattcaccggctttttcgcagctctctttccttcccgggaaagggggcttttcatatccctcgcgcggaacgggaggccgcttttcttccgccaggggtatttccaagccttcttaagtaacattttaataacaacatgctaaatataagtatattataaattttaaacttgtacctgcgcactcttggggagatggtgaaatcctaatcaaaccccattccttccatgagcctgcatattgaaagtacagaagaagcccttgcggcactgaaacaacagcgcgttaaaaacctggccgcggcggtctccgtttccgccctcggcgtcgccatgacgggcctcctgctctacctggcaaatatcatcacgttccttccggaaccgccttccatcattacctatccattggaaaaccagggaccggaggaacccgacacacccgaactcgtcaggaaagccacacgcccttccaattcacctgccggccagcaggtgaaagtcattgcctccagcacccccctgcatattgccgtgcccattccggatttggaacaggatgctcccacggaagagtttttcacgggtattgaaatcggagacggaatcgcgttcgacgacggagaaggcccgggatgggacaaaccggatacagacgtcctttccaagcgctgcgacctgaacgaccgcatgaagcgcatcacggaaaacggaggcaccccgcagtgcgaggaagccgtggtcaaatccctcaagtggctccagaagcagcagaacagggacggctcctggggggccggcccccagaattacaagtgcgccatgaccgggctctccctgctctcctatctggcccactgcgaaacacctctttccgaggacttcggcgatactgtcctgaagggcatctccttcctggtggaccagggaatgaaatcccccgtcatctccctggtgccgcaaatgaacgaggtcagctatgaccacgccatcgccacctatgccctgtgcgaggcctacaccttctgcaagcagatggacattccctccatcgccaacctggagcaagtcgtcaccaaggccgtggaccagattatgaaggggcagaatgccaacggcggctgggcctacaattacaacacccagcccggagcccacacggacctttccgtcaccggctggaacgtgcaggccctgaaggcagccgaacacggcggcatcaaaccttccaggggagagatacgcgcggccctgcgcaaggcggccatgtactgccgcaaaaccgcccttccggacggcctcttttcctaccaggaaaacggccgggaaccacgggcctccctggtgggcgtgggcgtgctttccctgcaaatgtgcggcagcggctcggacagcacggcgcgcagggggctggactggatgctcaagcataccaaccagccgttcaactggaaggccaacaacacttcctccaacctctaccagcattactacggggtgcaggcggccatgaaccgcggcggcgacgtctggaaggcttacaacagggccttccgtgattccaccctcggcgcccaggcctccgacgggagctttatgcccaacggcttcggaggtcccggcggagtggtgcagaccagccagaaccggcatgccaacgatagaatttaccgccagtgcctggctacgctgatgctggaggtgtattaccgcttcctccccggcacgggggaaggcgccaggaatttctgaaccgcacggcgctccctccacacaacgggaagagagccgccggaggcaggccccgcacacggggaatacgccttcttccggcggcgcgcatgttaaatcctgacttgaccgcggcgtcttctcttgttattcatacggtttccattttccaacgacgtgaataacaattcttccattcttttcggcctttttgacgaatttctttggatccggtgctccggacgcggaagtttcgccaacagcccgaccgtcaaatccctgggggatgattacatcgcttccggaggacgcctgatcgtcattgacctggaaacctgctccggcattgattccaccttcatgggcactcttgcgggactgtcgcgccggctgctgcccatcggcggctccgtccagatcgcctctcccagcgaacgctgcctgagcgcgctggaaagcctgggactggacgccctgctcagcattgagccgcccacagccccctggagggggaaagtggaccagatacgcgccagcctgggctcggagaacgctcccaccgttcatctggatgccaaggaccagactctgcacgttctcaactcccatctgaccctgagcgaattgagcgaagagaacgaagaaaaattccgcaacgtgaccgactgcctgaaggaagaactggaacggcagaaggataaataaccttccccctatccaacatggacatgcgctccatggcctccctgtacggagacgcccgttccgcagcaatggaggaaggggaaggcgccgtcagggaacccgccttttccctccctgccgggcttccggacgagagaacgctccagcttctcctgctggaaggcgcatttggaacctcctttacggatgacctgggcagggaggtccgcattctggacttcggtgactggaacaaatccgccggaccggattttctaaacgccaggatccgcatcaacggcgttccgcaggcgggagacattgaactggaccccgctccggaagactgggaacgccacgggcacggctccaacccggcattcagcggcgtcatcctgcatctcgcctgcgcgcccagccgcagggaatggttcacccgcaacgccaggcacgagcgcatccccctggccgtcattcctcccgctgcgctggcgcgggcaaaaacggccccttccggcaatgccccggtgcgccactgccgccacgccgacctgttaacctccatgcctccggagcttctggaaaccctccttgagtcggcagcggcctaccggttccggaacaagcaccgccgccatgcggaacgcgccaaatacgcaggagaagagcaaaccctttttgaaagcctggcggaaacgctgggctaccatgccaacaaggccgccatgctgcacctggctttgcgcgcccccctgcgcgccatccgggaatgcccggaggccctcctcttcggcacggcgggattcctgctccccgtcctgccggattcctgcacggcggaagccgtggctcatcataaaaaactctggacccaatggtggcccctgcgggaacagtttgaactggcgccggagcgctccttcccctggacgttctccggcagcaggccggccaaccatccgcagaggcgcgcgggggcgctggccgtcatcgcagcggattttgccacgttcaagcgtctttgccattccggccctacggaagaactggcggactatctttcctccctcaggcacccttactggagcacccatgtgacgctgccttccgcaccgtccccccgccccatggccctgatgggccgggacagaattctggactttaccgtcaaccaccttctcccggcgaaaggagacgaacatgcgtggctgcattacctctccctccgggccggacaggcgggaacaaaagcgctctccgtccaccaatccctgctgggcggcaggccggacgcgaaagcctttcttgcgaaggcgtggcaccaccaggccctgcttcaaattcacgaggacctgtgctccctccattcctgcaccgtctgctcgctgatcgggcgcatgggaaagaaatgagcgtcttgcgcctctttccataagcaggcatgccaattcctccggatattccccggaatgtctcccgccgcctttccgttaagagaaaaaatcctttctccggacagtactcatttccgtgcctttccgctcttttttgaaccaaaagccggtttcttcccgcagtgaagccggaaaaataaaaaacttccagcccccataaagagggagctggaagccatggtcattttcctgccggagttgaaaccgggtacggaatcgcctccttttacctggcagcagcctgcggagcttccgcaccgggtttcagcggcagggttttcatgcgggtcatctttccgttgacgcgcacgggcaacaccttgggctggtcggaatacagcttcacgttgctcaccttgccgttcttccaggagaagtccaccgtgacgttgccgcgggctttcagccccttcacggagccttcaggccacgcctccacaggggagggcatgatgtccaggccgccagcatgggattgcaccagcatttcacaaatgccgcccacaatcccgaagttgccgtccatctgcatgggcgggtgtgtggtcagcatgttcggcagggtgttgaatttcagaagtccctgcaccatttcatgagccttgttcccgtcgcccaggcgggcccacagggcggtgcgccacggccacgtccaggaacggcggctgtctccggtcgtgccgcgccattccagggagaggcgggcggcttccgccagcttgggcgtcttgagcttgctgatctggttgccggggaaaacggcaaagaggtgggacgtgtggcggtggtccgtcttggggatgcggtcaatcatccattcctgaaggttcccttccttgcctatcttgttgccggccagcctcttcagcttgccttccaggctcttggcccaggaggcgtccttgcccaggatgcgggcggccttgatggtgttggtgaagagttccgcgatgagctgctggtcgtgcatcacgccgtcttcacgcgggccgtgctcgggagaccagccgttgggggccaccagggtgccggcctttacgtcagccaggtccttcttctcctcttcgttcggatccttgccgttcgtcttgaagccttcgcccctggcgcccagctccttcaaatggtcttcccagaaatggcagatctccttcatcaggggataggcctgcttttccagatatttcctgtccccggtgaacgcgtaatgttcccagacatgcagcgcataccacgccgcgccgggaatgttccactgccagccgttgccgccgaagatgttctgggaggtacgcaccgtccagccgcgcacgggcttgccgtccttggtattgaaacccttgttggcctgggagacgtcccggcagccgggagccatcgcttccacgtaattgatcagcgcctcatggcattcggaaagattggcgggttccgcaccccagtacgccatctgcacgttgatgttgttatggtagtcacaggcccagggcggattgagataaacattccagagcccctggaggttggccggaagcgtgccgggccgggagctggacaggagcaggtaacggccatactggaacatggtttcctccagatcgggatcaaccggattcttcttataggcttccagccgctttggaataggcagtttggctacatccgcctccgtcttgccgaagttgaccttcacccggtcaaacatggacttgtactgggcgatgtgcgcctgtttcagggcggcataatccgcagaggccgccttggccgcataacggtccagctttttggcgggggcctctcccttccagtcctttttatagtccatcaggtaatccgtctccatggcgatgacgaccatgcaggaatccgcgttcttcacggaaattttatcgtccgcagtggaaagcgtaccgcctttgggacggatcaggacacggccttcataattcatgccgtttttcagggttcccttccaggtgatgacggggcccttggcggaaatagccgattcaagctggctgttgatggaaaaatccgcgctgaactggccgggcttgctggccttgtactccagcaccagcacattggcgggcgtgctggcgaacgcttcgcggtcatacgtcacgccgtccgccttgtaattcaccttgtggatgccgtcccgcaaatccagggcgcgcgtaaagtcttccacggaaacggaggctggctggtccccctttttaaaatctacgaataaatcgccgaaaggcaggtagttgccgaactggttcgtcccggcattgagcccgtaaccatacccgccgccgggattggggccgccggaccacaggctgatttcattcagggcgaaccgctcgcggttgggcgcgctgaaaatcatggcccccacgcggccgttgccgatgggatacccttccgcttcccaaacggcggaaggcttcttgtatttgccgaaattaccgtcggggttcttgtcctcctgcggataaacaactacggccggttcatcagaccagatcaggttggaggcggaaggcttgtccagggccccccaacccagagaaacggagctcaccgcaacggcagataaaaatagagattggagatgcatgctttaatgaggatgtcatatatttactgccgccgcaatctctatctttcagccttttcaacttaccctcacggcatgacgcacccctttccgccgttcttcctcctgacccggcgcctgttccgcaaatggtagcgcggacagtaaatttccttgtctttgaggggcgcgcgcctaccgtaggcaagcatgtttaaacgacttctctccgcatttttttccttcgcccttctcgggacggcttccggaatatcttctgccgaggtcaccgttccggacgttctgaaagaccggattgccctgaaaaaaacggcccagcagctcaacgtcgtttactttctgggcagtgacacggaacccgttccggattacgaacggcgcctcagcgaactgctgctttatctccagcagttttacggcagggaaatgcagcggcacggctacggcgcgcgctccttcggcctggacatcaaatcccccggccgcgtgaacatcattgaatacaaggccaagaacccggcggcgcactatccgtatgaaaacggcggcggctggaaggccgcgcaggagcttgaagaatttttcaaggccaatccggacaggaaaaaaagccagcacaccctggtcatcatgcctacctggaacgatgaaaagaacggccccgacaatcccggcggcgttcccttctacggcatgggccgcaattgctttgccctggattatccggcctttgacatcaagcacctgggccagaaaaccagggaagggcagctgctgaccaaatggtacggcggcctggcccacgagctgggccacggcctcaacctgccccataaccaccagaccgcctcggacggcaaaaagtacggcacggccctgatgggcgcgggaaactacacgttcggcaccagtcccaccttcctgacccccgccagctgcgccctgctggacgcctgtgaagtgttctccgtcactccggcacagaaattctatgaaggcaggccggaagtggaaatcaaggacacggccatttccttcaagggagaccagattctcatctccggaagctacaagagcccccagaccgtcaaggcgctgaacgtctacgtccaggacccgccctatgcggtcaaccaggactatgacgccgtttccttctcccagcgcctggggaaaaagagcggcaagttttccatgaagattgacaagaaggaactggatgggctgaccaacaacgaattccgcatttccctcatgttcatcctcgccaacgggctgcacatgcagaagcatttcacgttccactgggacgccctccaggattacagggacgaacccaaatcctgaaccggttcccctcccttggcggattgccgcggagacggcggcatccgcatcacgggaaagggcttattccttcaaactggtgcgccagccggaagcgtgctgataataataaaccgcctccttttccagctccttcatccgggcatccggcttcacaggctccccgtcacggaaaaactccgcgccgcgctgtggtttaagcaccaccatgtcccttcccttcaagtagccgatgtactggtaattgctcacgaaataccgggactggtaggagggtttcaaggcgtcctttccgtaaaacgccgcatcatacggccatttcagcaggccgagcagggtgggcagcacgtcaatctggctgacaggcgtctcaatccgttccggcttcagcagggccggggcgtagaaaatggagaaaatgcggtgcgtttccggattaagcgtctgtttcccggcgctgcccgcgccatggtccgccacaaacacgaacagcgtattctcaaaccacggtttgctcctggcctcctccacaaaggcccccacggcataatccgcgtacttgacggcgcccatgcgcccggtatgggaaggaatgtctatgcgcccttccggataggtataggggcggtggttggacgtggtgaacaccacctgtaaaaaaggagagccgcttttgaaggactcatccgcctcacgcacggcgcggcggaacaggtcttcatcacagacgccccagatggtggaatgggtcacctctgaatcatccatggaattacggtccagaacctggaagccgttgttcccgaagaagtaattcatgttgtcaaaatacccgtagccgccgtagatccacttgaggtcataccccttgtccctgaatatggacccgatggcctgcaaatgctcattcccctcctggcggaggatggacatgccgggcagaggcggtatggacgtgctgaccgcctccagcccgcgcacggagcgggtgcccgtggcataggcattcgggaagaaaatgccctctttgcccagacggctcaggcacggcgtgacattcgcgccgtcctgccggcactcgtttaaaaactccgcacccatgctctccatgaccacaaccacgacgttgggccggatggcttccccggaggggcgcacctgcctcttcacgctgcctgatgcggcgtcaggcacggacgtgtcatccgccgtgaattcccgggccagaaacgccgccgcatccgcgtccggcaacgtcttgtaataatcgcggtagtccagctcattcttgagaaaggcgctgaacaggctgtaaaggccgtccttggccatttccgagttatagcggttgttcacggcatccgcatccttgatgtccaccagccaataccctcccgttatgcacgccagcaggaacagcaccacgcagccccgcttccaccccgcgggagcttccccatggcgggggaccagaaaacgcttcatcccccagacggccaggacggatacagccagaatgccgataagaatcgggatgatggggtaggattcataaatattcccgatcacctccttggtataaatcaggtaatccaccgcaatgaaattgaagctggcttcaaactcattccagaagaaggcttccgccacgtcctcaaacaggttggcgagcacaaacaggaaaaaccatgcgcaggtgatccaccggtccgcctttccccccgccctaccgcgcggcagaatccacaaataaacggcataagggataagccagtagcacatggtgatggaaaactccgtcacgaaaatgtatgccgtcttcagaaggggaatgaccccgaaatccatgttgcggtattcaaaaaacaccgtaaacaggttttccaccgcctcaataccgaacgcgagcaggaggaacggccaaaacctcccccaataataacgaatcatcgtccccggaaatatgacagacggggcatgccgtcaatgctccatcacagcatcacgcaagtatggctgtcattccgcagagcggccgccgggcatccggactccctttacactacatccagcgcggcgtcccagtccttccagacaggctccaggcccgcattccggatggcaccgaccacctgctccggagtgcgctggtcggaaatctcaaactgctccgttgccttgcagcgccctttccggtcctcgggaaggtccacctggtttccccgcaccgtcaaatgggcggtggccgttcccacccccgtgtagccccccggttccgtacgggcaatggcggacatgtgggtcatgcccagatgcatcagggcatccctcatcggcgcgggttcacgggtgctgacggacatccctatcctggggaagcagatgcgcagggcggccataagctggacaaaatggcggtcgtccagcatcaattccggatcgggttcatactcgtaattcccggcgtagggacgcatgcgcgggaacgccacggaaagcgcggacttccagcaatgcttctgcaaatagtccagatgggcggcgagcgccatggcctcccgccgccagggggacaggccgaacagggcgcctatctgaatgcggcggaagccgccctggtaggcgcgttccgggcaatccagccgccagttgaaattcttcttcatgcccgccgtatgcagggtttcatacacctcccggttgtaggtctcctggtacacggccagctgttccgccccatggtggacgatttccgcatagcggtcgtccggaagcggtcctatttccagccccagcgaggggataaaggaatgcagcgcgtccaggcattcctgcatgtacccgtctgaaacgaacttgggatgctccccggccaccagcaggatgctgcgcaggcccagcccctgcaggtagcgggcctcctgcaccacttcatccaccgtaagggtggtgcggataatggggttgtcccgggaaaaaccgcagtacttgcaattattgatgcattcgttggacaggtaaatgggggcaaagagacggatggtccggccgaaatgcaggcgcgtcaggcggcggctctcctgcgccatcgcctccaggcgggcgtcgtccaccggttccagcaatgccatgaagcggcgcaccagggaagagggatggtccatcagaccgtttaattcttcagaaaaggacataggaagattaaataaaatttgagagagccggctacccaaggccatttccacgcctgaaccggagaagcccaatttgcctcttccctcacaaaggattccatcttttaccgtgtcattccccggagcggagcgctccatgaggaaagaagggtccctgcaaatcatcgtgacagacggcctctcatggactaatctggccttatcctcccatgaccgccacgccgaacagccttttccgccattatctcgattccctgatccagcagggaacaacgcgcacgagcctgacggatgaagccagaaacgttctcaggacgtggtacgtgaccgccaaacagggaagccgccccgccgctgccgttcccgcagctccaccctctccccccgtttctccggaaccgccgccccaggcggaacctgccccggcctccgtatcttccggggagccggaaccgccggagctctttccggagagccgggaaccggcctccaccgtcgctcttccggaagggacgatggaagacaagctgcaatacctgcgggatctggcgcagaactggcagccggcgcgggagctcaattccctgcgggacaccatggtctttgccacgggcaatccccatacggagctcatgctcatcggggaagcgccgggctattatgaagaagtgcagcaggagccctttgtgggccgcgccggggaaaaactcaaccagatattgaaggccatgggactctcccgagatatggtctacatctccaacatcgtcaaattccgtcctgcgctgcctaaccagcggaccaacaaccgcgcccccacgccggaagaaattgaagcctgcctgcccatcatcatgaatgaaatccaggtcatccagccgaagatgatcgtagccctgggcgggactgccgccgtggggctgctggggatacagggttccgtcagctccatgcgcggcaggttccacgacctcaacggcattcccgtgcgcgttacctaccatcccagctacctgttgagatcagacagcccgcgggaaaaacgcaaggtctgggaagacatgctggccgtcatggaacgcctgggcatgcccatctcggaaaaacagcgcggctacttcctgcccagggaataaaaccgggaattcctgcatgccgcccttctcccgccacggcagctgaacggctgtttcttcatggaaagcctgcggaacggtccgttcccttttcagcaatgcacgatccgctttttccttccgtgttccggcacttcccagaacaggcgtgccctgtcgcggctcactccctccatgttcaggtaccgcgcccgcagcagggaggaggagcggtgccccatctccatctgaagcaggggaaaatcccggaaccacttggcatgataggaagcataggtatgcctcagagcatccgcgctccattccccgaagcggttatgcacgccccacccggcctttttccggagcagcctccagcgcaacggccagttgggagggcatagcaagccatcccgcgcccctgccccgtattccgccagaagccgccggagcacggcatgaatggtgacgtgccgggctccccccgtcttactggctacggaccttacggaaatgacccgttcttccatatccacgtcattccagcggagacgcatcacttcccccggcctgatgccggcatacagcatgacccagaccgccggagcgcagtcacggaattcaggaatttccaccacctcccggaggctttttatttcttccgggaccagaacggcgatggtccgttcacggaacgcaggaggttccacccggacaatgggattttccccgcaccagccgcgccgcagggaaagggacagcacgccgctcatcaccgcacggcccttgtaacgctgcctgcgggaggaaaacgcagtttccaaaaaacgcgcgcaatgctccggcgtcagtttccggaccgggaaatccttcaattccggacacctccgcatcaaggctccggtgaaatacctgatatcacgcagcgttgtgggacgaagcccgcgcttcgccctcagcgtctcctccacggcagcggaaaaggaaaccgtcttttcccctttcctcaattcctccgctcccaggaaaattgcctttctggcccggcgcatgctgcggcgccccccgcacaggctcagcaattccacggccaggctggcggcatccagcatattcaaaccgcttcctttcaacaacatttccgccgccaaatatttattccggttttctccatgtttcgccattccgaacaccatgtttttgatattaatgcatgatacatcacaggattgttaatcctgttagcaagaaaaaaattacaatattttcatctattaatcccttttaacggccaatttcttatgtacaaataaaaatctatttgttagataagccgtggattcaatcttccgccgcacaacgcgccgttcatgcgccggaggcgggaaaacggacggaatatattcagacgcacaggattaacaatcctgtacatagaaattcagcagggaaaaggcacccatttccacttttccttgaattaatctgaatataacaaatcatgaatcttcgtttacccctcccgctgcgccgggctctgctggcagccatgtgcgtccttggaagccaggccttcgccgccgaatatacagcttccaccctggaaaaattccaggccgcctggaaccagatggccaatggagacacgctgaacattaccggctccatcgactttgaaggaatagaattgagcgcattgcccgcagacgctgccatcgtcctcaaatcagacgggcatggaaaaatctccaacttcaactacaaggacatgtccgccgtggagatgcaggatctaaatgtggacggtgaaggaaccgtccgcgtgggcagcatgacggaaggaatgctcagcggacggagcgacgccggaaacaccctttccatagaagacggctccaccctggacggcacatggcttgtcctggaaaacaacaagctggtggcgggagacggagccattctcaaccggaacgacgtcgtcaccagccactccacctccatagaaaccagactggacccagaaacaggggcctttatctccacggtggtcactatcacaccgggagaaattgccatggagctgggaaaagacgtccaaatcaatgaaatggatttatccatgaatgacggagtccgcggccaaattgtctcccatggagatattgccctggctgattccaccctcgtctccacaggcgccgtcaacaccacgtccgtttacgaaaacgaagagtccggcactctgatcggccagtcggaatccgtgggcgcccgcggaggaattgacttcagcgcgggagccgtgacgatgacggataccgatctgagcaccgcaggcgatggagaccggttcacgggcggcgaaatactgctgggaaacaacagcatcctgaaagccacggaccgggcggaaattacgacgggagccctcgtcctttcccatggcattaccaggaaagatgaagacggagcctacctgccgggaaccagcacggaagaatccatggggctgtacggcgacatcgccatcggcagcggcagctccattgaaaattatgacatggacgcgaaaggctccatcttcatcggagaaggggcaaagctggcatccgtcacgctggatgccgtatccgtggaactgaattccttctccatggctgaaggggaagaaggaacccgtaccgtccgcataaccaccgcagtaggagaccaggccaccgtttccatcggggccaattccacgctggacgacgtggatatctatgcggaaggcggagacatctacatcggcagcaatactgaaatcaccggggataacgacctttccggcagccagatggccgatatctgggccggggatacggtgggagccattgacgacgaaggcgcctcctcccgcggaaccatctcctttgaaggaacgctcaagcagaacgcggacggcgactacgtgctggcctccggcgaatacacggaaggaacttatggcgggaacgtagtcattggcgacaacgctacgctgaccatgaccaccgtagccgcggaaaacaccatcatactaggggacaacgtgacctatcagggaacggaagaagcgtccgtctaccacatgagcgccttcagcgatgcggataacagcctcgtccacgccagcatcattgacacggatgaaaacggagacatcctcaacggaaccgttaccgttacggaacgtgaaaacaaaatcaccacgggccgcagcaacacgttcatgaacagcaaggccccgggcaggtccgccgccatggatatttccagagggggcgccctctacgcgcacggagacattctcattggagaaaacaaccgcttcatcggcaatacggccgccgggtccggcggagccgtcttcgcccagaacaacattgccgaggccatcacctatgaaaacggggaacgcacctccaaactgaccacggaagtgctggatatcacggtagggaacggttccgtcttctccggcaacacggccggggccaacggcggagccatcgcctccgagctgacgaccaatcttgcaatgcaggagggcgataatgtggacgacttatttgaaaatgaaggcgccaatatctggataggcaaaaatgtcaccttcacggacaacaccgccgccggactgggaggggccatccatctgatggaagaccgtcttcttctgattggctccggagccttctttgacggcaatatggccggggaagaagccaacgacatttttgccgaagacggctccgtcatcctggtggactccgccgcggacgatgtcaccgtcatcaacagcggcatttccgacgcggactactactcccttgacgacggtctgtggacgcgcggttccgccacgctggtgcagacgggcagcggcggcctgctctacggcggccgggacacggaagacaacggattcggaggaacattcatccaggattccggagccggttccctgatcgtgggccatctggctgaagtggatggcaccctggtcatggaaggcgcgcaactgggcgttgaaggcctgacggactatgaaatcaacggaggaggagttattctgacggaggattccaccctggccggcgacacgctggaactcaacggaaacgccgtgattgaaatgggcgagggatcttccctcctcctcaatggcatcgcgttcaacggccattcctccatcaagctctggaatgccggtgaaacgggcgacggaagggacctcacccacaccgcagccggaacttcttccgtagacaacgtcaccatcaccggagccgatgtcagcgaactgcccctgttcaactccgcctttgtctccactaacgccgcacttcatgaagacggaaccatccggttgacgcagaacatgcacggagtggccgcccccatgcagggatattccggaaatgtctccggcgcggcagccggcatggaacaggcccggacgggagtccgggacggttcagccgcacacaggttctttgaaaccctcctgggaacctccagcgcggacgcggcggcagccatgattcaatccgtcagcggtgaaaccgtggtcaacgcggcgtgggcctccaatgacgccctcaagggctttgccgccctgggcaggacgcagggagccatttccgccgcacaggggctgaacgctccggcggcgaagccggtccagtccgcagacgcgaagggctcccccatcgccatggcgccggtggcctcaggccgcggctccgtatgggtgggcggactgggttcctggacggaccagagcgcacggagcggcatcgacggctacaaatacgacgcaggcggctatgccgtgggcgcggactgcaagctctcctcctccgccctggctggggtagccatcggccagtcctacggaaccttccaggacaagggagggttgtccagctatgacgcggactccttcatggccatgctttacggccgctacacgcccgccggggcttccaagctggccctggacggttatgccgccttcggcaccacgtcctttgacggaaaggcccgcatggcggacacctccgccaccgggaaatttgattccgactccttcggagccgccgtctatgccacctggacggaacagctccgcagcaaactggtcatcgcgccgtttgccgggctggaattcatgaccgggaagacggacagcttctccgaacacggagacctggcccggaccttcagcggagcacgcgcccagaactggacgcttcccgtaggcgtcactctctcccgcacctatgcggcaggcgccaaaaccacgctgacgcccagcgtgacggttgccgtggcgcaggacctcagccgcctcaaccccaagggaaccgtcagcagtgagctgggaacctggacggcgcgcggcgttaacgtaggccgcaccgccctgcgcgtcaacgcaggggtaagcgccgccttcggcagcagatggggagcccgcatcgggtactccctggaaagcagggccgggctgacggcccagggaatcaacggctccgtcagttactcattctaacgggcgttcctattccagtctccccggttccccacgggaccggggaggcaaccctcaacccttctcttcatgccttcttcaacaataatccgccccatcctgacgctaggctgtgcggtcctgctggcctcctgcggcggcagctccggcaaatcggactcctccggagtccagcccccgcaaacactggaaacaggttccgtcatcagcatgacggacggccatggagtctcctacaaaatcatctcccccactacgctggaaacggggaacggccgcttttccggaacgtactcctatgcgccgggtccggcttccgcccggttctccatgacgctgactgacggaggggaacatccctccaccatcaccagctccggagaaatgacctttacttccgcaacggagggctactactcggcaaccaaatatgaatccaccgttctctccccggaaggaatgggcggccccttcaaaatctccaaatagaaaaatttcccgggaaagtatgaattgttgattaggaaccgcttcctgttgagggaagcggttccgctttaaccggacagaccttttatggcggtcgcctccggcatgaatgcgccggcgtccgctcattcctgccgggcaggctaatccggccataccgcttgccagccgcctgtgaaccggaggcaggcataaaaaaaccgctttcccaccagggaaagcggctgccatttaaaagggagccattattccccgcgccggagaacggcgccattgctggcattcgtggcgaggtggcggtaacggctcagccaggaggaggaaaccttgttgtacgtgggctgccagtccgcacggcggcgtgcaatctcatcctcgctcaaatgggcgttcagcgtacggtccggaatggaatactcaataatatccccgttccgcaacaggccgatcaggccgccttccgccgcttccggggaaatatggccgatgcaggctccgtgggtggctccggaaaaacggccgtccgtgataagcgccacttccgcgccaaggccctgccccatgatataggacgtgggggccagcatctcctgcatgccggggccgcccttgggtccctcattgcggatgacgaccacgtcgccggacttcaccttcccggcaaggatgccttcgcaggcttcctcctgggactcgaaaatcacggcgggtccgcggaagctcatcatgtccggatgcacgccggccttcttcaccacggcgccttcctgggccaggttgccgaacaggatcgccaggccgccgtcacgggaataagccttttccagcggatggattaccgtttcatccgtaatgtcgcatccttcaaccgtttcacccagcgtctttccgctgacggtcatggaatccaggtggagagccccgggaatcctggcgatctcatgaatgatggcgctcacgccgccggcgcgcaggacatcctgcatgtggaagcaggaagagggggccaccttgcagatattcggggtgcgtttggaaatgtcattgatgcgctggaggtcatactccacgccggcttcccgggcgatagccagcgtatggagcacggtattggagctgccgcccatcgccatatcgatcgcaaaggcattgtcgatggcgtcacggttcacgatgtcgcgcggcagggggccgtccgccttcgccatctccacggcgcggcgcgcggtctgcttccagaactccttgcgttcctcggaagtagccagcagggaaccgttgccgggaagggccaggccgattacctcgctcaggcaattcatggaattggccgtaaacatgccggaacaggaaccggcgccggggcaggcgcggcattccagggaatggagttcctccgcattgattttgcctgccttgaagcgggcgacggcctcaaacacgctgttcaggtccagtacggtgccgtcctccgccatgccggcggccatcgggccgccgctgcagaaaatagtgggaatattgcagcgcagggcgcccatgatcatgccgggaacaatcttgtcgcaattcggaatgcagatcatggcgtcaaacgcgtgggcgctcagcatcgtctccacgctgtccgcgatcaactcacggctggccagggaaaacttcatgccgccgtggcccatggcaatgccgtcacaaacgccgggcaggttgaactccacgggagttcctccggccttgcgcacttcctccttgatgagggcggctaccttgttcaggtggacatggcccggaatcacctcattaaaggaattgcaaatggcaatgaagggacggcttaaatcctcatccgtcatccccgtggcacgcatcagactgcggtgcggcgcacgctcgaaccctgctttaactctatcgcttcgcataacaatacaactgttgcggcgcaagtgtatcacatgacgcagggaagagaagttgaatctaggccagtcttgcaaaacggaaacgcctccgttacagtctgtttgcataaggaaagactttagctgtccggaacacccttccggacggggaaatgtgaacgaatcgtcacatctaatatcgggacaccgccccttccttcatcgtaaaaaacagccatggcaaccattcttatcgctgaagacgatcacgccatctcagacctcgtggcctacaacctggaacgcgcaggccacacgcccctggcggcctatgacggcctgaccgcgctggaagtggcgcgcagggacaggccggaactgattctgctggaccagatgatgcccggcatggacggccacggcgtactgagagagctgcgccgggacagccgcacgcagaacattcccgtcatcttcctgaccgccaaagcgcaggcggaagaccgcatccaggggctggagctgggagcggacgactatgtaaccaagccattcagccccaaggaactcgtgctgcgcgtaggcagcgtgctgaaacggtgcgaacacacgccgggcagcgtcatcgcggaatacgggcccttcacgtttgacaaaaacgccctcaaattctacatcgacaaggaggaagtggacctgacggccacggaattcaagctcatgatctacatgattgaacgggaaggccagaccctgaaccgcaacgacctgctcagctgcgtgtggggatacagccaccaggcccagagccgcacgctggacacgcacatgaaacggctacgccagaaactggcaccctatgcggactgcattgaaaccgtccgcagcatcggctaccgctttaccctgccggggcggcgtcccccggaggaagaggtctaacgctccggttccatgtcggccatcgactacatcctcatcatccttgttctggcctccctgtacctgaactggcacctggtccaggtatgccggtccgccatgaaagcccggaaaaaggccttgcgggacgcccaacgcctgctgaaacgcggagaggaagcccaggaacaggccatcgtggacaaacggcgctttctggaagctctgggtgaggccttcctgctcatcggtcccgccgggcacatcgtgctggccaatacgctggccaaagaactctttcaggaagaaaggctggaaggacgcaaagtgggagccctggtgtgcaaccaggaactgctggggcatgttcaggaagcctttgacacggatggccccgtcaccaaggaatttacgctgagcgccgccaactcccccggcggagtgcaaaacggcatcacggcgtggcacctggacagcgccatcacggacaccccgatcaaggaaaaacgcatcctgctgcgcaacgtcacgcaaaactacctcaccaaccagatgcgccgggacttcgtggcgaacgcctcccacgagctgcgcaccccgctcaccatcatcgtgggatatctggaaaacctgatggaagacaatctgatggaggaaagccccggactggcgcgcaaattcatcggcgtcatgcaccagaacagccagcggctcatgaacatcattgaagacatgctcatgatctccaagctggaatcaggccacaaggccatcctgaaggaacaatggttccacctcacctcctgcgtagatgatgtcttctcccgcctggactccatccgggagaaaaaacaggccgccctgcacatggacattccgccggactgggaactctacggggaccccttctactggacgcaggttctgttcaacctggtggaaaacgctctcaagcaaaacacggaaccgggcctttccgtcactgtggccgcggccagaacaccggaagcctgcgtgatcaccgtcacggacacgggcgtaggcatccccgcggaaagccttcccttcctctttaaccgcttctaccgggtggaaacccaccactcctcggaaatcaagggaacgggcctgggcctttccatcgtcaaacgcgccgtggaggctcacgacggcgccatcaccgtctccagcactccccaccgggaaaccgtcttcaccatcaccattcctctgaaacggttccgggaagaaaaggaggcataagattccgatgcggcacagcctgatatgattgctgttgaatccgggagaaaaaacagactctccaacccggcggaattgcttcacggttcacggaatgggcgcgtgttgcagttccactctttctacaccaggagacaattgaattttctttaactgatgcttcttttcatactctttcatataatcggaaacatcaaaattgacgattaattcctcgtcatcttttttcaaactcaccctctccaaaaacttcttatggaaaatccaggtttcctttcgggtgattttataacccggatactttttttccaaatattgctcttgctgtttctgtacttcttcacgggtgacagccttttttaatacaataggcttgcgtaaggaaatcccttccgggaaatccataggtttcacggattttaagaatttagagttagacttcttattttgtttcttaactttatccatatactccgagatgttaaaatacaatgaaacttttgcgcttccttccttctcccggcattccaattcaagtacagtatcttgtcctaaaatataaatcatcgtatctcctatttcataagaaggaagatgttgtgatacataattccggcaatattcatcaagttcttttcttgatttaactccttttacagaaatgggattggtcatttcataaccaattccctccagtacagaaatattgctttcgacggcatttgaatctgcaatgcctgcaaaacaaaaaatccaagcattaaatagcattaaatatttcataattatttactgatgttctttacattgttccttcaattctttttccaagccactaagaatttttcttttagcatttaaaacggccgctttagcacttcttactccagccgtcccaacttgataatagtctataccgttatccatcaagttattctgttgtttcaatttccatgcaataacaggtttatgatggtgaagaaatctgtaagcgtacactaaatggacatttgcaaaaaatttcccatttgaattaataaatgccaacaatgaaattgtatccactctcaccgaaacgacagatcctaatttttcttccagtaaatcttttgcagcactctcccaatcaatctccaattcatcctgggaacctgctatgttgggaacctccgaaccaataggagtggtaaaaaacatgatacctactaattccactctacaagggttggttgcattcttggcaggacctacagataacatactcaatacgagtaaacttgccaccaggtgccatttcatcaaagcatatgatagagcaaaaaatagataatccaagaaaaaaccactatacctggcaacataaaattaacaataattacatagatacttctcttcatctaccagactattgaccgtataagtttgaataatctcaaaccatgttgatcaccaaccagtccagaaaagacgattattctatgtagatagaaagaatcacgctattcaatatccagcctgagtctccgcataacgaaccagcgcttttttgtctcccagatgctcggctactttcagacctatttccgccatcttcttccgtacggaagctttgtctacttccttcaaccataccgtcaggaaggtatcggcccgggccgacaattgcttgtctttccataaatcaagcacctgcccataaaaccctagaaactgcaatgccgttttttcatgactcaagagcgaaggaagcgccttttccagcacagcgcaggtttgtaccctcaccttccggtcgattttgttctcttggtaaaatttcagccagtttttgaaaaagattctcttggttttcacctcataaggcaactttccggccatgtccggaatatctttccgggctaaagcgcagaaattgcgcatatacgcgtctacggaatcccatgattcattttgcgccagcaatgttggataaacggcatagccattcgcctttttccaatcaagccccagttcattcttcatgaaatactcccaaagagtgggatttccgggaaaagcctccttgaattgttccagcaaagccaatttatctttctccgccaggcggacattccttctcatcaaggcctgccatgcgggataattggaggcattccgttttaatgcctctttcagcagtgcttccgccttctgtggatcggcagccagcagggataaataataacagagattggatgcagcggcatccttccccttccaaaaacgggggagctctgtaatcgtggaaacggaacctttccacggtccgccggacccgccttccgaccatatccagccataaatgttatttcctatcttccattctccgtctgcccccttccacacaaaggcgcaatgccctggctggccgattgtgtaggaaggaatccccttcgccttcacaaatccggccgcccctttggaaacggcgccgcacacacccccatactccacgtaaatttgcaaagaaataggtttatgatcgtagaacgctccaccggcatgcacgctgattccctgcttattcttcatccggtaggggatcagaccgcaacaggcataccctgcgttccccgccttgatcttctttttgccagccaggtaatcctgtgcccaggcaagctcctcaatactttccctgccccggaaaagaatgccgaattcccacggttccagcgtaatgaactgcggaaaaagttttttctccgcaaaagactttttgtaaaaatcataccgggcttcgcatgcctccggctcccgggacgtagaaatcaacgccgcacccaatgccatgttgaggccaaccccggaaagctctttcccttccttcacccagatattccgcaatacagccagcgtattctttcccgaggccttggcaaacgccagtttttcaaacacctccgggtgattcagcaaccattgcacaaattccttgtccttcaattcatgaaggatgtaagtcctttccttccccaccaacgcaaaaaaatgggccatgtagcaagcctgcgccacctcccggtccttcaacagagattccacggaaaacgttttttccgcctccaatttcttttgaacatattgccggcacagcccggcaatattccgcacatcccctccttccacctgccatgccagacgctgatgggacaaatctccagcaacaaccgctggcaagaagaacaaatagaggaataagagtttaaacataaataggctaaataagaaaactatctatgaggatattttttaccaattattttctgcgcttgggaaaacccttgtacaagtaggaagcttgaggaactcgtccaattgttctatccaataaatcaggaatttcatcatcaccatatcccgccaatttaagatatcttttcacctgtacagctttagtcggataaaattggactaacattcctacaaaatcctcttccatattattgatgattgaattcaattttctttgtctcccaattctaacattcatgtaattacaatattttgtaaatctatctctatcctgcctaagatccatgttatataaatataaaaatctattatatttatatgtataaagaaaaagaggattcaattcttgtcgaaattgattcaatattatggatgaatataacagaaacaattctctcatcacaagtgcctcgtcatgaagttttgttccgttagattttctaatttctttcggaaaaaatgataaaatcattttttccttcacttcataatcaagatcagaattttcgcatagccattctccattactttctacagtgtcatcaataaagggaactgcggcaaccaaataaaaaagccacatccctttttgcaaatcattttttatatcaggcagtattttattagcttgttcataaaatttaaaaatatccccctgcagggccgatttttcagcgtttgatagtaggagatataatttttcattagtttcacgaaggagaggtttttttaaagaactatcaaatattttggcctcgcttacagtcgaaaaaactaaaataaaacatgataatatatatattactttcataacagattgtttgactaactgaattattatacttacagatcaatcatctctcgttcctgtatctatatgaatggcgtcccctgctgtacttctttcaacagaacatccaaatttacaaattttaactttgaaattcttcaactcatctatacgattcccatcataactttcatcaaatgtttgaatatacactacatcaccgattaaacaacaatctttcccattgacaacagtgtaaaacccgcaacgccaaaaataaaataatggcaatggaagattttggaataataatattgaattttcccgatgttccttcggtggatatactccaattaaatcactcatatgtccattatactcatcaattcgttgtggatttggattaggcatatgaggaaccaatccttcaggaagatcttcaggtttatccaatgatctttctataaagtttatatttgaaaagctcaccgtccgcggctgaaagactaaagctaaatgagtggaagccccaacttcattcactttcccatcacggggaccatcaggactccgttcagaaagatttatcccttctattttgtttggtaccagaacattaaatttttttggcttgggcttatcgtccaaattagttttaacttccacacttacctctcctttgataacaggatcctttttagccgttaaaacagctttaaatttatccttttcattaattgttagtattgcccatttttcactttgttcggaaagtttccattctatctcatccttattaacaagagaaagtaattttccctccaactctaaatccacttcttctccaattccaatatcttctcgtttttgatcttcctctctatcaagatcaaagatcatacattcagcagaatacttgcgtgtcttcgaactgatatataaatccctcccttcgtcctctaaatctccatcttctgcaaaccctaaagaaaatgctccaattgccatgaagaaaaaatttccccacatgaataactgtcctgaccgtttcatagaagtataggttgtagtacgtatacaaaaaaatcagaattcaggcacaaagtcaatgattttagaataaaattgagacaatattggattcgccaggaacatgaggacgagaaaaaggagattaccttaggctgaagaatatgatgcccacattaagcaatctgcaaaactccatctcaatccgcttgattacgatattgataagctcaattctaaataaattgacagcatgacagagagcgtttggcagttcattgaatctctcctatatttctccaacaaagcattacaatttcttttcctaaaatgatttgttacgtttaaactcctaaattagaccagataactctattttcatttgtttaaagaaaaagagaagatttgttctttactgaactctattactttctttagatgtttgcgtttatgttaggagttgctcaaagtgaactagactttctccgaatttcccatgctcagttccacatctaatctttcacttcggaacgatataatctgacagcaatcgtgcgaaggggaatggagtgcgggggatgagcgaaaaaccttcttttacggattgggagggagacgataccagcatcgctccatcatcttgacctgtccttttattcccttatgcagagcaccagcaacccgcctcacaaaacaatggaataaagacacatgctgtatttttctcttcactaaagatattgtttttgtgttggaaagtttccttttagccagcgctgattccattgaaaagaaaaacggcgtccttccgctggacggaggacgccgggattttccggaaatcggatagactgccagtttgagcagcgaagcgcacaaaccttaggacttgtaacgcaaacgcttcttgtgacggttctgacgcatgcgcttgctgcgcttatgcttgttgatttttgctttacggcgttttttgagcgatcccatgattgtggttcgtttgttgttttactgtggtgagaaaaaagttagtagaccagcttgttgagcgggtattcaatgatgccttccgcgccgagggccttgagctgcggaatgatatcccggacgacggattcgtcaatgaccgtttccacggccagccagccttcttccgccaggtgggagatggtgggacggcgcagggacggcagggcttccacgaggccattgagggaagcggcggggaggttcattttcagacccactttccggcgggcttccagagcgcccctgagcatcatgaccaggctttccagcttctgctttttccattcgtcctgcatcgtttcccggttcgcgatgaactggggataggaggtcatcaaggtgtccacgatgcggagcttgttggccttgatggagctgcccgtttccgtgatgtccacaatggcgtccaccagctccggcactttcacttccgtagcgccccaggagaattccacatgggccttgatgcccttttcctgaagccagcgttccgtgatgcccacgccttccgtggcgatgcgcttgccctgcaggtcttccgcacaggtgataggggagttttccggaaccaccagcacccagcgggtgggcttggaggtggccttggagtattgaaggtccgtcagcacttccacgtcagcgcggttttcataaatccagtcgcgtccggtgatgccgcagtcgatgaaaccgtcattgacgtaacggccgatttcctgggcgcggatcaggaagagttccagatcgtcgtcgtcacaggtcgggcggtacccgcggctggacacatatacattgtagccggccttgcggaacaattccacggtggagtcctgcaaactgcctttgggaagtgctattttgagtttcttcgacatgatgggacgggaatgaaaacccacgcgggcctcattgtcaagtttagaaccgaatccggcccattttaccgggccatgagccgttcaatgtcatcggccagcagcggcacgtcccccagcaggtcaatgttttccttttccccgatcaggatgtcgttttccaggcggatgccgatgccttcctccgctatgtagatgcccggctcaatggtgaagaccatgcccggcagcacgacggggttggtttcccccacgtcgtgcacgtccagccccaggaagtgggagcagccgtgcatgtagtatttccgcacgatgggaggatcggacggtttttccgccacctgcgcgggcgtggcaagccccagcttgacgagttctccggcagcgaagacgcgcaccaggcgctcatattccgatttcaagatgccgggcctcaggatgcttttggcataggtcatcatgttcaacacgctttcatacacggcgcgctggcgtggggtgaattttccgttcacaggaacggtgcgggtcatgtcggagttgtagtttccgtattccgtgcctatgtccatgagcaccaggccgccgtcctcgcacctcttgtcgttctggatgtagtgcagcacgcaggtgtcctttccggaggcaatgataggaaggaaggagaatttgcgcggcccccggctgatgaattcgtttgccagaaagccctcgatctgccattcccccacccccggcctgatgaaccggagcagcgcccggaagccttcattggtaatgtcacaagccttcctgagcgccttgatttcctccggctttttgatctggcgcatctccgccatgatttcataaacgtttttcagaaccgcatccgggaatttttccttcagttccttggtcatgcgggcattgcgcgtttccaccgggcacgtgcagcgcggatgctggttggcttccacaaagaccatggtggcggccggaaccagggtatccagcagcgtatcatattcattggtccaacgcacgtcctggatgccgctcaattccctcgcctgatcctgcgtgagacgggctccttcccagatggcgatctgctcattcgtttcacgcaacagcaggatttcatcccagccgtcctcccggatggtcatgatgaggacggtttcctcctggtcaatcccggtgaggtaaaaaaggttggcattctggtgcagggcgaaggtgccgtccgcattcgtggggaacacgtcgttggcatgcaggatcagcatactgccggcgggcaggcgggaagccagttccgcacgattgccggcaaaaaaggaggaaggtagcggctcgtatctcataccgacagcatgccccgcttttccagcttgtcaatcatgcatccggacacgaaacggccttcctgcggttcatattcagttcttgcggcccggcattcttttgttcattctgggctttatgcttttccgtgctgttttttccgccgcagctattcttttcacgggcgtttcctgctcttccggtccttaccggcccgtttccccgctcattactcatgctgcggagctgaaggaggcgcgcggcaacctcggcggcgtctggtgccatccctccgccgggcaattcctctggaaacagcaaaggcggcagtacgtttacattgcccccgtggaaatcagctccatccggcagcagttcccggaggcttccccctacctggcgcgcgaattccgggattccctgcaaaaggaggttcgcctcttgattgaccgcaataatgagaagcccggcaatcatgtccgctgggtgctgagcgaccgcccgcgcacgcccggcgtgaaggtttccctggcgatcgtccaattaaagcccacggacgttgggggaaaagtcgtggccctgggcgtgggaatcgtctcgccgattccgggcgtttccttcattatcaatcatttcgcctctggagcggtaggaattgaaggcaacatcgtttccctggacaacgggacgatcttgaaggaattttacgggcgcaacagggatcccatcaatattttttcctgcaacagttttgaggagttcgcctgcgacaagtacaacctggaccgttttgcccggcagattgcggaaattctggaggaggacccttcccattcctgatttccccccggcggggaaaactcttgatgacaatcgggtcatgactcgaacaccggacatgcgggcgccgtcttatcctgcatgtacggtgctatttcacggctcctgctggcgctgggaacgggattggttttttcctgttccagttcccagcacatgcccgtttcccccttgattacccatcctcttcatgcggattccaaacagagctgcttccagggcgtctggtacaaccccacagagcaggccatctggaattccccgcgcctgaaggtgtatgtggcccccatcaatattgattatatcaaggccagattcccgaaggaggccccggccctggcggaacagttcaggacggagcttcagaaagacatccgcagggtgctggagaataaatccaaacagaccggaggaaggatcaagtggcagctggttgaccgccccgcaccgggcggcgtgactctttacatcgccatggtcaagctgaagcctacggacgtaggcggcaatatcatgtccgacctggtttccctggcgtccccccttccgggcacttccctgatcctcggcaatttcatgagcggggacgtaggcattgaagggcgcctgtcagacatgcgcacgggcaccagcatcatggagttcaaggcctacaatacggaccccatcacgctgttttccgtgaaggagttcgagcgcttcgcctttgaccagcagaatttgcagcttttcgccagcggaatttccgccattttcaagggcggaccttccagttatattcccaagacgggggaagttgacctggacccgttttaagcggcttttccggctgattcctccttgttctttttttcaggatcatagaaggtgcattcctgcaccgtctgcctggttttaaaggcatagacgaagaaggcgacgcccaccagcacgaggaagacggagaggaactgcccgcgggtcaatcccatggagaagggggagtccggttcccggtattcctcgcaaacgattctcccgacagcatagagaatggcaaagatgccgcagaacacgccattccaggcacgcgggaatttcacccggatgaaccacagaacggcaaagagaagcactccttccgcaaatgcttcatacaactgggaaggatagcgcgcatggtcctgcatcatctgccccacgatttccttgatggcgggcgtatccctcacccggtcggtcacccaggcggcagtcatgcggtccggcacggttattccggagagggaaagcttgtccagcaatccgggcgtttcatagatgcgggaggccacgcggacgaacaagtccgggtcctgggacagttccgccggaaagatcattccctgggcggatccgggcgatacaatgcgcccgtacagttccccattgatgaagttggccatgcgcccgaagaagagccctacgggggccacaatggccagcccgtccagcagggccacccacttgacgcggtgcttccacgcgtagtagaacgtgtacagccccacgccgatcattcctccgtggctggccatgcccccttcccatacccgcagggccatgagcgggtccgccaggaactgggaccagccgtggttgggtatctggtaaaagagcacgtatcccagccgtccgccgatcaggacgccgaagatcgccacataggtgacaaagtccgccagcctgtcctgcggaatgggatacagcttccggcgggacagccaggagagcagaaagtagccgccgatgaagcccatcagataggccacgccataccagcgcagggcaatggagtccgtcacctgccagatgacggggtccaggtcgtgtacgtaagcggtcaaattcatgggcgttcctttcagggcagataatgggtaagggcttccacggcttcacggtccagggcgcgcaccagcgccaccgtcagttccaccgccgcgcggtagtcccgcaggtccagcacgccgttatgggcatgaatgtaccgggtggggatccccagcacgatagtgggaactcccctgccggagagatgaagggccgccgcatccgttccgccggaacggcgcaccgtcagctggaaggggatgcctgcatccgccgccgttttctcggccagggcggccagacggggattggtgatggccgtagggtcaaacaacctgatctgcacgccgccgcccagggctccctgggaatccgccacggtaaaaccgggggtatcgtccgcgggggggccttccagcacgatcacgcaatccgggcgcatggcgactccggccgtcttcgcgccacgcgtccccacttcctcctgcaccgtggcggcagcaatcagtgtattggggtgtccttcccggcacaatgtcttgaaggcctctatcatcacggaaaggccggcacggttgtcaaaggccttgcccatgacccggaacggattttccagaggcgagaatgccgcgtccggcaccacaggatcacccagatgaatgccgaattcatttttcacctgttccgcgctttcagcgcccacgtccacaaacagtgcttccatgctcatgacgctgttgcgctggccttccggcagaaaatggggaggcttggaaccgatcaccccctgaacgcggcggcctgaacgcgttttcaccagaacacgctggctcaacagggtatgcggccaccagccgcctatccccaccagttgaagaaagccgttcgccgtgatgttctgtaccaggaacccgatttcatccatgtgggcggccagcatcacgcggggacctgaatcgccattggtgcagaacaggcttcccgaaccgtcggaggaaaattccccgcatccttcaagttcctgcgccacaaggttccgtacttcatcctcatgccctgaaataccgtgggcttctgaaaactttttcagcagatccgaatcaatcgccatgggccgagcatgtgaaaacaccccttccaggtcaagcccgcagccatgccgcatgattttttcttgaccgcacggggggaacctccggattgggcctcatcctgcgcaacacccgttacatggaaagaaacaagagatttttgctagccacagttcggtttttggtgtaactaatcagggaatcgaattgtgctatgaaatccatccttaacactatcacggccatgctggctgcggtgcttttcattcctgcggcatcggcgcaaaccaccagcaatcccagaatgcaggtgaaggtcacgttggaaaagctgtccctgtacatgcgccagtcccccaatgtcatgacccaggacgacccccggccgctcccgaagccgaagagatgggcggattttgaaatgcccttcaaggtggaagccgctcccgtgcccaagtccggctacattgattccctgacgttcaagttctatattgccgtagtcaacccggaccgtgcccgccagtacctgaaactgtacaaggaagtaaaatacgtcaatgttccggtaggggaagccacgtatgcctccgtctatctctccccttcttccgtcaagcgcatcaccggttcggaaggcggcaggggcaagtgggtgaagtaccagggcgtggtggtggaatacaatggcaaaatcgtcgccacttattcctccgaacgcggcaagatggaaaaatggtggaccatccagtcccccagcatcgtggaaacctcctactatcccctcctgaacaaggatgaaacgcccttctccgtgtactggtatgaccgttatccggaaatcatgaggcccaacagccagcaggcggctcccagcccggccccgttcggcacgcccacggaagctccggctgcggacagcgaataaagccccatcaacatttttcccatcttattttttatttaacagaaatcacccatggctaattcacgacaaatcgtcgcattaaacgtaggttcccagagagtttcaatgggcgtcttttccaagacctccaaagacgcccttatcctggaccgctatgctacgcgcctcgtagtgctggacccgtcggcggaaggcttgcgcctgacgaaaataggggaggcaatcgccgacctcgtccaggaactcaatgtcaaaggcagcgttgccaactattccgtttccgggcaatccgttttcatccgcttcgtcaagcttccggccctggacgataccgatgtggaacagctcatccgctttgaagcccagcagcacgtccccttcccgctggatgaagtggtgtgggactaccacctcctccccgccaagggcctggaacgggaagccgtccttgtagccatcaaggcggaagatctggattcccttaatgacgaaatcgtctcccacaacctttccaccggcaaggtggactgcgcgctgacctccctgtacaacgcgtatgtggacagctacccggatgaaaaagagccggtgatgctcatcgacatcggcgccaagtccacggacctgatttacagcgaacagggccgcttcttcacccgcagcatttccgcgggcggcatcttcgtcacttccgccatcgcccgggaattcaacgttcccttcatggaggcggaacgcctgaagaccaccagcggcctcgtttccatgagcaacggacagacggaggggctggatcccgccacggccaacctggctaccgtcatccgcacggccatgaccaggctggcttccgaaatccagcgcaccaccaaccattaccgcgcccagatgaacggaagcgctcccgtgaaggcctacctgtgcggcggcggcgcgtccctgccctacaccaaggaattcctggaagacaagctgggcattccgatttccttcttcaaccccatgcacaacgtgggcgtgggttccggcgtggacgtgaacaccatctcccgtgaagcctttatcctgggcggcctgatcggcaccgccgtcaacgccatcggcagggcttccctcaacattgacctggaacccacggcaattgccaaaaagcgcgccaaccagaagaagatgcccgccatcatcgccggagccgccatcgccgttctcggcgccgcagcttatgccgtcactggatatatgggcgtgcagaaggcggaggaaaccctcgccggcgtgcaccccaccgtcacctccatcaagtcggagcaatccgccctgcgccagaaggaacaggagctgaaaaaactggacgccaccctggcctcctaccagcagctcacactacagcgctacggatatgcggacatcatcaagcacctgctggaacagtcggaacacaaggattatccctactggttcacggacttcgaaccgctggcccacttcaatccggaggataccacccagatcacaggctactccgttatcaaggattccttcacgtcggataaaaacacgtccctggtggacgacatcaggacggaatcctccgcgaacacctccagtgaagatgaaccgtccgtttacagcgttaacgccgtgcgcctgaccgggtttgtccggcgcagtctgggcggccagagaatcatccaggaccttcaggcaaaaatagacgggaacaaggaatccctgttcaccttcaagcccggagacgtgaagctggaagcccgccagatcatggagctgggagccaaggacgccaaggtagacgcagcggcaggggcctttgtccccttcaagctggtgcttccattaaaaactcccattcccgtgaactttaacaaataagattacccaacccgaacaagacatattttatgagcaattggattacagacaacaagcccgccgccatggtggcgggcgtggggcttctcttattcctggggttatccgtaactgggtacatcgtcaattccaaacgcagcgagctggacaagaaaatcagcgtcgcctccaaggagatcaaatccgccaacgccgctgaaatcacgccgagccgcgcatccaacgaggagctggaaaaggaactgaaccgctatgctaaggcggtcaccagcctggaaacggcatacaagcccttccttgcttcctccgcgctggttcccaccacgcccacggcattccagaatgaactgaaaacattcagggacgccctgatcgcctcctgcaagaaaaagaacatcctgatcacggacacttcctcctggctcggcttccaggtttacagcacccaggctccgtccgtgcaggcggcctccacgctgggctttgaattgaaagccgtcaacagcctcgtcaacaagctgacggactgcggactgtccaaattcatcaaggtgtaccgtccccagctccccattgaaaatccggcgaacaatccggaagaggacgctgacgagcccaaccaggcaccctggactcccatgcccctggaaatcgccttccagggcaaccgggaaagcgtgctgaaagccatgaacgctattacggactcccaggattacctgttcacggttaattccatccggatccgcaacgagcgtatgatgcctccccccatcgccaatccggcagcggccaaacctgccgccgcccagcccgctgcgggagcggcatccctgacgccggctgatgaaacggctgcgcctacagcaccggccatccagcaactcatcaaaccttacatgggcaaggagcaaatctttgtccaggtctccctcaacctggtccacttcaaccagcccaaggcacaggaaccgtctgaagattaattacggcaaccaaccgcagcaaatactttcaacatgtctgaaaaacaaaactacgacaaaatcctgctggcctccggcatcgtcctgggcctgggggtagccgtctatggtacggtgacccttctgggactgaatgacaagtacaagttcaccacgcaggtttcggaaaaggcaattgaacctcctcccggcatcaagaaagccgcggaagtcaatcaggagctttccgcctcccatgagctcaagcccattgcgcaggaaacgcagcagtacgtgggcttcgtagctcccaatctctggatcaaggaagggggaatggaaccctttgacattatttcaggacctcccatccacggcaacatcccgaacaaatggttcctggacaacggtctggaaaatgagttcgtttactcggacgtcctcacccgggaccctgacaacgacggattcaccgtacaggaggaatatgaggctaaaacgcatcccaatgatccgaacagccaccctcccctcgtcaacaagctctttgtggacgaaatcaagcagttcggcttttacctggccttcacgcagtcggacggcaatgacttcaccttcaagggcatgaaccgcgccaggcaggagctttggagaaacattgtccagcccaacggcaagttcggcacccgcaagaacacgaaagacgaacccaggttcgagcttgtcagcgtcgccagcaaggaattcaagaaccccagcctggacatggtggaaacggacgaggaagccgtcgtcaaggatttgaagccgaccaaaaacggccaaacctacaccatcaggcgcggcacaaaatatgtcattccaatcattgataagaaagtaaaccttactatcgccgccggccccgaacgggataccagctttgaagtggaggaaggcgccgacttccagatcccgggagacaccaaacagacctatacgctgaaaaccgttgataatgctacgcagaccgtaaccattgccaacaaaaccactggagaacaaacaacactgagcaagaaaaaatagacccggatttaaacttttctgaaaaaaaagcttcacaaatccgaaaaacatgtaaaaagaagaacctaactatggaccacgcaccactttatcaaccgaagcgttccctgatcgcgctgatggccattgctgcctcctgcccgtttgcgcaggctggtgatggcggcgccgtcggaacctccagtgccttgggatcgtcctacgccggaccgggcagttactaccagtccgatgcagcgcgcatagccatggcccgccgcgaagcgcagacccaggaagccatgcagctccttgcagaaggccgcaacctgtaccgcgaaggcaagtacaaggaagccctggacaaatacaatgccgcttacaacatgctgccctccgcgccgatcaacgaccagcgcaaggaagccatcgccaaccacattggcgacgccagcatcgccgttgctcaggaatacatcaaagtgggccgctatgacgaagccgacaagcttctccaggacgccatcaagctcaatccccggagcgccaagcttgccaagcagacgctcgaatacatgaaggacccgattcgcacgaatccggcgcttacccccgaacacgtcaagaacgtggaaaaggtgaacaccctccttcacatggcctatggttactatgacctcggcgactacgacaaagccatcgccgaattcaacaaggttctttccattgacccgtacaacgtggcagcccgccgcggacaggaaacggtcaaccgccgcagaatggcctattatgcggccgcctacgacgagacccgcagcaccatgcttgcggaagtagacaaaatgtgggaacgccccattccgatggaagtcccgacgggagccgacggagcggacaacgccccgatcacggatgtcaacggcgccacggccaacctgatgaagctcaagagcatcatcatcccctccgtctcctttgaagacaccaccgtggaagacgccatcgactacctgcgcaagaagtctatcgaactggaccgtacggtaggcccgaacggcgaacgcggcatcaactttgttatcaacgactcccagcccgcagccgttactccgacagctcccgcagctgacgacggcggcttcggcgaggaatcaacggacgtcacggaagtcgctccggttgccgctccgcaggaaagcatccgcacccgcaaaatcggccagctcaagctgaccaacgttcccatgctggaagtgctccgcttcatctgcagcaacgccggcctgcgccagaaggtggaagactatgccgtcaccatccttcctgccggcggcaatgacgtggatctctaccagcgcaccttctccgtgcctccgggcttccagtccgctctccgcaccaccgtcggcgacggcggcggcgacgtcagcgaagaccccttcggcggcggtggtgaaagctcctccggcctcaagcccatgccctccatccgcagcctgctgcaaaagagcggcatcagcttcccggaaggcgccacggcattccttgtcaacggcaactcctccctggtcgtccgcaacacctccggcaacctggacctgatcgaacagctcattgaaaacacccgcggcgaatcccagcaggtgcgcatcatgaccaagttcgtggaagtgacccaggaaaacacggaagaactcggctttgactggatcgttacgccgttctccgtcagcaacgaccgcagcaccttcctgggcggcggcacgaactacggcaccggcctcgttcccgatgacttcacccagtcccctggcggcgtaagcggctggcccgtgaacaacaacagcaccaatacggacggcaacggcctgatcaacggcctcgccaccggcggcaaccgcacgggtgactacgccattgccaagaactccgtggacaacctgctgaacagcaccaaccgcactgaagccaccaagaagaatccggctcccggcatcatgtccctgacgggcatctatgacgaaggcgccttccagatgctgatgcgcggcctgtcccagaagaagggttccgacgttctcaccgctcccagcgtgaccgccaagtccggtgaaaccgccaagattgaaatcatccgcgaattctggtaccccaccgaatacgaacccccggaacttcccaacaacgtaagcagctggggcggcggcaactacaataaccggaacaacgttctggatgaccttgtaggcaccgaaaaccaggcccaggtcaccagcttccccgtcactcccgccactcccggcgtgtttgaaatgaagcccgtcggcgtgaccctggaagttgtgcccaccattggtgacaacaagtacatcattgacctcaacttcaagcccagcatcgtggaatttgaaggcttcgtgaactacggcagcccgatccagtccaccggcgttggttccgacggcaagccgatgtccctgactctgacggaaaaccgcattgagcagcccatcttctccaagcgttccgttgaaacgtccctgttcatctacgacggccacaccgtggcaatcggtggtttgatcacggaaaacgtgcagacggtggaagacaaggtgccgatcttcggtgacctgcctctcatcggacgcttcttccgcagcaactccgacaaccacatcaagaagaatctgatgatcttcgtgacgggacagatcattgacgccacgggccagcccgtacgcggcaacgcccttcccaccgcggccgctccggaaagcgcactgcctgcttccgaaggcctgctgcctcccatgtaggcggcgtgcataacgtccatattggagcgggtgaaagggtgaacctttcacccgctctttatgtcccatacatacccggtttttcccttccctcatgaagacgctgatcgtgaccggcggaatcgccaccggaaagtccacctccatccgcctgctgatggagaagggggggccgcgcctgcgcctttttgactgtgatgcggaggcaggcaggctgctggacggcggcaggctcagggagaggctctccagcgccttcggacccgccagcgtggatgaagacggccgcgcggacaggaacttcctgcgggagcttgtcttccggaatccggaaagccgcaggacgctggaaggaatcattcaccccctgctgcaccaagaatgtcttgcgcaaatgcgggcggcgcgtcagaatgcggcggtagccgggtttgtcattgacgtgcccctgttttttgaaacatcggcgcgctaccaccaggatgccgtgtgcgtggtggccgtttcccgggaaacgcagaagacccgcctggctctcaggaacggattccgtgaggacatgattgaagccattctggcggcccagcgtcctatcatggaaaaagtggccgcggccgatttcgtcctctggaacgaaggaccgccggacctgctccgccagcaaatccaaagactctaccaacatttttttcatgactgaagaactcgacaacaagcccctcccctccggagaggatccgcaggcggctccccccaagccccttcccgcaccggaagggatttctgaggaacatccggctgccgctccggaggaaaacgcaggggatacggcctgcgctccggcagtcccggcccgggcggaggaagccgccgctcccgttccggaacagattgacatcaatgaactgcgggaacgccccctgaacgatcttcaggagatggcggaaagcctccctatccggaacgcggcctccctcaccaagtcccaactgatttttgagctgggaaagcagcttctggcaaagggccatgaagtagtcgtctccggagtcatggaacaggccaaggacaattacgccatgctgagggatccggtcaaaagcttccgcacctctccggatgatatttacctgggcggcaacctcatcaagcccctgcacctccgcgtaggccagcagatcaaggtcaggctgcgcaagctgcgtccccatgacaagtacctttccgcctcttccgtcatcagcgtggaaggcatccccgcagaagagtaccgggcgcgcagtgactttgaacgcctcacccccctcttcccgaaggaacgcctccttctggaaaacaaggaggtcaattccgccgccatgcgcgtgctggacctcatgacccccttcggcaaaggccagcgcggcctgatcgtggcgcccccgcgcggcggcaaaaccgttcttctgaaaacaatcgcccgttccatcagggccaattatccggaagtggaattgatcgtgctgctgctggacgaacgcccggaggaagtaacggattttgaagaaaccgtggatgctccggtgtacgcctccacctttgacgagccttcccgccgccacgcccaggtttccgacctggtcattgagagagccaagcggctggtggaaatgggcaaggacgtcgtcatcctgctggactcccttacccggctggcccgtggctacaacgccaaccagacgggggggcgcatcatgtccggcggcctgggttccaatgcgctggaaaaaccgcgcaagttcttttccgccgcgcgcaacgtggaggaaggcggcagcctgaccatcatcgccacgtgcctggtggatacggagtccagaatggatgaagtgatttttgaagaattcaagggaacgggcaatttggaaatccggctggaccgggagctttccgaacggcgcatttatccggccatctccctttcccagagcggcacccgcaatgacgacaggctgtacaacgaacaggagttcgtcaagatcatgcagcttcgccgccagctcgccatgaagccgggctgggaaggcctccaggccctcctgcaaaatatctccaagacacagaacaatgcggaactcctgctgacagggctgcgttaaggttcacctccctttttccgtctttaccgcctccgttccctcgccgggacggaggttttttatggagatgttccccgtcatttccggattccgcggcaatatcatggacatcatggacatcatggacatcatggacatcatggacatcatgtttgccgggagccgctccgcccggaacaagggggtggagtgaacggattctcctccgtcacgcgtccagttttacccggaaaatacgcatggagttgcccaccgcaagcaggcagacgcctacatccgccatgacggcggcccacataccggccagccccagaatacccagcaccatcaccagcagtttgacgcccaggatgagaacaatgttctgcacgataatgcgctccgtcgcccgtgacagaaccatcccctgcggaacggcaacggggtctcctttcatcaccaccacgtccgcagcctggagagccgtatcagaccctacgccgcccatggctatgccaatgtccgcggcagccagggaaggagcgtcattcatgccgtcccccacaaaggcgagcaggccttcttccggcttcagccggcgcacgtgctccagcttgccggccggcatcagcccgctgaacacctcgtccagccccagcttgcgccccacctccgcaccggcggaggaggaatcccccgtcagcatcaccaggttggaaacgcccagcgccctcaattcccgcaccgcctgctccgcctccggcttgatccggtcagacaggcgcaggcgtcccagcagaacgccgtccagagccacgtaaatggttacgccgcggtccttttcctcccctgcctctacccccgcctcctgaagaaaagcctttttccccaccagcacagccttcccttccacacgggcggaaacgccgccccccgttacttccaccagctccgccacacggtccgggaacaggctgccttcatacgcctttacgatggaacgccccagcgggtgggaggcggagctttccgcgtgcgccgcccagtacagcagttcctccggcgttactccgtcacgtggaagcacttcatccacggaaaagacaccctccgtcaaggttccggtcttgtcaaacaccaccgtcttcactttccgcagggcatccaggtagttgctccctttcagcagaattccctgccgcgccgcccgccctatcccggcaaagaagcccagcgggatggacagcaccagcgcacaggggcaggagatcaccagcagcaccagcgcgcggaacaggccgtccgtccagcttccgcccgtgacgaagggataaagcaggaacaccagaacggcaatggagatcaccagaggcgtataaatgcgtgaaaacgtggacagccttccttccaggggggatttatggccggaagcggcttccaccagttcctggaccctcgccagggcggaatgccgccagtcccggtccgtgcgcacctccagcacgccctgtccgttgatgtacccggccagcacggtgcttccggccccggcctccaccggaagggattcaccggtcatggcggaggtatccaggacggaattcccttccgtcaccgtgccgtccagcgggacacgctctccggggcgcacttcaatcacggaaccgggccggacctccgcgggaggaacgtcacggacagtgccgccctctctcacatggacggattcaggcctcagattcatcagttcgctcacggaccggcgggaactgcccaccgcgcgctcctggagatattctcccacgcggtagaaaagcatcaccccgacggcttcggaataatcccccaggaacatcgctcccagggaggcaatgctcatcaggaaattttcatccatggcacgcccatgcctcaaccccaaaaaagccgccttcaatacatcccagcctatcagcaggtaggccgccgcatatgcagccatgccgctccaggaatcgcttcccatcaccagggcggcgacaaacagggcgatgcccagcacggcgggaacgggcctgatggcgtctccagagccgcagcagcttcctgaacagcaccctccggcgcagcaggaagctccttgtgaaaaatgttcgtgggaatgttccatactcatgacctgttccgcttgtacgcctgcgtctacgctatggcaagccctatgttagttcaatctaacatagggcttttgctacttcttctttcttaaaatgttccagaactccctgccccaggaattcgtccatcgccatggcgccggcgcccagcagccccgcttccgcgccaaatctggcgggcaggattttcagctcctccatgtgcatggggaacaattgctccctgaggttcttcagcaggggcttcatgagcaggtctccggccttggctacccccccgccaatgatgaaggcgtccggcaccagcgtgtacatcaggttcatgatgagacaggccagcatttccgccgtgtcctcccatagctggagggcgatgggacagcccgcgcgggcggcttcgtccaggtccctgggcgtgcattcgttcacggttttgacgattcccgccccggcataccgtttgaccgcctccgccgccagttcgttgttgccgatgtattcttcaatggctccccggttgccgaacgggccgggcttgccctggtaatggatgctcgtctggcccagctccccggtggaaagccgtttcccccggaggatgcggtcattcaccacaatgccgccgccaatgcccgtccccatggtcaggcacaccaggctggacatgccgcgaccggcgcccagcttccattccgcatacgccatgcagttggcgtcattgtccagcacgacggggaggcccagcgcctgctccatcagctccttcaccggaacttcatggtcccatacccggacattggtaagctggtaaagagtccccctgtagtaatcgcaccatcccggcatccccatgcccatcacgcaggcggacgggaattgcccgcgcaggttcagggccgccgcaatcatggcctcaataatcgcctggggactttcaaacatggcggtggggatgcggtccgccgtcgccagaatacggtcccccgccgtcacgcccattttgatgctcgtaccgccgaagtccacggccaatgcgcagggttctgaaaagctcatggttcatacttatgccacgcaccccctggaatcaacgcaaaaacgcattcacacccatccctttccgcggcatgccgaacttcttgtataaaatacaataaatatcctccagaaagggcttgccagggatgcgccgtccagtccatgataggtgccgtgatgatggaaatgcccggttcggacgaatggttcatgcgccaagccatgaaagaatccagaaaagccctggtgaagggggaggtgcccatcggggccatcgtggtgaaagacggccgcgtgatcggccggggctggaaccaggtggaggccctcaaggacgccacggcccatgcggagatgatcgccctgacggcagcccaggaggcgctgggcgactggcggctggaaggctgcaccctgtacgtcaccaaggaaccgtgccccatgtgcgcgggggccatcgtccactgccgcccggaccgggtggtcttcggctgtccggacgccaggaccggagccgcgggaggctggatcaacctgctggattccaaccctcccctcaaccacaagtgcgaggtgcgtcccggcgttctgggggacgaatgcctgcaccacctccaggaatttttccgtgcggcgcggctggcggccaaagaacggaagaagctggctgcggactcccccgcaatcccggatgaaaacggggaagacggccccgaataaagcactttgcatttgccaaaggagcggactcacggcaagctagcggggctatggaacaccggaacgacaacgagactgcggaagggacggaacgcaagccgtcctggatcaaggtgcgcctgcccaacggccgggaattctgggacgtcaagcagcttgtggaaggcaagcacctgttcaccgtctgtgaagaagcccactgccccaaccgctacgaatgctggaaccagggcacggccactttcatgatcgccggggagcggtgcacgcgcgcctgcgcctattgcgccgtaaaaaccgccaagccctttccgctggatccggaggagccgcagcacgtggcggacgccgtcgtgcacatgaagctgcgccacgccgtcattaccatggtcacccgggacgaccttccggacggagccgccgcccacttcgcccaagtaatccgggccgtcagaaaagccagtccctccaccatcattgaggtgctggcctcggacctgaatgagaagccctcctccatccggacgctgatggcggcacgtccccacatcttcggccacaatctggaaacggtggaacgcctgacgcccatcgtgcgcttccgcgcccagtaccagcgctccctgcgcgtcctccggatggcgctggactgcgtggacggcaaggtttccaccaaaagcggcatcatgctgggcctgggagagacggaagacgagcttttccggtccatggacgacctgctggagcacggcgtcacggtgctgacgctggggcagtacctgcgcccctcccgcaaccacctgccggtggtcaaatacatccatccggacgacttcgtccgttatgaggaggtcgcgcgagccaagggcttcaggcacgtggcgtccgggccgctggtccgcagctcctaccatgccgccaatttcaccccggaagcggatgtgctggaggccattaacgaagatttgagaaaggccggcgaactttagaataaatcttgatatattaacccttcccttttaccatacaggcaattccacgtcattgagaatctcatgagcaaaacacgttccttcatcacggccggggccattctgggcggcacggtcatcgtgacggcggcagtcgcgcccctgttcctgccgaaccagaatatcaagcccctgacatccgcccaggcggcggaaatcaccgcacataccatgaactccaagtgtgcggactgccataagcccggcacccacatttccgaattggtgaacaccctttccggcggcctgctggcgcgccacatccgggacggacagcgcagctacaacatggatgaaccgcccactgccgtgaccctttccaaactggaacacgtgctccagatcaattccatgccacccacctcctacaccatggtgcactggggcagcacgctcacccttccggaaaaagcagccatgctccagtgggtcaaggatgaacgcctgaaaatcttcggcgacatggtgggcaaggagtacgccatcaccgccatctcccccattccagacgcccttcccacggatccggccaaggtggccctgggctacaagctgttccatgacgtgcgcctctccacagacaataccgtttcctgcgcttcctgccactccctggagaaggccggcacggacaacctggccacctccaccggagtccgcggccagaagggaggcatcaacgcccccaccgtcttcaacgccgccttccacaccaagcagttctgggacggacgcgccgccaacctccaggaacaggcgggcggacctcccctgaacccggtggaaatgggttacgaacatccggacgactggaaccagatcgccgccaagctgaaccaggacaccgcgtttgccgcggaattcaggaaggtttatccccagggcttcaacggagaaaccatcacaaacgccatcgcggaatatgaaaagaccctcatcacgccgaacagcccgttcgaccgttatttgaagggtgatgaaaacgccatcagcgagaatgccaagaagggctacaggctcttcctcaagctcggttgccagacctgccacaccggccccgccatgggcggccagtcctttgaatacgccgacctcaagggagacttctttgccggacgcgccaagaccaatgacgacaacggcctgatgaacttttccaagaaggaatcagacaggcacaggttccgcgttcccaccctccgcaacgtggagcttacctggccgtacatgcatgacgcctccgcccagacgctggaggaagccatcaccaagatgtaccactaccagctcggctacgacaaattggacaagaaggaggtgagcctgctggtggccttcctgaaaaccctgaccggggaatacaacggcaagcccgtccagggcgaagtctgccccgcctcctgagccagaggaaagcattttttccagccgcgccatgaaccttcatggcgcggcttttttgtattcccccttccggcttattgccggaacccccccgtttccggcttttcctccgcgtcatacttagattaaactaatgggtaaatgattcatgatgaataatttttatccaaattgaaaacacaggcgcataatatcattgacttactagtttgatgaaactaactttctcccggatttgattcatacacacaccatgccactctccatgctcaacatcggcgatattcgccaagttaacaaaattcatggcagggataaaacccggcgttttctggaaagcctgggcttcgttgccggcagcacggtttccatcgtttctgaaaacggcggaaacttcatcgtcaatgtcaaggggtcccggatagctctcagcaaggctcttgcctgcaagatattcgtggcctgaaccttctcatccaacaatcagccatcattctatgaccaaacaccgtacattaagagacgccctgatcggggaaaccgtgaccgtcgggaaactggcgggggaaggcccggtcagaaggcgcatcatggacatgggagtcaccaagggaacgcagattttcatccgcaaagtcgcccccctgggagatcccattgaagtcactgtccgcggctacgaactctccatccgcaaatcggaagccgagaacatccatatccattgattccgcccttattaccgcacgtttcctgacctgacagcaagacggcgcacccatacatcaagacaaggaaacatccatgagcaacattaccatcgccctggcgggcaatcccaactgcggaaaaaccactctcttcaacgccctgacaggcgccagccagtacgtcgggaactggcccggcgttactgtggaaaaaaaggaaggccgcctgaaaggccacaagaacatcatcattgaagaccttccgggcatttattccctttccccctacaccctggaggaagtcgtcagccggaattacctggtcacggaccatccctccctcatcctgaacctggttgacggcagcaacctggaacgcaatctttacctcaccacccagctttgcgagctgggcgttcccgtcatcatcgccctgaacatgatggacattgtccggaagcgcggcgaccgcattgacacggaaaagctttcccgggatctcggctgccaggtgctggaaatcagcgccctgaaagggaccggaatccgtgaactggtggacgccgtcgtaaaaacggccacctcggaggatgcccgggccccgcgcgccgtgcacttcccgaaccgtctggaaaaagccatcggggaaataggggaaataatcaccggcaaatgcctggaccagcagaaaaaatggtttgccgtcaaggtttttgaaagggaccagaaagtcgcggaccagctcgcgctcacccctgaggagcagtcccgcatcaacgggatcattgaagccatggaacaggagatggatgacgacagcgaatccatcatcaccaacgaacgctacaattccatttcacgcattaccgcggattccgtcgtcaaggccggcatcggcagcctgacgggcagcgacaggatcgaccgcatcatcaccaaccgctggctgggcctccccatctttgccgtcgtcatgtgggcggtgtattacatttccatccagacggtgggcgcatggggaacggactgggccaatgacaccttcttcggggaatgggttccggaatgggtgggcggcctgctggaaagcgccaactgcgccccgtggctggaaagcctgattcaggacggcgtgattgccggcatgggggccgtcctgggcttcctgccgcagatggcggtgctgttcctgtgcctgggtattctggaagattgcggctacatggcccgcgtggccttcatcatggaccgcattttccgcaaattcggcctttccgggaagtccttcatccccatgctcgtttccatgggctgcggcgttccgggcatcatggccacccgcactattgagaatgaaaaggacaggcgcatgaccatcatgaccaccacgttcattccatgcggagctaaaacgcccatcatcgccctgattgcaggcgccttcttcccggaaaattcctgggtggccccgggagcctacttcatcggggtgggcgccatcatcctttccggcctcattttgaaaaagaccgccatgttctccggggatcccacccccttcgtcatggaacttcccatttaccacgttcccgcctggaagaacgtcatcatccacgcgtgggaacgctgcaaggccttcgtgcaaaaagccgggacggttatcttcgtgtccagcgccctgatctggttcctttccagctacaactggaaggttgattccgtggagcagaatgacagcatgctggcctccatcggcaacgtggccgcacccgtcttccagccgctgggctggggcgaatggaaacctaccatggccaccatcaccggactgattgccaaggaaaacgtggtcggcaccttcggcgtcctgtatgcggacggcagttccggggaagaggcggaggaagaacccgccgaaacgcaggaaatgtcccccgccggccaggagctccaggcatccctggagggcgcctctgaagaagctgccgccgaggaagccgccgctgaagaggaggaagatgaagacgctgaaatcagggaaaccggggaccgcctggtccaggcgggagccttcacgttcctgagcgccttctccttcatgattttcaaccttctctgcgccccctgctttgccgccatgggagccatcagaagggaaatgaacagcgccaaatggactttcttcgccatcggctacatgtgcgccctggcgtactgcctggccttcctgatttaccagatgggagcatggctttatgcggaagcttccttcggcatcgggcaggggctcgccgtattgctcctgctgggcctcatttacctggtggtgaagaaaccctccgcaccctccaaataaccctcatacccactcctaacccactcaccaacatgggaacatatatcattgccaccctccttttcctggccctggcctacgcgctgtataaaacgttcagcaagcgcggcaagtgctgcggcaactgtgacgggtgcggcaacggcggcgatagctgctgcggcagcggcggcggttgctgcggaggccaccatcacgacgacgatcaagaaaaacaggactgagcccagtctcagccctttctttcagaacctgcagaccgcccgcggtttgcaggttctttccttctgcgcatgccgcatgcgctccctccttaaccgatccagccgtgctggtacgccgccatggccgcaatcaccagcgcgataaacaggaagatgaaccacatcacattgtggcggtggcggtactccacggccatcaggggctcccattccttttccacaaaggagaagtcgtcaccgctggcaaaacggtcgtacagcatttccagctcctgccccgtcaccccttccggagcggcgaataccggcgggcagcatgagcccgtcttgaacacgatttcacagtggtagatgccgtccgcttccttgtaggactggaggcacgcgccgtcgcgggcgcataccacatggccagtcgttccctcctgcaagcggcgcagagcagtatcacggtcggtcacttcatcatttgaaatttcccattgaaccttactcattctgtcagtttaagacagttcccattcaagtcaacatggttttaaatgtttcctgacgccggaaatgtcatcaattgtcataaatccggcagcgtgcaaggcgctgaccttaacgttcttcttcgtgtttaattcacctaacttgttgttagtcaaaccaaagaactttcaacagatgggaagaagtgctaatctaaccatcagcggctacaaccagccgcacaacataagatgatgaacaagtacacatgtatcatgataggagccgcctgcctgctggcagcctcctgtcaggcggatacggcccgcagggaaccggtgcggaatacggcgccggcctcctccgtacaggcctcttccgcagcgccccagtccggacaacggaatgacggggttcaggaacacaggcgtttcaagcgcctctcgcttcctttgagataaagaataagcaacgccgcaccccctacctgatcgagaatgcgacgttgccgccaggtcatgcagaccccttcaatgcccttgtacgcaggattccgctctctgcatgcagacggacaaggaagacttgattattattgcgcttccacagattcgggacatttcccgcctagaacgtgacgacgcattgtacggagaagatattggcggagttgacgtcatcccgcccggaaggattcttcacatactggtaggaaggctggatgaggcagtacggcgtaatggagaagctgtacgtgcattccagaatcatttcccggtcatgcccgggccgcgtttccgccagcgtgtcggcatccggcttgctcacggagaagcctacgccgaagaagttgccgtccgcttctttcaagccggtcatgacttccagaggtttcttgaaaatgaccccggcggacgcctgggcttccgctccgcagatgttgcctgattcggcgctgctccagccggcgcgggcgaacagggcgaacgggctgctgcccaggtcctgttccaggttgaacgccacgcctccatggttcttgccgtccgcatggaacatgaacggctgcaggcggtacgtgcccgtgccgatgccgaaggccttttcatgcgtccagccgatttcaccgagcaggttgaaggattttccggtcgtgtggtggaacgggttgcggcggggttcattgtccatcatgttgccgcccacctggatgaaccagttttcattgaactggtactgccccacgaacccgaagttggagtcccccagcggaagcacctggttgttgacgaagggagcgccgccgaactgtccgaaggtggtgttggcatacgtattggcgtcaaaatagttcgtctggttgatcatgccgcccatgatgacgagctggccgtccatgaaaccctgggaaaggaggagttccggcaggtagaagtagccgtcttcaaaaacgtcgcagttggcggggccgctcgcgccccaggagtcgtccagcgtggtgcggtgcgtatgcttgttcagggccacggagccggagagctcgctcttgatccaggttccctggttgcggctggatttgaacagctgcagcccggcctgggcgtggaatttgtaccagctctggctggaaccggcagtctcttcgttcgcggccgcatggtggcccttggtatagaggaacgcctgctccaccaggaactggaagccggctttctcgtaagcgcctttatgcagatccgtcagggccctggtcagaagatcgttcggaatgggcgtgctttcatcgccgtattcgtccccgaacaggtcgatgtcgtccagaatggaacctttgccttcagcctcttccgcagccggagcggcggcggtagtggctacggatgccgtaccggccatgcagaagccggagcaggccagcagggcgggtatcatgtagcgtttcttcatagtaatgctgtatcttgagtcttcctcgtcaatcgcggatgttcagccttccatggcggaggagcattcctgctcccggcctgcggcggactgcgcatccacggctttgccgcatgcgcccatacagaactcacagtccccgcagagcaggcggtatctgggacgccggacgagaagcccggccagtttccggtaccggcaaatccggcggaagaaacggtgaagtcctgtatgggtcaagttcatgcaacgcggcaaagttagatagaactaactattgagtcaacactttttctcccttagcccttttccaatttggaactccttccatgaatcacgtttcatacctcttttatgatcaatgtattgaaaaatctttaaaataattttacgtaccgtaaaaaaattagttgaaactaattcaacttgacctgaaacctgcggaacgttacaaaaaagcaggcctattggagatcatccaacccttccgggaaagaaacggctgcatgccgccaaggccggctgaacccaacaaaaaacattaccatgagttacatcaacaacaagggcctctggggcttcgtcggcggagtcatcgccgccgccatcggcacgaaagtggttaaaagccccgctaccaggaaattggccgtccaggggctttccaaagccatgctcatccagcagaaggccatggagcaactggccaatatccgtgaagaagcgcaggacttgtgccacgaggccgccgctgaaaaccgcaagccggaacagtaacaatctcattgttcatcatcatactggggcagtccgtttccttctccgccggcggaacgggcagcctccaacgggggaaacgcacggagaagggcgtttccccctttttcatttttccaaaccgatgcactatcaggttatccaccatacgcccggcaggctccgggtgcgctgcggccgcggcatgttcaaccatgaccaggcctgcggcattgaatgcaggctcctgaagctgaaaggggtcagctccgtcaaggccactccctgcaacgggggggtgttcatcctgtacgaaggggcgaatccccagaccattttcagcgcgctggacaggctcaggccggaaacgctccgcagccatgaaccggaagaacgagcggaagccaggaaactgggccaatccttttcccttaagatagccgggaaagtttcttccttcctgctctgcaaattattcctgccgccccctctcagaatggccaaggctttctggaattacggctcctatttccggcgcggaatggcgggcctgggcagcggcaggctcaatgtggcggttctggacgccgtatccatcggggtctccatcggcaccagggcctacggaacggccaattccatcatgttccttctttccatttcagacctgctggaaaattacacgcggaagaagacccgggcggcgcttgcggccagcctgagcatcaacgtggaccaggtctggagggtggaaaaggacggcatgcgccaggttcccatggaacaaatccggcccggggacaagatccgagtggacgccggcaacgtcatccccgtggacggcgccgtcctgtccggggaggcggaagtgaaccaggccgccatgacgggggaatcggaagcggcagccaagcaggaaggctccgtcgtcttcgccgggaccacgctggaaacaggctccctcgtcatccgggtggacgccatgggcgaccagtcccgcatcaacaacatcatcgccctgattgaccattcggaggaattgaaggcccgcatccagagccgggcggaaaaactcgcggattccatcgttcccctcaccctgctcacggcgggtgcgctgttcctgttcacccggaacatctccaaggcgctctccgtgctgatggtggattattcctgcgccatcaagctcgccacgcccatttccgtcatctccgccatgaaggaagcttccgcgcgcaagatcatgatcaagggcggaaaattcatggagctgttcgccagggcggacaccatcgtttttgacaagacgggcacgctgacctcagcctgcccccaggtaacgcagattgtccccctgagcgactgcagccgggaatacatcctgaaaacggccgcctgcctggaagagcacttcccccacagcgtggcgcgggccgtcgtgcgcaaggcgctggaggaaggcctgcaccatgaggaagagcacgcggaggtggaatacatcgtggcccacggcatctcctcccgcctgcatgggaagaaggtcctcgtgggcagctaccacttcctttttgaagatgaaggcatccccctcacggaagaacagcggcagactatccgcagccatgccaggggcaaatccaacatcttcctggccataggccgcagggcgatcggcatgatcggcgtcagcgaccctcccaggccggaagccagggaaacgatcgcccggctgaagcggcagggcatttcctccatcatcatgctcaccggagacagcgagtccgccgcccgcgccatcagccgccagctgggcatcacggaataccgctcccaggttctgccggaggacaaggcgcgcttcatccagcagttgaagcagtccggaagaacggtgtgcatggtgggtgacggcatcaacgattcccccgccctttcctgcgcggacgtctccgtctccatgaaggattcctccgacatcgcccgtgaagtggcggacatttccctgctgtccagctccctgagtgaactggcggttttaagggaactgagctgcgccgtccttgaaaaaatagagcgcaactaccgcttcatcgtcgggttcaacacctccctgattctgctgggcatgttcgggctgattaccccgtccctttccgcgttcctccacaatgcctccacggtgtacgtcagcgcgcgcagcacgcgccgctgcctgcccccggtcggcactccgcagtaaaaggaaagggatggttcatgtggaaatgaaccatccctttgaaaaacgtcctgggccttcctattctccgctcttccggcaatgctccgtcaggagctggaaccgggaaatttcctccagcgtcatgatgtgttcaatgccgcaggccacttcgtccgcgcgcttctcctccatcttcagcaccgtgatcaggaattctttcaccatggtatggcaggaaataacccggtccgcgtaataacggccctcccgggtcagcacaatgggggaatactgcgtatattcaaccaggccgcgttccttcaactgcttcatggccagggagacggaaggctttttcacgttcagcgcctccgcgatctctcctacggcggcgcaccctttttccagctcgatgttgcggacggcctcaatgtaatcctccaggctgttgctcagctccagggagggaaagtttttgcgtatcatgactgatgcttattaggtttaactaacaaaaacaataacccaagctccggtcaagtcaacctcttcttgaaaaatattaggtgagacaaacttttttcttgcaaaacaagttagattacactaactttcattcatggtcagcccaaacccggaaagaaacaacggaagaaaatgctccggcggcgttcccgccagaacggagtccttcttctccaggttctttcccgcctcgcgcccctgctgctgccggggctgcgccctgaaatgctccgggaaaaattgtccctccggcaacaagggaaaacaggcgcggccaaactccttggggaacgcgtccacaaactgtatggactagtcatccggtgctctaacacattatcgcctaaacacgggcgcgttccccttcccttttttccttcctctgcgggacgcggtcagcggagaaccaccgccggaccgtcatacccttcaggcgtatagctgcggatggagacgcccccctccgccgtcacgtccgccgcccagcactcggcatggtggaagcaggcgcccaaattgacgtatagccgccctccccttttcccggttaccgcacggcggtgcagatggccgaagatgacgacttccgcttccgggaaaaagcgttccgtgaatttccgcatgcgccgcatcatcgtcagccatgccagaagaatctgcacgggccgctccggcggccaggcggaatgcgccagaaaacgcaccagcttgttccggcacgccccggaacgcgtgtaaatggggggaaccagcacgctcatggcgcgcgccagttccagccgccgccgcaaatccgtatccgcctccgggaacgcggcaatcagctcacgggaggcctgcttgtttttcaaatattcccatccccacggggccacctccttgaacagggcatgaccgtgcagggcgcagacgcgtcccccctgcaatttcagcagtccggccttctcatccgggtcatggttgccggccagcagcacgggctgcactccggcatcccggcacatttgcaggaaacgggcgcgtttttccagcccttccgcctggcaggggctttcacgggtttcactgaggtccccgcacaccaccagatgagtgcacccctccagcaggaaagccagctcctccggctcccgggccagcgccttggcatggccgaagtggacgtctgaaatgaaccgggcacgttctcccggagcaaggtcaagttcctgaatcataagggaggagggaggaggaaaacaaccatggaatcaggagcgcagccgctgccgcaccatctcatacaggcacacgcccgtagctacggacacgttcaggcacggaacgctccccttcatcggaatcctgatcaggaagtcgcaattctcttccgtcagccgcctcatgccttccccttccgcgcccatcaccagcgcggccggccccgtgaaatccgtttcatacaggtcgcggtcccccttgtccgaggtgccgaatatccagatgccgcggccctggagctgcttcatggtgcgcgccaggttggtcacctggatgaaaggcaccttttccgccgcccccacggagacgcgcagcacggcctccgtaatgcccacggacttgtcacgcggagcgattacggcatccacgcccgcgccgtccgccgtccgcagaatggctcccaggttgtgggggtcctgcacgcagtccagaatcagcagcagagggttgggggacttgtccagaatcccgtccagcacatcctctcccagcgccttcacggcaattttggccggagcgctgcgcacatgcttgttccggcgcgcctcctgttcgttcccttggggtctcatgcccatgaattagcgtgtttcacgcttcttttccagacaaatatgccccgccgccccatcattgggcgtgacttgagggtctccgttatgctacagttccgtaccattcaagatgaagacgagcgactttttagtcattggggcaggtgttgccggattgagtttcgccttgagagcggcggaacacggcaaggttgccgtcattacaaaaggcaaatttctggattgcagttccgccaaggcgcagggcggcatagccgccgtttgggaccgcaacgactcctttgaagaccacattgcggacacgctggacgccggcgcgggcctctgcaacgaacaggccgtacgcaccattgtggaggaaggccccggcgccatccgggaactgctggaatggggcgtcaattttgaccccggcaaccagggggaggattacgaactggcccgggaggggggccataccaagcggcgcatcctccacgccaaggacgccaccggcctggaaatcacctccaagctgctggaggcggccaagctccaccccaacatccaactgctggaagaccacttcgccatcgacctgattacgacgaccaagctaggcctggtcacggaagaccgcgtgcttggggcctacgtgctggaccgcgcctccggggaagtggaaattttccggtcagaccgcgtgctgctcgccaccggcggctgcggacgcgtgtacctgtacactaccaacaatgattccgccacgggggacggcgtagccatggcctggcgcgcgggagccaccatcgccaacatggaattcgtgcagttccaccccacctgcttcttcaacacccgcgcggaaggagcggaagcgcgctccttcctcatctccgaggccgtgcggggcgaaggcggcgtactgatcggagcggacgggaaggaattcatgcacaagtacgatccccgcaaatccctggccccgcgcgacattaccgcccgcgccgtggactcggaaatgaagaggacgggcagcatgtgcgtctatctggacatctcccataagccggagggcttcgtccaggagcgcttccccctgatttacgagacctgcagccgctacggcatcaaccccgccagggagcccattccggtcgttcccgcagcgcacttccagtgcggcggcgtcctgacggacgtcaacggccagaccagcctggacggcctttacgccgccggggaaaccgggtgcacgggcctacacggcgccaaccgcctggcctccaactccctgctggaatgcgtggtggtcgccaagcgcgcgctggactccatgctctccctccagccgctgagaaaggatgctcccacttcttacgacatccccgcgtggcaccacggggataccgccctgccggacgaactttccgtcatctatcacaattgggatgaaatccgccgcctgatgtgggattatgtctccatcgtgcggaccaacaaaaggctggaccgcgcggccacgcgcctccggatgcttcaccgggaggtgaaggacttctactgggggtaccgcatcacgccggacatcctggaactgcgcaacctggtggcggtggcctccctgatcgtggactgcgccatgcggcgcaatgaaagccgcgggctccacttcaacacggattatcccggcaagctggatcaccgcttcgtcactcaactgcaccgatggtaaaacactggcaacgtcaacaggcattccggaagggttccgctgggaactccttcctttccgcatgcctgcttgcgttgctggccctggctccggcaggggccgccagggcggacatccagacgggccggagcgcaacccgcgccctggcggacagctccggacggcccaaaggccccgtcatcatcacccccacgcagcgggacccgctgcccagggtcatcgtcaaatcgcccgccgcggccgcgggcggcaaacacccggcgccccagccccgcatccttcccaggacggccaggcagagccccggcacctatccctggcggctcaatatcaccgccacggtcttctgggtgggggaggattccacggagcgcaacccggtagccaaccacaagagctcgtgggactccgcctggcgggaaaacttcggcggtttcgacaatccggaccccgtgtgccgcaccgtggacttccgcccgaaaacgttcgttccccggcaaaatcctttttacgtggcgctgccctacaatgacgtttgcaagggagagcacaagacggaggcgtcacgcgtcatcccgtggttccgccgggaatacacggggaaagggcaatccgtctgcaaaggcaggtgggtgcagatcgtctacaacaagcgctcctgctttgcccagtgggaggactgcggccccttcaccacggaagattggccctatgtcttcggcgacaagccccccgtcaacacccagaacaagggagcgggcatcgacatctcccccgccgtgcgcgactacctgggcatcaccggcggaacggccgtcgtccactggcgctttgtggaattctaccgcatcccccgcggcccctggtccaaatggggggataacaaccccttcgtcaattccgaagtgggccccgggagaaaagccctccagtcccgggaagaccgcctgcgccagcagcaggaagccatccagagggagctgttgaaggatccccagaagctcaggagggaactccagggatagtccgttccgccgcggccatgcaacgtccacgcattctacatattttcagccgctacggcgacgtggggggggaggaagtctgcttccgcgccatcacggaagagctgcgagccgtggcggacgtcaccccctttgtctattccaccgcggagctgttccagagtccccacggcgcgctgacgaaaatgcgctacatgctccgcaacagggacgtggaggaaaagctgcgcgaatgcctgcgcagagaccgctatgacgcgtggatcatccacaacacgttcccggccatgtccccctgcgtctacgggctggccctgaagcaatccgttcccgtcatccactacctgcacaactaccgccccggatgcctcaacggggtattctaccgggacggctccccctgcttctcctgtaaaaacggcaactaccttcccggcgtcctgcacgcctgctggcgcggcagcgcggcctattccgccctggcggccgctacgttgtataaaacgcgccgcatgggcacctggaaccgcctttcctcctacatcgccgtcagccgccgccagcgggagctcctcatccaaaccggaataccggaggacaaaatcagggtcatcccccacttcatccggcaaaaaaccacccccgccgaaccacccccgccgaaccacccccgccgggacgttctttacgccggacgccttacgcaggaaaaaggcgtcctcccactggttcaggcgtgggaacgccttgcccctcccggccgcaccctctacctgatgggggacggccccctgcgcggagaactggagcgctacgtcgcttcccgccgccttgaatccatccgcctgaccgggttcattccccatgaggaacagggcgccgtgcgcgccgcctgcggactggccgtggcgccctccctgtgggaggaaaccttcggcatggtcgtcctggaatcatggctccacggcacgcccgtcatcgtcaccccccgcggcgggctgccggagctcatcagccacggccggaacggctggattgcccgggaaccttccacggacgcgctggcggaaacgctgcgcaccgccctggaggaagaggaacgctggccgtccatgggcgcgcacgggcagcagctcctgtcctccacgtattcccccgccgcatggcttcagtccatgggcagccttcttgaggaactccgcctcttccgtcaatcccccaacatcacggcatcatgaaatggtacacctgcactcccgttcccttcaaaggggaccacaccttcttttcccgtgattccggggctttctgcaaagccttccagcggatcggcttggaaagcagggccatcatgcccacgcccgtccaggagggggacgaccccgacctcatccgcacggagtacgccaacctggaagacgccgcttggtggaaatccctgggcattgacggactggtcctgtacgcctggggcacgggcaaatatcttcccatcgccagggccatccatgacgcgggtatcttcctggtggtgtacatggattcctccggactgttttttccgtggcaatactggctccccatcgcggaaaacatgtggaccagggacgtcttcgcccgcggaaaaatcaggggcaccgcttttttcctgctgcgcctgctgaaacagcacacctggaacctggccagccggggaagaagaaaacacctggaccagggggacatggtagccttccccatgccggcagccgtcaaatccattcaggaccgggaatggctctacggaaaatccatcgtccggaaactggccctcattcccaaccccatttcctccacctgccgctatgccggggagaaacgcaacatcatcatggccgtgggccgctgggacgaccttctctacaaacgccccttcctgctgatggccacgctggaacaggctctgccccgcgcaccgcactgggaagcggaaatctacgggaacatccctcccttcctccgggaatggcacggcaatcttccggaagacctccgcgcccgcatccgcctggccggctacctgcccaacgcggagctgcaaaagaaatactcccaagccagaatcagcctctgcacctcccggtccgagggaacgcacgtcgcctctgcggaagcgctctgctccggggcttccgtcgttggtccgcgccttacgcccctgctgaactgcctgcaatggtacgtttcccatgattccggcacgctcagcccaaaagacaccccggaaagcgtctccggggcgctgctggaggaaatccgcgcctgggatgaaggaaaacgcagcccggaggaaatttcccgctactggtgctccctgctgcatgcggagaactcctgcaagcgcatcattgccgcttatgaggccgccaaaggcggcaactgaccgctaattccccaacagggcgcgggcctctatccacacgtcctcccagcttctgtccgccagcgtcccgtaaagggggtgcccccacagccgcgcgcgcatggccaccggagaagccagccccagcagaaaacgcgtcaactgggaagggcgggccagcgcgggcttcctctgcgccgccagctccatgacggcggaacgcagttcttccggaagcggtccgggttcctccaattccatctccgcaggtactgcgccgcagcaccccggacaatgcccgcagggtccggacggctcccggaagccgaagtaggcgtccaagctcctgttgaggcaggcggaagacgtcagcgtggaaacgcacgttttccagcgttccagcccgttcagccgggaccgggaaaaatactgcgcgaattcctccgcggcttcttccgcatcaaacccttccgaatgcaggtgaagggctgtctggcgcaggtccaccttccattccccggaaagggccagctcgtcaagccatgcgccggcttcttcccaggaaatcccccattccgcggccagagcctccacttccccctcccggtggccgtccatccattgcagccgggaacgttcctccccgtcgcggccgcacaggatttcctccatccggaacagggggcgcaccttgtaatacttgtaccccatgccctgttcccggacggaaccggaacgtttcaggtcaaagagcatccggtccaccgccacatccggcaggtcatggaccgcggaggcctcatacagggacacaatatgctcccccctccgggacagcagggatgccagcccttttacgccatggcggtccggctccgccgcatgcaggcggttgaccacggccacgccgtcgcgcccggacagcatcaccaggctgaaggaaggcagcccgtcgcgtccggcacgtccggactcctgcacatacgcctccaggctggcggggggatggtaatgcaccacggagcgcacgtccggcttgtcaatccccatgccgaaggcaatcgtcgccaccagcacgtccgccgcccccgccaggaactcatcctgaaccagcccccgcgtttccggcggcatgcccgcatggtaggacttgacggaaaaaccggccttccccagttcataggaaagattctccgcatccttccgggtgcggatgtacactacggagggacggtggccgtcctctttcaaaaactgcaccagccgcgcggttttatcctgctccttcagcacttccgcctggcggaaaatattcgcccggtacggcgcggcgcggaagatgcagtcctcctgcacgtcaaacaggacggccaggtcacggcacacccgctccgtagccgtggcggtcagcgccatgacgctgcggaatccgtactttctgaaaaaaccgggcagtcccaggtaatcgggacggaagctgtgcccccactccgagaggcaatgggcctcatccaccacgaacaggccgggggaaacaaactccatggcctgctgcatccacggggattccagagactccggcgcggcgaacagcaggcggacgcccccggacttcaggctgtccagcagggcgcccttctcttcctccgccagggaggaatcatacctggccgcagccacgcccagcttttccagcccggtcacctggtcgcgcatcagggcgatcagcggggaaaccaccaccgtcaccccgtctcccagcacccccggaatctggtagcagaggctcttgccggagcccgtaggcaaaatgccgatgcaggaccggcccgccagcgcgcactccatcagctcccgctgcatggggcggaaccgctccttgccgaacaaacgcagggtgtcttccaacggggaggaatgcatggcgaaaatgatatcataacggaaaatcccggcaaaaggaatcctatgacattgacacggtgccctcatcctatatcctccatgcaatatgagacctttgaaaaccatcattgccggaactctggtcctgctggcggcagcccccctcatggcccagaccaaggctgcggggaataaaaaaccgaacatccttttcatcatcacggacgaccacgcctaccagacgctgggcacctccaagaacgattcccccgtcgcgctgcccaacttcaacaagctgggcaggcaaggcatggtctttgaccgcagctactgcgccaactccctgtgcggaccctcccgcgcctgcatcctgaccggaaggcactcccacatgaacggcttcgtcttcaacggccagagaccgctggacggctcccagcccacctacccgaagatgctgcaaaaagccggctaccagacgggcctgttcggcaaatggcacctggaatcagaccccaccggctttgacacgtgggaaatcttccccggacagggcagctactacaatccggatttcatcagcctcaagccgaacgggaagcgccagacgaagcgctttcccggctatgccacggacgtggtcacggacaaatccatccagtggctggaaaaccgggacaaggacaagcctttcctgctcgtcgtgggccacaaggccccccaccgcgcctggtgccccgccctgcgccatctgggcaaggtaaacacgtccaagctgacgccgcccgccaacttccatgacgactacgccaaccgcccggaattcctgaagaaaaaccagcagaccgtagccaggcacatggcgatttattccgacctcaaggtgctcaaggaccaggtgccggaagacatgcgcaagagcatcgtctcccccggctacggctgggacctgggcgaaatcaaccgcatgaccccggaagaacggaagacctggacggattactacgccaagcgcaccaagtccctggtggacggcatgaaatccggaaaattgaaagacccgaaagccttcgcggaatggaaatggcacgcctacatggaggattacctgggctgcctgctttccgtggacgacagcatcggacgcctcatgaaatacctggacaaggaaggcctttccaaagacacgctggtcatctactgcggcgaccagggtttctacatgggcgaacacggcatgtacgacaaacgctggatttttgaggaatcgctccgcatgcccctcatcatgagatggcccggcaaaattcccgcgggcatccgcaacaacaccatggtgcagaacatcgactacgctcccaccattgtttccgcagcaggagcggacaccccggaaaacatggataccttccagggcgtttccctgcttcccacggccttcacgggcaagaaaccggacaactggagggacgccatttactactgtttctacgagaatcccggcgaacacaacgctccgcgccacgacggcatccggacggaccgctacacgctctcctacatctggaccagtgacgaatggatgctctttgacatgaagaaggaccccatgcagatgaagaacgtcattgacgatcccgcctacaagtccaccgtggaaaagctcaagaagcgctacaacgaactccgcaaggcctacaaggtcccggaaaacagccccggaggaaagggaacgcccatccccaaatttgacgcttcctggtaggaagccgttccagcggaacttttcccaggcgccggaagattccggcgcctttttattccctgggtatcccgccccggtaacggctattccaccccgtctttacccgtaaaaacctttgcgggggcccaatccggcgatcttggacaatttattcacggccttctcgcaaaaagcaatcccctggtgaacgccggagagaaaggtaagcaaaggcctttccaccctctccgctccaagctctcccaaaaagaagtccggatccttgtcatcaaatccggggtgccgtaaaaagggatgcctcccgtcaagatggatgactcccttcccggaataaaggcaatccagatggttcatggccgcaacaagcgaccacagcgtctggtcatgcgtatggtccgcaaaattgtcacggcagcggcttttttcctccggagtcggggaagacaccaggctgaactgccggcatagttccatccattcacgaagaatccggacgctttcttccgattttttcaggaaacacggagtcggctgaatcagggggctatgctcgaaatccctgacatccagattcaatgagtcaaaaacgctctgcttgcaccatcttgacaaatctcccgtgtaataggagatattcactcccggcaggatatcctgccccttctcctccagccattggacaagaggctgtactgaatggcggaaaagcgttcccggcggacgccccgcatccgtgtaaagcaaatagtccccttcctgcaggctttccagttccctgagcatgatgaagggtttccagcaccagtaaccggccccatgcaaatgagggtcaaaccagggcacttcgcgcctgatgcctgcggacagcaggcggccaagattccagaaagacaattccacggaaggctccgccagctttaaacttgtcatccgcatccactgccgccagcggtagccgcgtgtcgcgaaagaacaataacgaatagccatgcgcgttgattccgggtaaacgcatggccgggtagaacatgggccatgctttctgcacgccctttctagcgagttgttaatccgcttgtttggagaaaataaaagagaacctgtaaaaatataaccctgaaaaagttgtctgttcaggccatcctacggggatgatggaaaatcttttttattacacgtcaaatatctggaattcgttctccgttaaaattttccattgacagcggattaacaatccacagcgttggccggatacttgccgataaaagtctttcttatattcccgcgtccgcggggggcgcccttatggctgaagctccgcgtccagccgcttatccaggtccatggcggcgccgatagccgcatccatgttataatattcccactccgcaaaacgccccagcaggtaaatgcccctgggttccaggcactccttcagttcccggatgagggcgcggctggacgcatcctgcacgggataggtatattcctcccagtgatgggccaggtaggagggggaaaagggaataagctccaactgccgcctgatttcctcttccgtcatttgctcggaaaactcaatggtggcggtggtaatgtctccgttattgttgttcctggaaaaattccccgtgcagatgatgcggtgggaacggtgggccggggagggcatgtaaatccagctatagccgttagggtcaatccggcacagcacggaggtggtgccgtgggagcgcaatgccgaaatccggggaaggaacggacggagttcatccacgccgggaaagcagtccgcaagctgcctggcattccctgtaaaaacaacccggtcaaacaattctccctgcacgagccattttccatcctgcgcacggatgtccgcagcctccgcccggtacctgaccttcaggccgcgcgccagcgtatccgccaggaactgggagccgccgcgctttgcataaaagaaggagctgtgcaccatggcgctttcgttgacgcgaccaatgttattcaacaggatttccgccacggtcggcatgggcagcttgtcttccagccagtccatggcgattccgttgatgtcctgccgccacaccttgttgttgtagggcgtgaaataaaggtcgttcagggtcttcccgaaacggttccggaaaaattctcccagggaactgggttccgcagggggattcctgtaaagctccagcagttcatggacgatggaggaacggacggcctccggaaactggtcgagatggttctcaatgggataatccaccacagccccgccctccagggaaatgacggcacggcggcgggcggaaacaaaatcacgctccctgtcaaaccgggaccagaaccagtccaatacctcctgccgccgggaattgaacacatgaccgcctaccaggtggtacaaattgccctgcacctccgcgcacttgaccaggccgccggggcggctgtccttctcgtaaaccactacctcatgcccctttttcaagagcattccggccatggacaatccggaaactccggctccgatcacagcatatttcatcatggaataaagaaaatcaatggattaaagaccacgcgcaccgaatttggacaatttcacgggatggaggtacaggtattcctgcggaaaggaggcaagcaatttgcccaggtctccgccggaagaggacaccagcccgtcaatgacggcgttcatggcctcaaaatgttccggatcctgcgggaaccagacgtttccggacttgtactgcgtgtcttccagcgtagccagccgcgttccgggaaggagctgcaaggctgtgggaatagcaagctccacaaacatgttccatgcggaaaatacctcaaggatgcgacaaaaatcgtcaaacttccctttcggaatgcacacgatgtccgaataaccgaagacgacgggataggaataccggtactttttgatccggtgcttccagtggttcagcagatgccagattctgcccttcagcaccttccagttggcatggatgccgccgccgggattccacttgggcaggaacatgcgcacgcgggacagctcgtcatgctgcatgaggttcctggatttcaaaatctgacgggcttccccgtacggcggaacattcttgttgacgctgtccgcatcaatgccggcgggagccgtggaaaaacggtgggcctccaccgttccacggtagcacaccggcagggagacatccacaaaaccgtccaagtagcacgtatcctccccatggattcccagcagggacggcgtggaaaactcgtcaaaccggggattcaggagcaggtcgtctccgatgatgagaatataatcgccatccagattcctgattctttcccgggcctgtaaaatataattataaaactggaatgaattgccgaatacggaacatacgtccggagcgtcccccctgtaatagggcattaattgaagcagcccggaaaaacgccttgaataaatctccctgattaccggaatgttgcggtcatactggtggttgaacaacacaacgagagccgttttccgggaagaagtatccatggtacgtttgatgtaggggagcaacccgcgcccttcaacggaaggcattggaaaaacatggattgcaccctgggagcatgcgccattaaaacggcttcatgaatacattacggatttgaaatccggggtcaagcctgcacatttgaaagaaaaacattttcggaaaattccgtttgccaatactccggcatcgacagagaccgttcttgacgtaaataagctttcttttcatttcaaaaaagccgggagggtataacacaaaaaaatgacgcaggcaggaacgggaacggcgcgacggtgatgaacggcgaagctgcggctccggctcccgggaacggaagattccggcctctcgtggatgaaaccccttccggagcatggcgtaagctcttgcttgcataaccgtttctgcgctccggagggaatgtccatcaggcccgggaggccctggctcccaggcgacacgcacccgtgaaaaagaactgatggagcgttgattcaggatttgcgcccaccatcccggaacataacttttccggactgcagagtctcaccggatttcaaacccgcccgtgaaacagggctgttttaagcctgcaagcaagccgcatgataccagcaggaaacaagccggtgctactttaattttcccgaattcctccctgcgttccggaaccggcttcttcttttctccggcagtggtgtgttcaaggggaaacgttgagttggaatactggctgatataacaggaaagcaaaacatgaagctcactccggaagaatatttctttcattccctccatccagggcgcggagccaaaaccccattctgcgccggaaacggacttcattttcccgctccttcaacaatggccgatgccggaaagcattttctcccctcttttcttttcacggaaaaaacagtgggcacacctgcattccctctcctgctccgccgcgcaaatggaaaaagccgttccaccgggaaagcttcccgatgaaacagccgtaaaacggagaaatccgccagcctaatatctgtaaaagtcgggcttgtacggtccttccaccggaacgccgatgtagtccgcctgttccggacgcaggacggtaagcttgcagccgatcttgccgaggtgcaggcgcgccacctcctcatccagcaccttgggaagcacttccacgcccacggggcggttttcacgggtattccacagttccagctgcgccagaacctggttggcgaagctgttggacatcacgaagctggggtgccccgtggcgcagcccagattgaccaggcggccttccgccagcaggtacaggctgttgccggaggggaacgtgtaacggtccacctgcggcttgatgttcaggtgcttgatgccgggataggtctggagcttgtgcacctggatttcattgtcgaagtggccgatgttgcacacaatggcctggtccttcatcttttccatgtgctcaatgcggatgatgccgcagttccccgtggtggttacgtaaatgtccgcccagcccagcgtgtcctccaccgtcagcacgcggtagccttccatggcggcctggagcgcgcagatggggtctatttccgtcacgaccacctgggcgcccatgccgcgcagggactgggcgcagcccttgcccacgtccccgtagccgcagaccacggccaccttgccagcgatcatgacgtccgtggcgcgcttgatgccgtccaccagggactcgcggcagccgtacaggttgtcaaacttggacttggtcacggaatcgttcacgttgatggccggaatcagcaggcgtcccgcggcctgcatctggtacaggcggtacacgccggtggtcgtttcctcggaaacgcccttcagctcgggcagccagcggtggaaaatgcccggagtttccgcggcaatctttttcaggaggtccttgatgacttcctcctcttccgattcggacggagtgtccacccagccggaaccttcctccatttcatacccgcggtgaatgagcagggtagcgtctccgccgtcgtccacaatcagctgggggcccaggccgtccggaaagttcatggccttccaggtgcagtcccagtaatcccggagcgtttcccccttccaggcgaacacgggcgtgccggatttggcaatggcggcggcggcgtggtcctgggtggagaaaatgttgcagctcgcccagcggacggaggctcccagggccgtcagcgtttcaatcagcacggccgtctgcaccgtcatgtgcagggagcccatgatgcgcacgccctccaggggcctggcggccgcgtacttttcacgcacggccatcaggccgggcatttcatgttccgcaatgtccagttccttgcgtccgaaatccgccaggctgatatcgcgcaccttgtattgttccgtttctgaaaacatgtctgtaaacgttgtcgtgggattaatgaagaagttgtttcagggaggccaggcgcgtttcgtccagttgttcccagggaagctccggattggtgaaatgcccgtagtgcgtcgtcttccggtaaatgggtcggagcaggtcgagctggtccaccatgtccgcaggcttgaaggagaaaatgctttccagcgcgctttcaatggatttttcctccacctttccggtgccgaaggtatccacccggatggaaacgggggtggggtagccgatggcgtaggccacctgcaattcacacttgtccgccagcccggcggctacgatgtgcttggcgacccagcggcacatgtacgccgcggaacggtccaccttggacgggtccttcccggagaaggcgccgccgccgtggcggcccatgccgccgtacgtatccacaatgatcttgcggcccgtcaggccggaatccccgtgggggccgcccaccacgaatttccccgtgggattgatgaaatactccgtcctgtcatccagcagttccgcagggagcacagtcttaataagtctgacgcagtaattgtaaatcgtatcatggtccacttcctccgtgtgctgggtagagatgaccacgttctcaatatggacggggcgtccggcttcatcataagccaccgccacctgggacttgcaatccgggcgcagccagtccacatgcccgcgcttgcggcgcttggccagttccatgagcagcttgtgggcaaacacgatgggggccggcagcagctccggcgtctcgttcgtcgcgaagccgaacatgatgccctggtccccggcgccctgttccgcgtggcccttgccctccgcctcccgggcgtccacgccctgggcgatgtccggagactgttccgtgagcaggttcgtgaaaaagacggtatccgcgtggaacacgtcgtcgtcctgccgattgcagtacccgatctcccggatagcctggcgggcgatcttttccggattgattaccgccttggtcgtcagctctccggcgatgatgaccatgttgctcttcaccaaagtttcgcacgcgacgcggctagttttgtcttgagccaggcaggcgtctaaaatagagtcggaaatgtagtcggccaccttgtccggatggccttctccaacggattccgacgtgaagatgtgagggttgtttttactcatatcgataaatctcgatgcgttgatatattattccaccatgaagtcaatcctaaaaacgctcaaactcctgacggaccccacccgcctgcgcatcatcaacgttctgaatgaagaatccctgagcgttgcggagcttcaggaaattctcggcatggggcagagccgcatctccacgcagcttgcccagctccggcaggaaggagtggtggaggacacccgctccgggaaaaacgttttttacaccctctccctggccaacgacctgcacaacgtggccctgaaagcctgcgaggaactgccggaggcggaaacggacaaaaaagcgctccaggtcattctggacaagcgcaagaaccgcacgcaggcctactttgacgaagtggtgtgccggctgggcaagaactacgcgccgggccgttcctggaaggcgctggccggagccctgctccgcatcctgaactatgacgtggtggcggacctgggcgccggggaaggcttcgtctcccaactcatttcccccagcgccaagcaggtgattgccgtggacaactcccccagcatggtggagctggggcaggaactggcgcgcaagcacgggctggacaatctggaataccgcctgggcgacattgaaacgccgcccattgatcccggcaccgtggacctggccctgctcagccaggccctgcaccatgcccaaaagccggtcaaggccctggaagccgcctggaacatcctgaaacccggaggctgcctggtcgttctggacctgctccagcacgggcaggaggaagcccgcgaactctatgcggaccgctggctgggcttcacgcccgccgctctggaaagcatgctcaaggaagccggcttccggaacatccatacggacattgtggacagggaaccggaacctccccatttccagaccctgatggccgccgcctggaaaccgtaaccggaaggcgccccactcctttttccaaccgttttttcagacaaaattctgccgggcagccgctcacctattgtgaacgttaaatccacattaatcatttcaggcgccgtgcttgccgccgccctgggcgtttactggatagccgccccgcgggaagcctctcccgaggaactgtaccggcaatacatggagctctccccctttgagcaatttgaccagaaggagaaactgctgaaaaaagcggcgcaggctggctgcgttcccgccatgcgccaaatggcggatcataacttcatctccaaaaacgatctcaaagtcgatgaatacaattactggatcaaaaaagcggcggactatggaagcccgcaggcccagtatgaagccttcacggaatgcatttccgaaaacccttccgaagtcctcgcttatctgatacaggcggacagacagtcttacgctcccgcctccctggaactgggacggctgtatgcctgcggagacgaagaatacggcatcatgcgggatgaacggaaagccatggagttttaccaaaaagccgccgcgctgaataacccggaggccctttacctgctctacctgatgggaaaactggaaattccgtccagggaggaagcggaacggcacccggacgcctatgcccgctatcttcaacaggcacagcggcagaaagcgttcccgatcatgtctgccgccatggacggcgaggtccccccgaaccgtcaatccagggagcgtatcagggaatttttaaaaacctacctgccgcaaaacccaaaagccgttgaatggattcaacaaaactacaggtgaaaaacaggccatgcctcattccctgtcctccggagccctttccgcaggaaaggggcgtctgccggattggagggcttcccgcacttcccggacaatgtccatcatctgctccggggaaagctcctctttaccttccacctcttcatccaccagcgctttcatttcctccagcagatgctccggctccagccggtaattgagcaatacccggaaaagctcccttccggcctcctgcaagggaacggacggaaaatcccgcacgcttttcaaatctttttcttcaaaggaattcagaagctttgcataattgcggaaggcgcgtttgaattcctccgggcagccggccaaatctaccgcggcaaggtaccgccggaaggaaatctccgccttcagatgaacggcgtcctcccccgtggattccgccagccacgtttccttctgtttcaggttcaccagcaggagggccttccgcatggcttccctctgcctgcccttgggccccttcttcaatttaaccaggtccaggtccagctctgcggcatccgggctcgccacatcctgggccggagacactccgagagccgccgccatcagaacgaacggcagccacttcctcatgcattcccggatatggaccattgcggtcagcaattacatgaaaagagccgtaaaagcaatccaaatccagcgtttcccggaggagaggcgcatctgttcccggagaaccgccaaagcgcgggtcatgccatccggggagattgacggacaggcggctgtatgagaaaaaacggtctatgctattcgcagtagtgatattcctttccgtggtcgtgctcggcgtcattgccgcgttgcgcttcaccaagggggtcattccgctgcgtacctacgaatcgcgggaattgccgggatttccgggtccggcggggctgattcaccgcctggacggcgcggaaaaacgccagcggaaactggcggaggcccgttttcccggcgtggatgaaaacgggctcatcagccttccccccgcctgggagggcaaggtgaccgcggggcgcctggcctgcgtggcccacacctgggccatgagcagcctggtcagggaagaccctgcggcggccaaagcccgcaaaaccgccgcagcccgcgccatgatgattcctttcttcacagccctcatcctgctggggatgctggctaccgggctgttgaagttccagattgcgctggctatcgggctggcctgctgggccttcttcaccttctccgcccttcccacccagttccgtgaatggaaggcggcggaaatagccaaatccgggctgaaggaagccggattgtggcccctgctgccctccgacgccatggccgtggaacaatgcctgaaagcattgtcatggtgcaatgtggcgggcttccggcgcattcttcccagataggggatgcgccgtgacggcggcgcgcatttttccggttaatccggcttttgagagaaaaaaacttgaaacgggggtgcgggtaacccactcttccaccgtcgtcaaaatttactctcttctgcatgaacgagtccgccaaccctatcatcaagtacttttccgagttcaaaatcctaaaaaccgtatctaaagatttctggctcaccaacgtcgtccagttctttgacggcatggcctacttctccctgattacggtatttgtcctctacctgacggactattgcagtttcaacgatgcggacgcggccctgtgggtggggctgtacaccctgttcatctccgccttcgtctttgcggtgggttccatctgcgacatcatcggcatacggcgcacgtacctgatcggcttcatcatcctcatcgccgggcgtctcatcatgggattcgggccggatctgagccccaccgtggactccgggaggctggtggtcatgacggggattctgatcatgtccttcggcacggcgttcatgtcacccgtcatccagacctccatccggcgcttcgccccgctgaatgcgcgcgccacgggattcaatatttattatctgctgatgaacattgccgccgtgatcgcgaacgtattcctgattgaattcttccgcaagcacttcggcgccgtggacggcggctactggatcatcaacttcggcacgctgatggtgctgctgggctgcattaccacccgcttcattgacgaagacaactacgcggaacccagtgaaaaggaggccaacctgaaagcgcccctccgccggcccctgcagcttttccgggaagtgtggaaggaatccgccttccgcaagctcatcctcttcctggtgctgaccatgggcgtgcgcatcgtcttcacgctgcaattcctggtcatgcccaaatactacgtgcgcaccctgtatgatgactttgccatcggctccatcaatgccatcaacccggccatcatcgtctccggcctcatcctgctcattccggtgctgggacgcttctccaccgtcagcctcatgatcgtgggcatgtccatttccgctttctcccttgtcttcatggccattcccattgaatggtactatttggtgcccggcattgaaacgcgctcccaggcgtatctggtagccattgtgacgcagattctggtgttcgcgttcggggaactgctgttctctccccgtttctcggaatatgtggcccgtgtggcgcccaaggacaaggtggcctcctacatgtccctggcggcattgcccatgttcattgccaagcccatcaacggcatcatcggtggcctgctggtcgcctacctctgctacgacggcatctgcgccaagatggataccgggcacatcggcttctgggattcacccgaattcatgtggaccatttacctggccatggccgtcatcagccccatcgccatcatcatgacccgcaagaccatcacctccgaccacccggaggaagacgcggactccccgcccattgcggccattgaaacggaaatggaccccgccgttacggcggaagaactcacggaagccaactcctaacctctcaagacgatgaaccagcacacgcgcaacatcattgtggactccctcatcctggtggctttcagttccattctgggcgggatcagcctggtggtttccaaatccttctccggagaccccaatccggccctggaccttatcaccgtgatgaaaaaagcggaggccaaggaagtcaatgcctcctccgaacaggaggaacaggaagccagagtcaaggggatgaaggagttcgaccaaaccctggaagaaggggagcaactggcggcgaaggaaggaaaagccttcgtcaacatgacggacccccacggcagaactcccgtcatgtgggtgtgctacgccaactacaacaacattgaaaccacgctgaagctggaagccaagcgtgcgccctacctgggacgcctgctggaagacccccgcgtggaaatcgaccagaaggacaaggacggatggaccgccctgcactgggcgtcctggagcggcctggaccgcttgtccgacatgctgattgaaaagaaggcggacatcaacaaccgggaaggcaacggctttacgccgctgatgctggcggccatgcgcggcaacttccaggtggcggccctgctgctggaaaaaggggcggacatgaatgccgtcaacaaattcggcaagaacgcccttcaactggcggaggaaggggcccttgcctaccaatccagctttgacctgaccaagacggaagtttccaaggccccggtgaacacctttgcacaggcttatgaaaaagccgttgcggccctctcgcctgaacacgcccccgaattcatggaagccatgaaaaaggcggtaggccgccagtcctttgtggaaacggagtacgttctccagctcattacgcgctccctgatctccaaaaacctgttcacggaggaacaggccggaaaattcaaggaggaaatcaccggagccgtagcggaaaactcccagatcattgacgtgcgcggcgtagcctttgaacacaccgtggacctgctccgtaaagcggctgggaaataacagcccggtttcttccaggttccgacatccgccactttgctcttgacgctttcacggctcctttctaggattcgcggcataccatggttagagcattgcgcaacggcatcatgctgctcacccttctgctggtcattgtaggcggaacgggcatggtttccgtatgcccctgccatcaggaggtcttcctcttttcctgctcctgccatcacgatgccgcaccctgcggatgccgtggggaccacggtcccggcagcagcacttccagcccgctggccgggcacctctgcgaacaccagcgtctggagattgacgacctgacgctgcccgttcttcatgcgccgcttccccagccctgcattatctggcagaccttcccggatttccatcatctggcacagtctcttcttttaacaagccaaacatcggattccgcaatacccgccccccctgaccccttcagggacgacggcccgatacatgaaggctttcaacttcccctgctgatttaacggccctttttcggaaacgtccctgggacgtttccggctgaacgctgcttgttgattgcgtccggccttatttgtttccgcggaattatttgccgcattgtccaaacctgattggaccgaactatttctattctctttttcatcatgaaatccataccatttttcgctgggctaggcatgaccgccttcctcagctcatgcagcgtctatcacagcgcacccatcgacctgaacgcggaggaagcctcctggaaagaggaatcccgcgtggacacacacatatccgttacccggaaccaggcacgccagatcggcctggtcatgaatccggatctgaacaaggcacgcctgaaactggcttccagcaatgaagcagccaaacaatcgggctggtggaacgatccgtccttttcctgggatattgaacaagtcctccaggaaaatacgctcaacatgtccggcagcctgggcttcaccattcccgtaacgggtcttcccgccctggaaaaaaaggtggcggaacagtacaaggaggcggacttctggaccctccgccaggcggaactggattttctcagttccctggaccaggcctggagcaagctggccgttacccagcgccgcaaggcagtcatccgggaacgcctggatgcggtgcggcaggaaaacggcgtgattgaaaaactcattggcgcaggagaagtggaattttcctcccgccaggtggcttcccagcgcatgaacgacgccatccgggaactccagaccgtgacggaaacggaactggagcagaagatggagctggtcaggctgatggggctgcatccctccgcggcacggaagctcggcttcctgacgggacagggtttccaactgcccgccgccgttccggcccccggccccgccgccctggcctcagccccgaaaatcaaggcccaactggcaacctacgccaccacggaaaccctgttcaagacggagatccgccggcagtacccggaactggagctcgggccctccttcacccgtgacgacggggaaaaggaagtgggcggagaaatagggttcaatctccccctctggaaccgcaaccgcaaggccattgcggaagcgcgcggcacaaggaacctgtccaggcaggaaaccatccagctttggaaaacggagttgttcaacgcccgacagcttgacgccagccagcagatggtgctccgccactgccggacggagcttcagcgcatggagtccttcgcctcctccgtccggaccatggaaaaactgcacggcatcggggaagcctccctgctggagctggcggaaaaccgccaccagctttatgaaagccgtctggctttcctggacaatctggacaagctgctggccattcaggcccagctgcgctacctcacccacgccaaccttcaatccaaataaaaatcttcatcattttaacgaacatgaaacgtctctatttttccatcatcctgggcctgactcccgttttcagcctcaatcccgcacgcggagagcagccggcacctacggaacacaaacacgaggacggcaccgcctgcacggcggaccacggccatgaagaccaccagcacaaggaaggggaaacctgcgccgagggccacgcccatgaggaacacaagcacgcggacggctccgtctgcacaggcgaccacgagcctgagggccaccagcatgcagagggggaagcctgcacgggcgaccacgaacatgaagaggccgcggagaaaggttccggccagccgggggacatgattcccgtgcatgtggatgaaaaggcgcgccattccctggacatgcgctttgaaaaggtgacggaagccactcacggcgcggaaaaaacccttcacggccagatggttattcctccccatgcggtaacgacgtacgcccttcccgccgccgggcgcgtcaccttcaacgtaaagtccgcccagcaggtacgcaagggggaactgctgtacacgctggcctcaccggacatcgtggagatggaaggaaacgcctcccaggcgcaggctgcccttgaccgcgccgcggcggaacttaataccctcaaggaacgccgggcccaactggaaaaaataggcacccgtaacagtgaattgaacacctccatccagttcaaggaagcggaaatccacagcctccgggccgccctggacgccagcaataataaactgaagctggtgacggattccggagctttgaaaaacaacctcctttacgtgtacgccgcggcggacggctccgtccagtccgtgaacatgacccagggttcctggggggaacagggcgcgcccgccctcgtcatgaccaacaagggggaactggaattcgccaccaccatttacggggctgaccccgtccattatgcgaaggcccagctggccctgaccagcggaaaaaatacggaagtgctggacggcaccctgcgggtggcggaccaggtggaccccgccacgcagtcccgtgccctgtacttcgttccggaccgcatgccggaagggacgcatgccggacagcttgcccggctggacctgtattcccatgacgccgctacggacggatttattcccgttcccaacagcgccgtcgtcaaggtgggggtgaacgacgtggtcttcatcaaggcggcggacgataccttcgtcatgaagaaggtggaaacgctgcccgcacggcagggaaaaacgcccgtcaaggggttgacgccgggacaaaccatcgtgaccaaaggcggctatgaattgaaatacatcctgcccacaggagacgccggcagcaagaaggcggccgggcatttccatgcggacggccagttccacgaaggggaacattgattttcagctcaacgtgattagagaacggttaatagaaacaggaattcgatgaactttctaatttcattctgcctgaataacagaatcaccgtgattctgctgacaattgcgctggcggtcatcagcattttcgtggtgaaaaatattcccgtggacgtgtttccggaactgaaggttccgcgcgtcaccatccagacggaggcccccggcctcaccgcggaggaagtggagcagtacatcaccattcccattgagtccgccatgaacggcaccgccggggtcaagggcgtgcgctcctcctccggcagcggcctctccttcgtatgggtggactttgactgggacaaggacatttaccaggcccgccaaatcgtaacggaacgcctgggcgcggtccgggagtccttgccggaaggcacgtccccggagctggcccccatcgtctccgtaacgggggagatcatgctgatcgccctgacgggggacaaggacacctccacgctggacatgcggcaattggcggaatacaagctgcgcacgcgcctgctggccatccccggcgtgggacaggtcacggtgctgggcggccgcctgccggaataccaggtggtttacgatcccaacaagctcaagctggcaggggtggacctttccagcctgaaaacggccattgaggaatcccagtcttccgtgcccgccgggtacctggaggacgtggccgggcaggagctccccattcagcaggatacccgcaccgccaatattgaacagctgaaccgcgccctggttccggaccacgcctccggcattctccggcttcaggacgtagcggaggtcaagatagacggcgcgccgcgacggggcgacgccggattcatgggagaagacgccgtggtgctttccgtgcagaaggtgccgggagccaatacgctggccctgacgcaggctgtggacgcagccgtcaaggagttcagccagagtcagcttcccaagggcatgaaactgcacacgaccgcctaccgccaggcggatttcattgaaatgtccctggacaacggcacggagaccctgctcattgcgggagcagtggtcatgatcgtcatcttcctgacgctgctgaacctgcgcacggccatcatcacgctgatttccatgcccctgtccgtcctgttcgggatgatgatgttccccgtcttcgggctggccatcaacatcatgaccctgggcggcctggccgtagccgtgggggacgtggtggacaacgccatcattttcgtggaaatagcctggcggcacctgaaccggaacgccgccctgccggaggacaggcgcaagagcaagtatgaggtgctgatggaggccaagggggaaatcgtgggttccatctccttctcctccgtcatcatcctgctggtgttcacgccggtgctcttcctgtccgggctggaaggccagttcttccgccccctgggcatctcctacatgctggccctgctctcctccctcatcgtagccgtcaccattaccccggtgctctgctacatgtggttcaagaagagcaaaaacgccgccacgctggaaagcggggattccttcagctcccgccttatcaagcgcatttatgcgcccatccttgagttctgcctgcgcttctccaagacggtctgcgccatcatggcggccatcacgctgctggcgctgtggctggggtccaccttcggaaccagcttcctgccgccgttcaacgaggactgctacacggtcttcgtcagcacggtgccgggcacttccctggatgaaacggagcgcatctcccggacggtgatgaaggacattgaacgcattccgggcgttctcagcgtcacccagcgcacgggacgcgcggaaaacgacgaacacgcggaacccgtcagcgcctccgaactgctcgtgcgcgtagacctggagaaggaccagaaggaactgcgcgccgccatcaagaagtgcattgacgatattcccggcaccagctccatgatcggctatccgctggcgcaccgcatcagctccgccctctccggctccaactcggaaatcgccatcaatatttacggcacggagctgccccagctccgcctggcggcccagaaggccaaggagattctggcaaagatgccggaagtggcggacgcgcgcgccaaccgggaaatcatggtggataccatccgcgtgcagtataaccaggaagccctggcctcccacggcctgaccatggcgaacgccgcggaacaggtttccacggccatgaacggccagaagctgggggaagtgatcaagaaccaggaccactggaacattgtcctgcgcattgatcccaggctgaagacgtccattgaagacatcaagaacctggaactcatttcccccaataaaaagaccgtgcgcctggccgacgtggcgcaggtgtaccgggaggaggtctccaacctcatcctgagggacaacaccatgcggaaggccatgatctcctgcaacccctcccccaattccaacctgggggacttggcgaaagcctgccgggagcaattggacccggtgatgaacgccatgggctgcacggtggattatgacggcaccatcaaggcgcgggaatctgcctccgagcggctttacgtgctgggggccatcgtcatggtgctcattgtgctgctgctttcctccgcgctggggagcgtccgccgcgccatgctgacgctggtgaacattccgctgtgcctggtgggcggcatcgtagccgtgttcctggcttctcccggcacgctgtcctccctgttcggcgccgcgtacattccgcccatcctctccgtggcttccatcgtgggcttcgtgacggtcatcggctttgccatccgcagcggcctgatcctgctcaacaggtaccgggcgctggaacacaagggcatgaacccggcggaagccatccgggaaggttcgctggaacgcgtggttcccatcatcatgacctcccttacaacggtgctcggcctgctccccctgatctgggccattgacaagcccgggggcgaactgctcgggccgctggccatcgtccagttcggcggactggtttcagccaccatcctgaacctgctcatcattccggccacagccaaactcttctcccgctggatttcctcccgccggaaagaattggaagcaacctcctgatccattcgggattccagcggcggaaccggggaaggacgaggccccggttgcgccttttacaatgacagacgtaacaagtccttgccttccgggccgataaggagcacacatgggtgcttaagcttcaccgtcatgcccaaacggaaatccaccagagagcacctgctcaatacgggagccatgatcgtcggggaatccgggctccgcgctctcaccatccgcggcctgtccctgcgcgccggcaccaatacggggagctttgtctatcacttcggcaaccgggaagcttttctgaacgaactgctggaacgctggtacgaaccgttgttcaccggcgtcagaacccacgccaacattcatcttccggcctttgaaaaactggaagccatcctggaagacgtcatggagttcctgctgcgccacggccagttcattgcccagctggtgctggacgccctggcgggagaacgggcggccatccgcttcatttcaggaatccatacgcgccatcccctcgtcctgctggaaaccatacgggaagcccaggaggaaggttccgtgctccagggagaccccatgaacatcctcatctacctcgtctgctgcggcggggctccttttatcctttccggacaactccaggtacacgacccgaatgccgtgcggcccgtgctggatctgctgggctccatcctcaatgacccggagagcgccaggcagcgcatgacctgggcgctccgcggcatacgccagtcctgagaactctacgggactccggaaataccacgttgcgccgcgctcttcccgcaaagctggagcgccgcaggatttgcgggccatgggctttcccttaccgcctccaatgggggcggtggggcggacggggcggaggaggcggaggattgtgatgatgccagtcattgcgatacctgtccttgtcgcggtcatgctggaccgccgcgccgatggcagccccggcggccagcgcgcccacgccgatggcggcggccccgccaggcgtcacggtgctgtttccgtaactgtccgtcgtgcaggacggcatcagggaaagagacagcccggccaggggaaggagccagagggatttgatatgcttgttcatggtgtgaaatattggtaatgccggcagcccggcttacatccagtaagcgcggcgtgcccgcatgatttgtttaagcatgtcacagcccggagagaaattcccggaatcatgacgcctgttatgcacagcggaccctttggaacgccctgttccggcgctcctggacacgaaaatccgcatgcgctgcaaaagaacagacatgcggatgtagaaagcgttcatcttccggaaagctccggaaaagtccgcccggattatttctgctccgcagcgggttcgatgcggacggggctctgaatatcaaacaggctcttgcgcagcaggtagcctccgcgctggaggacaaacgcgctggacgggaacttttccgccaattcacggtaaaaggctcccgcggcggcattgtccttcttcgcccgggcaatgtcccccaggcacatggtggcaaaaccggaaaaagtgggatcccccgcgtccaccacggaacggaacaggccatccgcctcatccgccttcccgcggttcatcaggcggcatgccagggtaacggaagcctgggccttccattcctccgtgggagcggaatcaataaaagctttcatcctggctacgccttcatcctccttgccggcgttccacagggcgaccgcctgaagataggtggcggtgacggcggcgcgggaatcgtcaaaatccgccaccacctgctgaagcccctgttcattcagggagatttccccggtggcgggggattccggcatggcggccaccagcgcggcgcctgcctttctttccatggaatcctgcatgccgttgtaaatgatccatccggcggctccgaggacgcacagcagcacgaccagcgcaaccttgccgtaatgttcatccaaaaactgttcatgcttggccggaccgacggagatttccgcaaacgcgcttccgtcgcccatcggcatgttgtccatggcccgtttaatatccttgatatccataatatgttgaagaggtttctatcgtgttgtcccggtcaaatcaatcagctttttacttatcttcgccatgttccagaagctggagggaatccttcaggcccaggttcctgtagatctgccgcgtggcgcggctctggttgagcgtataaaaatgaatgccgtccacgccggaatccagcagctccgcacattggctggaggcgtactggatgcctacctcctgaacggcgtccggattggagccggcgcgtttcagcgccttgagcagccgggccggaaaacacgtgcccccggaaagctccgccatgcggttcatgccggacaggctggttacgggcatgattccggccagaatgggcaccttgatgccggccagcaggcagcgttcccggtaatccagaaaagaatggttgtcaaaaaacaactgggtgcagatgtagtctgcgccggcctccaccttcgctttcagaaaatccatctcgcgcaggcggttgggcgtggacggatggccttcagggaagccggccacgcctatggcgaacccgtccggatcaggatggcgtccggattcgttatattcacgaataaaagccaccagttccgccgcatggcggaagccatccgcatcacggttgtaattttccgtgccgcgcgggggatctccccgcagggccagaacggcccgcacccctgcctgggcgtactggtccagaatgctccatacttcctcccggctatggcctacgcaagtaaggtggggcaccgtgggaatgcgggattcatgctggatgcgcagcaccacctcccgggtaagctcacgggtggagccgcccgcgccgtacgtcacgctgacaaaactgggatggtacggttccagttcacgaatggtctggtacagggccgccgcagcctgctcgttcttgggcgggaaaaattcaaaggacagactggggcccgcgcccgactgcaatctttctctcagatgcactttttctttatttggcttggctctatccggacccgcattacggctccatgggaatcatcaccggctggggagccgccgcaggagcgggagcggcagacggggccgcgccgggctcgccttctcccatcatgttttcctgccagcttgcgggcgggacaatcacttcatcccccggcttgatgggctccttgtcattgttgtcaaaaagcgtgttgcgcttcacgtaggactggaacaccttcccgtccgggtcaactccgtcgataatcagggagacaaagatgcttccgcgcctgcggatgcccagttcctgccctactttcaggtcaggctggccgatggactggaacaggacaaggttggcgtcacggtagtattccgtcacgcgtcccacctgttcggcgtccttgatctcattgagccattgcaggcgggggtctcccttttcaatgctccggcgtgccagcagggcgcgttcctcctccgccatggcgtggcgcttcttcaaatcttcattctccttcttcatccgttccagctcggccgtggcatgggccagctcctcgctcaccaccgggtccgccacgactaccggctgaacggcggtgccgggcgtctgcgtgggcatgggaaggtaaggagagggattgacggctactggagcgggcacgggggctatctgctgctgttgaatcacatccatccttgaggaaatgttcacatagatcattcccagaacggccagcaccaccaccaggaacaccagaataaggatgcggaaattgctcatgtcgtcaaatggtagagggattattgaataaaattagtaggaatagttgagatagaactggaattgtcctccgcggtcaatggcgttgttcttctgaatcggaatggcatagtccaccgccagaggaccgatgggcaggttcaggcgcaggccgatcccgtagtcggaaacgatcttggatgcgctgaagtcaaaggcgtccccgttgacgaagccgatgtcgtagaacacggcgacgcgcacttcttcaatcaccggaatggaatattcaaactggcagaagaaggaggaacggccgcccatcgtttcatcaccgctcaaagccggattgtacggagccacgtcccggaagcggaagccgcgcatgttgtacgggccgccgaggtagaggcgttcaaaaatgggtacgtcatggtcgccgtaggaatccacggtggccgcaccggcattgatgctgaaaatggtgtctccgcgcaagttccagtaataagagccgttgatgccgaagttgtaagtcttcacatcgccgcccaggccggaataaccggccagcacttcaaacttgccgcccttgcgggggaagatttgcgcgtcacgggtatcaatggtgtaggaaagttccacgtggctgcgcaggtaatcgccgtcctgcagccagaagaagatgggggcgttacccttggcgtcaatctggtactgttccaggcggtattccagcttcacgtaatccagttccccgatcggtttgcgcagggaaacggcaaagccgtagttctgctggtcgtaatagtcggagaagtacgtggaattgctgtagaagatttccgtgccgaaggccagcttgcggtgcaggaaccacgggtccacccaggagatgctggcatcctgcgtttcaaaacccacgcgggtattgatggcgaagcgctggccgccgcccacgaaggaggaccagtcatacatgtcgaagttggactgggtgatgcccgcgaacaggtacacgctttcaatggaggagaacgccacgccaatgttcagggaaccggtgcgtttttccgccacttcaatgttgatgtcacggtagccgggccgcgtggaacccacctgggccacgtccaccatgtcaaaatagttcaggttctggagacgcttctgggcggtatccaggtccacggagttcatggggtcgttggactggaggggtagttcctggcggatgacgtaatccttggtgcggttgttcccggtcaggcggatgttgcctacgcggtaggggctgccttccgtcacatggtaaacgatgttgatctgcccgtagccggtcctgggatcaatgcccacttcctggatgtccgggcgcacggcggcgtccgcatacccgcgggagccgtaataacggcgaatcatcgtcacgtcatcggccaccttctgggcggaataggtatccccgttgtacatgctcaagccgggaatcagctcctgggccgtaaacaccttggtggggccgaaggcgacctgattgaccttgtagcgccgcccttcggtaagcgtgatcctcatcgtcagcttctgctcgttgcccttgccggcgtcaaaatattccaccttgtccagcttgacgcgcaggtagcccttgttgcggtaataagtcaccagttccgccagatcgtcctccaattgctcgcggtcaatgcggccggacttggtaatccaggtcagccagcccttctccttggtcttcatcacctggcggaggtccttggcgctgatgtggtcgttgcctacaaaatcgatgttgatgatattggccttcttgccttcattgatgtcaaagaccacgtccacaaagccggggcgctccgtcttctggtaaaaataggaaacgcgcacatccggataccgggcttcctgataataggtgcgcagcttggagatggcgctgctgagggccttgtcgctgagggcttcccctcccttcaagccgcattcctcggaaaggtcccggttgtcgaacgcggtgttgccgcggaagcccacgccgcccagcaggttctgggccgccatttcaaacaccacggtcacgccgtcgccggaaggttccacagccaccgtcgtattgccgcctaccaggccgctttccagcagccgttccaagtccttgttcaccacttccggggaataattggtgcccggctgggtagccagcaggtttttcaggcggtcttcggacacggtcttgccggtgctcctgtaacgcacggagacgcttttcacgggacgcccctcatacgcctggtcaccgggcagaagccccgtttccggaccgagttcccgcaccacctgttccggggtcattacggaaccgtagccgcctctgttaagggaagtcttatcctgggccaaagcagccgaacatgctatcaggggaaaggaaacacacaaaaaaacgggacgaatcatgagagctgaacttaatgcttgggatataaaggacttttccgtccgcatagtcaagacgtgattccgcgtagaacgcagttgccctgcatttcttacgttgcgcgcgcatgtgcgcctgagaaaggcaattgtgtcattcccgtgcaatagcttgcactccagatacccgctcattacatttattgccgctcgtgttttgaccgctgccgccataccggagccgagacagaaccactttcaattaacactgaccgtattatttatggaaatcaacgttgatattcaaccggactgcacagccacgctgaaagcttccatccccgcagaaaccacggccgcgcgccgcgcctctattgtggattcctacgccggcaaagccaagctgcccggcttccgccccggcaaaacgcccaagtccatcattgaaaaacgtttcaagaaggaaattgaagaagaactgctggacactctttttgaaacggcctgctccgccgctctggaagaaaatcccaaattgaaagtgctcaacttcggcaagccggaacaatccctcgacgaccagggaaattacaccgccaccagcgcgatgaccgtggttcccgaattcgaactgccggaatacaagggcatcgaagtcaaggtcccctcctccgaagtgacggaagcggacgtggaggaagccctgaactccctggccgaacagattgcggaatttacccccgtggaccgcgccgcgaagaaggatgacgtggcgatcattgatttcaagaccaccctggacggcaagcccgtagcggaagccgcgggcaagcccgtaggcttcctggaaggccgcgacggccagtggatgaaggtggaggaagaccagttcctgcccggcttcgcctccgccctggaaggcttgaaggccggcgacagcaaggatatcaccgtcaccattccggataccttcccgattgcggaactgcgcggcaaggaactcgtgttccacaccaccgtgaaggaagtgcgtgaaaagcagctcccggccatggatgacgcctttgcggaaaaggtgcttcccggcaagaacctggaagaactgaaaaccgccctgaaggaaaacctggcccagcgcaagaccatgcagattgacgaagccaaggccgaccagatcacggaaaagctggcggacatgcttgacttcaacctgccggaagccgtcgtggaacgcgaagtgtacggcatcctccagcagaagatgcagcaggccatgtacagcgggaacgccccggcggacatggacaagtttgtggaggaagcccgcgaagaagccagaaaggaagccaagcgcaacctcaaggtcttcttcatgctccaggaagtggcccaggtggaaaaaatcgccgtcacggaaatggaactctacaatgaagtggcccgccaggcccgccagcagaaaaagaacctcaagtcctacatccgcgaacttcagcgcgaaggccgcgtgcatggcatcagaatgagcctgctgacagccaaggttctggacttcctgacaaaagaggccaaagtaacggtagacgagcaataaccctcctctgcacaagacaccttaccagggggagttggcgcgcacatgcccgactcccccgttttgcatcctgcagacgggtagcatacattaaataaaacaacatcccatcttcaacaaacatgtttcaagaccaatcttccaaatcaggccccatgaacgcctactacgtccccatggtggtggagcaggacggccgcggcgaacgagcctttgacatttactcccgcctcctgaaggaccgcgtcatcttcatcggttccgccattgacgacgatgtggcgaactccgtgattgcccagcttctgttcctccagatggccgacccgaaaaaagacatccacgtgtatatcaactcccccggcggctccgtcaccgcgggcctggcgatttacgacacgatgcagttcgtctcctgtgacgtgaacacgtactgcctgggcatcgccgcctccatggggtccgtccttctggcggcgggcacgcccggcaagcgcttctgcctgccgaactcccatgtgatgatccaccaggtttccggcggcgcccagggcaccgcctccgacgtggaacgcaccatcggcttcatgttcaacctcaagaagcgcctcaacggcattctggccaagcacaccggcaaaacggaaaagcagattgaaaaggacgccgaccgcgacaactacatgaccgctgaggaagccgcggcctacggcttggtggacaaggtgctgacgcatcattccgacggacgggacgacaagaaaaaggccaaggcctgacccctgcctcccccatttctctctccctgaaaaaccatgtccggttccaaccctcatattcctgcctgttcctgctgcggcaagcccgggaacaaggtggacaagctcatccagatagcggaagacttctatatctgcaacaattgcgttgaaatttgcgtcaacatgattgtgaaggataccggccttccgctggcgacccgcttcatccgcggcattctgagcatggagccctccgcctatgccatgtgccaggcggaggcccgcaaggccgctgccgcggatatgctcaaggaaacgccgggagccccggcctcctacgaaggaccgctgcccacgccggaagaaatgtgcgccacgctcaaccagtacgtcattggccaggattacgccaaaaaagtgctctccgtagccgtgtacaaccactacatgcgcctgcgccagagcgccgtgatgctggaggacgaatccctggacgacgtggaaattgaaaaatccaacatcctgctggccggccctaccggctccggaaaaaccctgctggcgaaaacgctggcgaaaatgctcaacgtccccttctgcattgtggacgccaccacgctgacggaagccggctacgtgggggaagacgtggaaaacatcatcctgcgccttctccaggccgcgaactttgacgtagccaaggcggaacagggcatcatctatgtggatgaaatcgacaagatcggccgcaagacccagaacgtctccgtcacgcgggacgtctccggggaaggcgtgcagcaggccctgctgaaaatcattgaaggcaccatctgcaacgttccgcccaccgggggccgcaaacacccgcagcaggaatacatccgcgtcaacacggaaaaaatcctcttcatcgtgggcggggccttcgtgggactggaagacatcatccgcaaacgcctcggcgccacccagatggggttcggagccatcacggaacagcgcgaccgcaaggaatactcggaagaggaagtcctggcccaggcgatgccggaagacctcttctccttcggcatgattccggagctcgtaggacgcctgcccatcttctgcccgctctccaagctggatgaaggccagctcgtccgcctgctcacggaacctaaaaacgccctggtcaagcaatactccaaactgctcgccatgtacggcgccaggctggatgtgcagccggacgccctgaaagccatggccgcggaagccatggaacgcggcacgggagcccgcgccctgcgttccatctttgaaaccctcatgctggacgtcatgtacaaggtgcccagcatggaagacgcggactccgtcaccatcaccagggaaacggttaccgacaaaaaaccggcgcaaatccgccaggcctcctaactcccccgcttctccgccatgccggaatccctcaccgttctgggaatagaatcctcctgtgatgaaacggcggtcgccatcctgcgttccgccggggaggaaaaagcgccggaaatactctcctccatcatctcctcccagatcgccatccaccgccggcacggcggcgtggtgccggagctggcctcccgcaaccactcggcggaccttcccggagtcatccgggccgcgtgccgtgaagccggcgtgaccccggcggacatcgatgtcttcggcgccacgggcggccccggcctggtagccgccctgctggtgggcaacagcacggccaaggcgctggcgctggcgacgggaaagcccttcgtctccgtcaaccatctggaaggccatttgctctcccccttccttaaacgtcccggaggccccgttccccatctgggcatggtcgtctccggcggccacaccctctttgtggatgtgcgcggcgtgggggactaccgcctcctgggccgttccctggacgacgccgcaggggaagcctttgacaaggtgggaaaaatgctcggcctcccctaccccggcggtccggaaatcgaccgcatggcagcgcacggcgacccgcaggccttctccttcccccgcgccctgatgaaggagcacacggccaatgtctccttctccggcctgaaaacggccgttctctacaccctccccaggctgacggcaagcggcgaccctcacgacctgccggaacagaccctgcgcgatctctgcgcctccttccagcgtgccgtgacggacgtactgattcacaaggcgctgcatgccctgcgcgtttccggccaccgcaccctttccgtttccggcggcgtctcctgcaacggggaactgcgctcccgcctgaaagccgcctgtgaccgtgaaaacgtggaactggtcctgccggactttgacctgacgacggacaatgccgccatgatcgcctatgtcacctgccttaaagcccgcaggggactgttccactctctggatgaagacattgaccccaatctcaaattgacggaggaactgaacagatccaaatattcaacgcattcctgataaagatattacacatgaacaccccgtacttgcggcataatgataaaaaaatgttcatgttttcattgacatcccgtatttaaaaacgtaacatagcgtccgcttttcgtcaggcaacacgggaggatgctatttatccgctagaaccgcaggtttgggcggatttacaactctctaagagcaacgaaaggcggaagaagtctatgcttctgtagctcaggggtagagcgcatccttggtaaggatgaggtcgcgggttcaattcccgccagaagctccatcttcaagctagacccatagcagcccaaacctaaacaaaacattatggctaaagagcaattccagcgcaacaagccccacgtgaacgtgggcaccatcggtcacgttgaccacggcaaaacctcccttaccgccgccattacttcagtgctcgctaagaagggtttcgccgaagcacgcggctatgaccagatcgacgccgctcccgaagaacgcgaacgcggcattaccatctccacggcccacgttgaatacgaaacggaaaaccgtcactatgcccacgttgactgccccggacacgccgactatgtgaagaacatgatcaccggcgctgcccagatggacggcgccatcctcgtggttgccgcttccgacggcccgatgccgcagacccgcgaacacatcctccttgcccgccaggtgggcgtccccgccatcgtcgtttacatgaacaagtgcgacctggttgacgaccccgacttgatcgaactcgtggaaatggaaatccgcgaacttctcaacgaatacgaattcccgggcgacgacacccccatcatcaagggttccgccgttaaggctctggaaggcgacgccgccgctgaagactccatcatggaactcatggctgccgttgactcctacatcccgcagcccgaacgccccgtggaccagcccttcctcatgcccgtggaagacgtgttctccatctccggccgcggcaccgtggctaccggccgtatcgaacgcggcatcgtcaagaagatggaagaagtcgaaatcatcggcatcaaggacacccagaagaccgccgttacggacatcgaaatgttccgcaagctgcttgacgaaggccaggccggtgacaacgttggcctgctcctccgcggcctgaagaaggaagacatcgaacgcggccaggtgatcatcaagcccggcaccgtgaagccccacaagaacttcaaggctgaagtttacgtcctgaccaaggaagaaggcggccgtcacaccccgttcttcaacaactaccgcccgcagttctacttccgcacgacggacgtgaccggctgctgcacccttcccgaaggcgtggaaatggtgatgcccggcgacaacgtcaacctggaagtccagctcatcactccgatcgccatggaaaaagccatgcgattcgctatccgcgaaggcggccgcaccgtgggtgccggtcgtatcagcgaaatccttgactaagttcccctggaacttgtagaggaatctacataggtttaatgagggggcctccccgcaggccccctcatttcccacgaaagaagagacaccaacaggtcagtagttcaattggtagagcgttggtctccaaaaccaaaagttgggggttcgagtccctcctgacctgccacttctttccaaatacatcaccccaccttgaagcatgtttcgcaagatttctcaattcatcgccgaagttaagggcgaacttaagaagaccacctggccctgggaaagcgatcccaaggtgaaaggttttaaaaaattccgcgaactctggggttccactctcgtcgtactgattgccatggtcttccttggcgcgtttgttgcatcgttcgacatcttccttcacagcgtggtcaactacctcatccagttggcaatctagttttactcccactttctttctccgatcatgcccagtaccccagagcctcacgaacaatggtatgttcttcacgtcctctccggacaggaaaacagcgttcgtgaccgcattatccgcaaggcgaaggacgccgaactttccgatttcatctaccgggtggaagtccccacggaactcatctccgaagtgcgcaacggcaaaaagacggaacgtcacagcaaactcttccccgggtacgtctatgccaacatgtacctgctggaagcggacggcaccctgaacaaggacctctggtacttcatccagcagattgatggcgtcatcagcatcgccggttcccgcaacgctcccctgcccatgcgcaagcgcgaggtggaggatcttctgcccctgctggacgcggaagccgtcgccgcccgtcccaaggtggaattcgccgtcggcgatcccgtgcgcgtctgcgaaggcccgttccagagccaggaaggcaccatcgaagaaatcgaccccgaaaaaggcaaactgcgcgtcagcgtctccatctttggccgcgccactccggtggacctggaatactggcaggtggaaaaagcctgagccccattcgccggcaggcagcaagcttctcccgttcattttctccgctaacaaagcaaaaccatggcaaaagaaataaccaaaatcatcaagctccagatcaatgccggagccgctaacccctccccgcccgtgggtccggcacttggtcaggccggtgtaaacatcatggcattctgcaaggagttcaacgccgccacgcaaaagcaggccggcgacctcctgccgaccgtcatcaccgtttacaaggacaaatcattctctttcatcaccaagcagcccccgggcagcctgcttctcaagaaggccgccggcatcgcctccggctctggcgaaccgaacaaaaagaaggtcgccactctttccaaggccaagctgatggaagtcgtcaacaccaaactcccggacctcaacacgaaagaccccgaacgcgccgcccgcatccttgccggccaggcccgccagatgggcattgaagttgaaggtatgtaacactcaccgcaggaggattaaccaatccgaacgcactgccaaatacacacatgtctaccaaacgcagcaagcgatatcaagaagcagccaagcttgttacccctaacaagaactacagcatcacggaagccgtggaaaccatgaaatctttcccggccccgaaatttgacccgactgtcaccgtttccttccacctgaccgtggacccccgcaaatccgaccagatggtccgcggcagcgtctccctgcccaacggcacgggtaagaacgtccgcgtcctcgtcttcgcccagggtgatgccgccaaggccgcccaggaagccggagccgaattcgtgggttttgaagacctcatcaagaaggtccaggaaggattcgtcgactttgacacggccattgccacccccgacgccatgacggaggttcgcaaggttgcccgtgtgctgggtccgcgcggcctgatgcccaacccgaaaaccggcaccgttacggatgatacggccaaggccgtgaaggaagtgaaggccggccgcgttgactacaaggttgacaagaacgccaacatctccgccgctgtaggcaagctgtccttctccaacgaaggtatcactgaaaacatcgttgctctgattgattccgtcgtcaaggcccgcccggcttccgccaagggcgcctacatcgaatccgtcaccgtttcatgcgccatgtgccccggtctgccggttgacaccgcttccatcgccaaactgtaacccgaaccgatttagcacaccatgaatcctgacaagcgtatcatcattgacgacctgaccgcccgcgtcaacgcctccccgttcctgatcgtcgtggactacacctcgatcaccgtgcctgagttcaccaacctgcgttccgccctggccgcctgcggcgcccagtgccacgtagccaagaacaacttcatgcgtacggccctgacggatgcaggccttcccgacatcggggaacacctcgtcggccagaccgccttcgtgaccggcgcgtccgacgtggccgccgccgccaaggccatcaatacctttgcgaaggcctccaagaaggccgaatacaaggtggcgatcctggacggagccatcctctccgcggacgacatccgcgccatcggtgaactgcctccccgcgaccagctgcttgccaagctccttggcaccatcaatgcggccggctccgctcttgcccgagttcttcaggcatatgtggacaaagaaaacggcggcagcgaagaacccgccgcctaatactaaccccttgaccggacggcccggttgcactctagccaaatgtgtgaaaaccgggcccgactctcctacaggttccttgtcggaactccagccggagaactgaaatgccaagttggctcttggcgcgactcgaaaccaaactagaaaacaatacaatggctgatattaacaaaatcgctgaagaactcggtaccctcaccatcctggaagctgccgacctcgtcaagcttctggaagaaaagtggggcgtttccgccgctgctcccgtagccgccgctgccgctgccgctcctgccgaagctgaagaagaaaagaccgaattcaacgtcgtcctgacggaagccggcgccaacaagatcgccgtgattaaggccgtccgcgaagtgaagaccggtctcggcctggtggacgccaagaaactggttgaaggcacccccgccgtcatcctggaagccgtctccaaggacgaagctaacgccgccaaagccaagctggaagaagctggcgccaaggtggacgtcaagtaagctttttacttcccgcgcaacaggagaagacccgtttttctcctgttgcgcttcctcgtcttcacatcccgcgtgaccgactagaggctttttacccgtcaaaacgcttccagtcggttccgtctcccaaggaaggaaccaatcaacccagcatccgggttttcaggatgcaaacccataacatctccgccacagcagcccatgtcaaagcgactctacttcgggaatatcaaggaagtcatcgaacctccgaaccttattgagattcaacttcaatcatacttcgattttctacaacaggacaccccggccgcggccaggaaaaacatcgggttacacggcgttctgaaggaaatctttcctatcaagagctatgacgaaaacattgagctcgacttcgtctcctacgacatcgaacagccgaagatgagcgattacgaggctatccgcgccggggaaacctacagcgccgccctccaggtcaccttcaagctcaagtccgacaacgaatccaaggaagaaacggtctacatgggtgaactccccatgatgaccaaccgcggcacctttgtaatcaacggcgccgaacgcgtcatcgtgtcccagctccaccgttctccgggcatctgctttgaaagcgcccagcacctgaacggcaaactgctccactccttccgcatcattccggaccgcggctcctggctggaagtccagtttgacaccaacgacctgctctacgtctaccttgaccgccgccgccgccgccgcaagttccttgcgacgacgttcatgcgttatctgggcttcaagacggaccgcgatatcgtcagccagttctacgacatccgcacgcttcccctgagcgaagacatgacggaggaagacctgcacaacctcgtggccgtggacacgatcaaggacaaggacctcgttcttgccaaggctttcgaacagctcaacatgggcgtggttcgccagctcctccagttcggcatcaaggaaatcgacgtcatcgaccagagcgaggacgacgtgctgatcaagaccctgaagaaggatcccgcccatgacgaggaatccgccctcaaggaaatctacaagcgcctccgtcccggcgatcctgccacggccgcccaggcccgcaccctgctcaagaggctctttgacgatcccaagaaatacgacctcacccgcgtgggccgctacaagatcaaccagaagctcggtctggacaccagcctggaccagcgcctgatgacggcggaagacttcctggccgccctcaagtacctcctgcgcctcaagaagggcgaaggcatggtggacgacatcgaccacctgggcagccgccgcgtgcgcgccgtgggcgaactcatggccaaccagtgccgcgtgggcctcgcccgcacggaacgcctggtgaaggaacgcatgaccctcattgaccagaacattgaaggcgtgacgcccagcaagctcatcaacccgaaggccctcagcgccgtcgtgcgcgacttcttcggccgttcccagctctcccagttcatggaccagatcaacccccttgcggaactgacgcacaagcgccgcctctccgccctggggcccggcggcctgaaccgcgaccgcgccggattcgaagtgcgagacgtgcatccctcccactacggccgtatctgcccgattgaaacgccggaaggccccaacatcggtctgatcaactccatgtgcacctacgcccgcatcaatgaattcggattcattgaaacgccctaccgcaaggtggaaaacggccgggtcaccaacaccatcgaatacgtcaccgccgaccaggaggaaggctacctcatcgcccaggccaacaacccgctggacgaacagggcaacttcaccacctcccgcgtgaccgcccgcgaaaagggcgagttcattgaagtggacccggcggacgtgcactacatggacgtgtctcccaagcagctcgtctccatcgccgcaggcctcattcccttcctggaacacgatgacgccaaccgcgccctgatgggctccaacatgcagcgccagggcgtgcctctcatggtggcggaatccccgtacgtgggaaccggcattgaaggcaagtgcgccagggactcccgttccgtcgttctggcggaagcggacggcatcgtggcttccgccacggctgaagtcatcatcaccacgaaggacggggaattgcccgtgcgtccggaagtcttcctgtccgatccggacagcgtgcgcacggaccgcgacaacggcgtatacgtctatcccctgcgcaagttcatgcgttccaatgccggaacctgcatcaaccagcgtccgatcgtgcgccgcggcgacaagatcaagaccggcgacgtgctggcggacggcccgaacacggaccagggcgaactggccctcggccgcaacgtgctggtggcatatatgccgtggaacggttacaacttcgaagacgccatcgtcatctccgaaaaaaccgtgaaggaagacaccttcacctccatccatatctccgagtttgaagtgcaggcccgcgataccaagctgggcccggaagaaatcacccgcgacattccgaacgccggtgacgaagccctgaaaaacctggaccatgacggcgtcatccgcatcggcgcggaagtgaagcccggcgacatcctcgtcggtaaaatcactcccaagtctgaaacggaactggctccggaagaacgcctgctgcgcgccatcttcggtgaaaaggctgcggaagtgaaagacacctccctccgcgtcccctccggctgcaccggcatcgtgatggacgttcgcatctcttccacgggctccggccaccaccgcggcgacctcgtcgtggacagcgcggaaaagaaaaagcagttcaagaagatcaatgacgagcacaagaagaagaaggaacagctcattgaccagctgaccaagaagctctccgacattcttctgggtgaaaagatcccgctggacgtggtcaacgagcagaccggtgaaatcatcatcccggccaaccgcaagatcaccaagaccctgctgcgcaagctggccctggtgcacgaccacatcgaaatcgaacccagcccgatccgcaacaagatcctggaaatcatcacctcctttgaaggccgcttcacggagctggatgacgaacgcgaacacaggctggaccagatggaatccggggacgaatccgaacccggcggactgaaggaagtcaaggtgtacatcgccgccaagcgcaagctcggcgtgggcgacaagatggccggccgccacggcaacaagggcgtcgtcgccaagatcgtcccggaacaggacatgcccttcctcgcggacggcactccggtggacatcgtgctgaaccccctgggcgtgccttcccgaatgaacgtgggacaggtgcttgaagcccaccttggcattgctgccagggccctcggcttcaaggtggctaccccggtgttcgacggcatcagtgaagaaaccatctggaattacatgacggaagccaagaaggtggacggattcacctggatcggcgacggcaaggacggcaccgtgggcggcaagagcaccctctatgacggcctgaccggcgaacccttccataacccggtggtggtaggccagacctacatgctcaagctgaaccacctggtggcggacaagattcacgcccgcgccgtggggccgtacagcctggtcacgcagcagcccctgggcggcaaggcccagtacggcggccagcgtttcggggaaatggaagtgtgggcgctggaagcctatggcgccgcctacaccctccaggagcttctcaccgtcaaatccgacgacgtgcagggccgcacccgcatttacgaatccatcgtgaagggcgacaatacgctggaagccggaactccggaatccttcaacgttctgatgaaggaaatgcagtccctgggcctgaacgtgcgccccggcagcaaggatgaacaaccctccctgcagctcggcgatacggacctcactcccgtggacggcatgacggaaggctttgacagcgacgacatggccggcctggcggatgtcgacttctccgacctcaaattctaatatccaccgtattccactcccgtgccgcaagacgcgggagtgggcatcaaacattcttcaaaacttttaatatatgtctgatacccccaccatcagggaaatgcacggtctgagcgacaagccccggacctttgaccaggttgccatcaccgtggcggacccggataccatccgcagctggtccttcggtgaagtcgtcaacccggaaaccatcaactaccgcacgttcaagccggaaaaaggcggcctgttttgcgaacgcatcttcgggcccacccgcgacatggaatgcgcctgcggcaagtacaagcgcatcaagcacaagggaatcacctgcgaccgctgcggcgtggaagtaaccaacgcgcgcgtgcgccgcgaacgcatgggccacatcgaactggccgttccggtctcccacatctggttttacaagtgcatgcccagccgcatcggcctcatgctggacatgacggcccgccatctggaacgcgtgatctactatgaagactacatcgtggtagaccccggcaacactcccctggagaagggagccatcctgacggaagaggaattccgcaatgcggaagacgaatacggctatgacagctttgaagccggcatgggcgcggaagccatccagaaaatgctggcctccattgacctggccaccctcgtcacggacctccaggaacagctggacaacaccaactccaagcagaacaagcgcaagatcgccaagcgcctgaagctggcccagggcttcctccagtccaacacgcgcccggaatggatgatcctgaacgtgctgcccgtcattcctccggacctgcgcccgctggttcccctggaaggcggccgcttcgccacgtccgacctgaatgacctgtaccgccgcgtcatcaaccgcaacaaccgtttgaagaccctcctgagcctcaagactccggaagtcatcatccgcaatgaaaagcgcatgctccaggaagccgtggacgccctgttcgacaacggccgccatggccgcgccgtcaccggcgccggcaaccgccccctcaagtccctctccgacatgctgaagggcaagggaggccgtttccgccagaacctgctcggcaagcgcgtggactactccggccgttccgtcatcgtgattggcccggaactgaagctcaaccagtgcggccttcccaagaagatggccctcatcctgtttgaacccttcatcatccaccgcctgaaggagctgggctacgtgcacaccgtgcgctccgccaagaagctcatcgaccgcaagacgccggaagtgtgggacattctggaagaagtcaccaagggccacccggtgatgctcaaccgcgcccccaccctgcaccgcctctccatccaggcctttgaaccggtcctgattgaaggctccgccatccgcctgcacccgctcgtctgtaacgcgtacaacgcggacttcgacggtgaccagatggccgtgcacgtgccgttgtccgtggaagcccagatggaagcccgccagctcatgctggcgcccaacaacatcttctccccggcctccggcaagccgattgccacgcctacgcaggacatcattctgggcgcgtacttcctgacgcacacccgcgccgcggaagtgcagaataaccaggacaaccatcatcacctccccctcttcgaatccattgacgaggtggaatacgccattgccgcccgcaagatcggctaccatgactggatccgcctgcacaacccggactacggcaagaagccttccgaagttgtgtacggagacgtgaccaagaaggttatcgtcaccaccgccggacgcgttcgcttcaatgaaatctggccccgggaactcggttacatcaaccgcaacgtgggcaagaagcagatgggcgacatcatctggcgctgctaccagaccgtaggcaaggaacgcaccgtgcagaccctggactccctgaaaaacctgggcttcaaggaagctacccgttccggctgctccatcggcatcgtggacatggtggttccctcccagaagaagacggaaatcgagaaagcctatgcggaactggacaaggtgacccgccagtacaagaacggcatcatcacggacggtgaacgctaccagaaggtggtggacatctggacccagaccacggacgtgatccaggcggccctgtaccgcaagctggagcacaacgaaggttccaagatggccagcccgctcttcatgatggtggactccggcgcccgaggcaacaaggcgcagatcaagcagctttccggcatgcgcggtttgatggccaagcccagcggtgaaattatcgaacgtcccatcacggccaacttccgtgaaggcctctccgtgctggaatacttcatctccacccacggcgcccgcaagggtctggctgacaccgccttgaagacggctgactccggctacatgacccgcaagctggtggacgtggcccaggacgtcatcgtccacgcggaagactgcggcaccagcaacggcatcaccgttcacgccatctatgacggtgatgaagaagtggcgtccctcgcctcccgcatctacggccgaacctcctgcgaacgcatcgttgaccccgtcagcggtgaaatcatcgtggacatcaacgacctcatcaatgaaaagcaggcggagcaactggaaaagatcggcattgaacagctgaagatccgttccgtgctcacctgcgaactcaagaagggctgctgcgccaagtgctacggcctgaacttggccaccggccaggaagtgaagatcggggaagcggtcggcatcattgccgcccagtccatcggtgaacccggcacgcagctcaccatgcgtacgttccacgtgggcggcacggctaccacggcgttcaagcagcccatcgtgaaagccaagaacgatggccgcgtcatctacacggaagacctccgcacggtggaaaacgcagacggcaacttcgtcgtgctgaacaagaactgctccgtccgcattgaaaacgaacagggccgcgaactggaatcctaccagcccgtcatcggcaccatcctgtacgttcccaacggcggcaccatcaagaaggatgaaaccctcgccacctgggacccgtacaacgtgcccgtgattgctgaaaagggcggcgtggtcgaattcaaggacatgattgtcggcatcaccgtttccaaggaaacggaccgtgaaaccggcacctcctccctcgtcgtgatggagcacaagcaggaacttcacccgcaggtggtcatccgtgacgccaagacccgggaagtcctggcccaccacgccattcccgcaggcgccaacctcaccgtgaaggatggagaaaccatctccgccggcacgatggtggccaagacgccccgcaaggtggccaagacgaaggacatcaccggcggtctgccccgcgtggcggaactgtttgaagcccgcaagcccaaggacgcctgcaccattgcacgcgtggaaggcattgtgcgcctcagcagcaagaacacctcccgcggcaagaaggtcatcaccattgaaacgcctacgggcgaactggtggaccacctggtgccgatgaacaagcacgtcatcgtccacgaagacgaccatgtgcatctgggcgaccagcttacggaaggccccgtctccccggaagaaattctggacgtctgcggcaaggaaagcctccaggaacacctcgtcaacgaagttcaggaagtgtaccgcctccagggtgtggaaatcaacgacaagcatgtggaaatcatcgtgcgccagatgctccgcaaggttgtcatcacggaacccggcaacaccgaattcctgtggggcgaccaggtggacaagaccaccttcgaccgcatcaacgaacagaccgtagcccagggcggccagccggccgcggccaagcccgttctgctcggcatcacgaaggcctccctggaaacggaatccttcatctccgcggcatccttccaggataccacgcgcgttctgacggaagcctccaccctcggcaagaccgatacgctggaaggcttcaaggagaacgtcatcatgggccaccttatccctgcaggcaccggtttctcccggtacagcaagattgaagtggaacccgcggagggcgctgaagaaatcgcgctggccagcgaagaagaggaagcggctgaacttgccgaagacgtattgaacgataccatcaacttcgacaacgaacgctaagccgttctcaagataacacctcaacctgcggggccttcatccggaaggccccgcattttttatgcccggatgggaaggatgccggacagggactcaatgcctccggtcccgcctttcagctttatgccggatactccccttcctgcccacatggaatgtgacgcttcccgccacttcccgctccggcaggaaccggaaaaccgctgctccatcacaagccgccttttgtggcaagaaacagcggagcccgccctcttgccatggggagataggcagggacacgccgtccggaagatgaatgccgaatctgataaaagctctccttttttagaaaaaaagcggttattgtaaaatattaaaacatgcaagatttttacagagaatatcttgcgtttttatctatacaaaaagaagggcttcaccggattagcaatccggagtcaagctccaattttaagggcaaggtatttccgttgaacagtgctgtaattattgaaagccgtttccctagagcccgacactttcctgaatcgactggcgcctacacggagcgccgctggcttctgcggctgctaagcataaaactgagcggcggtgaactttatcctctgaaagccagcgcatcctgacggacgcctgtattttaattgccacatagtcatgcagtgctccctgcggcggcagaaatacctcccccgtttttcattcataacggattgctaatccgcaattgtaaaacaccttttaactctctgtaaggatatgaagaaaacactatgtatcatttgtcttgggctggcgggattggtggctaccgcatcggcggctaccgttgaactgatgcccgacattgcaagcatcacgggccagggatacaactccgccggacgccttgccggaaacggcattaccgctgccgacgtcaagaactggctggggcctgccggacgggccgacggatggtacaccaccaccggcaatggcgacatgaagtgggggcaagcctccgtcaacacggcaaaccagtccatcaccctgcccaacatgaacggcacggcaggcgtctgcgccggcttgaaaatgaccattgaaaacatccaggcctatgaagggctgaccttcagcttctcccttacgcctccgggtaccggccctacgtttacctattccctctggtatgaaaccgctgacggtgaattcgtgaatctttgtaaggaaagccggggcaacaacggctccgtctggaacgtttcctataacctgacggatgaacagatgtccgccctgaaagcaaatggaaccggtaaagtatacgccgttttaggaagttcgggaggtactaacggaaacaatgccaccgtcacggacatttccctggaaggcacgctggccgttccggaaccggctacggcatccctggggctgctgggactagccgcgctgatgctgcgccgccgcagagcctgacgcattcttcgttcttcttaaaaaaggctgcttctcctccgggaggaacagcctttttattcgtgcgcgtttccccctttcctgttaggttgcgaccatgtcccctctggattttaaaaaagaagaaaaacgcttctacctcccccctgcacaccccgtgctggcggacgtcccggaaatgaactttttcatggtggacggggagggagaccccaatgagccggaaggagcctaccagcacgccgtggaattgctttatgcgttatcctatgccgttcgcatgggaggcaagaagagaactttccccgtccccggctaccgggaatacgtcgtgcccccgctggaaggcctgtggtggggctgcgaaccagaggcgcccgtcagcaaaaaggatttccgctggatatccatgatccggcagcccggcttcgtcacgcaggaaaccctggcgtatgcgcaggagcaggtcgccatgaaaaaacctcaccttgatacggaggccggccgcctggactccttccgggaaggtctttgcgtgcagtgccttcacacgggcccttatgacgatgaaccggccacgctggcccgcatgcgctctttcatggaacaggagacgcttcttccggacatggaaggcttacgaacccatcatgagatttacctgtccgatccccggaaaacgcctccggaacgcttgaaaaccattctccgcattccggtaaggaggcgttaagcttcctgtccggacaggctcattcgttgtccatgaagtatgcctgcagaatgcagatgatatgcaggacaatcggaacaagggcgaagatgaaccagtacaggagaccgtaggccgcacccaccaccaggaaccagatgatggcttggacgaagtgccccttgtacaactgcccgaggccgggaacgaataaactcagaatggcggctaaaaaggatttcatatgctggctaagtaaaaatgattgcacggagaaggtctcgcgtgcctgcaccagttaagagccttcccttccccttcatgttcaatctcccggttccgccccgtcatgaatgacggtttttccggaacggatgaagcaggagcggcgcgatgctccggcagggaacaggcggcagtcatgctccggtcttgaccgccgcatgggctgtgttaccctccccgcgcacagggcactcacgttagaagggtagagaccaccatgtccattgaactgactcgcaatttctccatcatcgctcacatcgaccacggaaagaccaccctttccgaccggttgctggaaaagacgaataccatttccgaacgggaaaagcaggatcagcttctggacgccatggacctggaacgggaaaagggcatcaccatcaagtcccatcccgtgaccatcttttacaaggccaaggacggaaaaacctacaagctcaacctgctggatacacccggccacgtggacttctcctatgaagtgtcccgttccctggcggcctgcgagggcgctctgctcatcgtggatgcggcccagggcgtggaagcccagacgctcgccaacatgcacctggcgatggacctgaatctggccatcatccccgtcatcaacaagatcgaccttcccagcgccaaccttcccaacgtataccgccagctggaggacatcgtctgcatcccccatgaggaagccatccacgcttccgccaagatgggcatcggcattgacgacatcctggaagctgtcgtccagcgcatccccccgcctgaaacggaaaaagacggcctcctgcgcgccctggtgtttgactccgtttatgacgcctaccgcggcgtggtctcctatgtgcgcgtcatctccggcagcgtgcagcgcggcatgaaggtgaaactctttgctacggacgaagtgtatgaagtgaaggaagtgggcatcttcacccccaagatgacccggacggactccctggaagccggcgatgtgggctatatcatcgccaacatgaaatccgcggcggacgtcaagatcggtgacacctacacggactacacgcgcccgtgcccgtcccccctgcccggcttcaaggaaatccgccccatggtcttctccggcatttacccggtggattcctccgactttgaagccctgaaggccgccatggccaagctccaaatcaatgacgccgccttctccttccaggcggaatcctccgtggccctgggcttcgggttccgctgcggcttcctgggcctgctccacatggaaatcatccaggagcgcctgcgccgggaattcaacatggacatcatctccacctatccctccgtgatttacgaggtcaccaagaccaacggggaggaaacgaacgtggacaatcccagcctgctcccggaaccgcaggaaattcaggaaatccgggaacccatcgtcaaggtgttcatcatgctgcccggggaatacatcggggacatcatgcagcttgtcctggaaaagcgcggcagcgtgaccaacacggaaacgattgacgacacgcgcgtgatgctcacctgcaccgtgccgctggcggaaatcctggtggatttcaacgacaagctcaaatccatgacccgcggctacggctccatggactacgaatacgccggctaccaggccgccaagcttatcaagatggacatgctcatcgccggggaaccggtggacgccttctccatgattgtccaccaggacaaggccgcctcccgcggacgggaactggcggaacgcctgaaaaacgtcatcccccgccagctcttcaccgtcgccatccaggcctgcatcggcggcaagatcattgcacgtgaaagtatctcccccatgcgcaaggacgtgacggccaaatgctacggcggtgacgtcacccgcaagcgcaagcttctggaaaagcagaaggaaggcaaaaagcgcatgaaagccatcgggaaaatcaacatcccgcaggaagcgttcatcaaggtgctgaaaacgggggactgatcccggcagcccattcgccccggcctttcctggaaagaaagccgggaaaccgggcgcggttgccaaggaacggcagagcggcaaaaaccgcctccggaacttgcggcaggggtcatcaattcccggttgcgaagaggccccggttatgttatcagatcgggcatgagtctgcccaggctatccatgcttctgtttgcctctgccgccctttgctcctgcgtggggacctctccggaaccgggaaaaccgaaagtgaaaaagagtctttcggaatacatgcaggacaacatggccaattccatcgccaatgtgccgacgggactgctgggcaccacgccgggccagcagcaggcccaccagctcaccgccaccacgcaggaggaaatgaggaaggcggacagcggcgccgtctactacacggacgcccacgacccggacgcccccatccccggacttgaggaggcattcgcccagcgcaaggaaaaccagcggtggatccagagctattcctccgccctccgggaagcccagagcagtggaaagcccatcctgatctggttccaccattccgcgggcagccctcccagcaagaaactggcggcggaacttctccatacgaaggaatttgaagactgggcgaaaaagaatgtcgtccgcgtctgttacgaccaggcggaaaagttcgagagcgaaccggtttataagaagcgcaagaaaatgctggagtatgtgcagaaggccccttccctgtttggcgtgagaggtacccccgtgcttctggtcatgtctccggacggcaccaaggtggacacgctgcgcggctattacaccggacaaaacgccctttacttcgaccagatcaagaatagcgtcaagctggcaggccagcaatatgaagaattcaagaaaacgctgactcccaaaggctatcgcgtctggacgggcgtcaatggaaacaccgtcttcgccaagctttcccgctactcggagaaaaaccagaccctctggctccaggaactggacggccaccagagcaggacgtccctgaaaagactcagccttgaagacaggaaatggcttctggagcagaaagaagcccatgaaaacaagggacggaacgagcggcccggcccgcgcggcgcctgatccggcggtttttttcataacacggcacgcccttggctggaggccccccgcaggaattcgccgtcatctccttcattcagaccgggctgcgccttccgctgacagcccggcggaagggcccatcttcatgcgttccggcgttccctccatttttatattgaaatataaaactgatgttttatttttcctaaaactctcttttgtcagttctttctttcggggatgtggtctttttccatactggcagcaatgttcttccggacaaatcctgccgcccctgttcaaccattcacctgtttaattcataattccaacgatgaaccgccatgccgtcaccgcattgatgcttgcggcctgttccctgccagcttccgcggcccagccgcagaagcaggctccggaccagcgccccaatatcctggttattgttactgatgaccactcctaccagaccctgggaacctgtgacaaggattctcccatgccctatccgaacttccgcaagctggcggacgaaggcatggtctttgaccggagctactgcgccaactccctgtgcggaccgtcgcgcgcctgcatttacacagggcgccattcccacatgaacggctatctgttcaatgaacacgcggctccctttgacggctcccagcccaccttcccgaaaatgctccagaaggccggctaccagaccgccattgtcggcaagtggcacctggaagccatcccgccgggcgccaagggagacacctccaagtatgagtccaacccaaccgggttcgactactgggaaatcttccccggccagggcaactacttcaacccggacttcatcacccccggcaaggacggaaagcgcgtggtgaaaacggaacccggctatgccacggagctggtcacgcagaaaagcctcaaatggcttgaccagcgggacaaggacaagcccttcatgctcgttgtgggccacaaggctccgcaccgctgctggtgcccctccatccagaacctgggccgagccaagcagtatgcggactccattgacccgcccgccaacctggaagacgactttgcagaccgcccggaattcctgaaaatgacggaacagaccctgctcaaccatttcaacgtctggtctgacgaacacctgatcaaggacgtggtgccggaagacatccagaaaatgctctcctgcccggaatccaagaccctgcatacccagtacgactgggaaatgccggaatgggtgcgcatggacccgcagcagaaggaagcctggtacaattaccacaaggcccgcaccgtccagctcgtgaaggatattaaaagcggaaaaatcaagacccagcgcgacatcctgctgcgccgctggcgccattacatggaggactacctgggcaccgtgctttccgtggacgaaagcatcggccagatcatggattacctgaagcagaacggactggataagaatacgctggtcctctactgcggagaccagggcttctacatgggcgaacacggcctgtacgacaagcgctggatttttgaggaatccttccgcatgccccttatcatgaaatggcccggccatatcaagcccggcgtgcgttccgccgccatggtgcaggagctggattacgcccctaccttctgtgaagtggccggtgcggccactccggaaaacatgaacaccttccagggccgcagcctcgctccgctgttcaagaccggggaacaccaggacttcagggaccgtcccctctattacgccttctatgaaaacccgggcgagcacaatgcccctcggcacgacggcctgcggacggaccgctacacgctgtcctacctctggaccagtgacgaatggatgctcttcgacaacgagaaggatccggcccagatgcacaacgttatcaacaagccggaatatgcggaaaccgtgaaggagctgaaggaactgtacggcaagctccgcaaggactgccaggtgccggaaggcttcccgggagccacgggcaagctggccgtcaagccgcagtgggactgcgcgcccgccaaagactgagaacttccacgccccggtttcttttgaaagaacgctttccgggtccaacccggacggcggcggaacggaatccgtacatcctcccaaacaacaaccatcaccaaacatcatcacatgaaagcattaatgctagcggccgcgttcctgggctccctctgctgggccggaaccaatccctacaacatcattccggaacccgtcaaagtgacggcggcctccggcaccaccaaaaacctcaaaatcctgaacgaacagaaggtcgccgggctgggaaacgagggctacaccatgaagctgacgcccggcggcgtggagctccgctacagcacgcccaacgggaaagccatggccatggctacccttctccagcttcaggaccagctctcggacacgccggagggcctcccctgcggcagcatccaggactccccggattttggctggcgcggcatgatggtggacgtgggccgctaccactacccgatgaaggaactctacaacttcgtggacgccatgcactactacaagtacaacgtcctgcacctccacctgacggaagaccagggctggcgcctccccgtgccgggctacgacaagctccgcacgattggagcggtccgcccttccgctccggaaggccagaacaactccctgctggccaatgaaggcatgtactccaagaaggaactccaggacctggtggcctactgcaaggcgcgcggcatccaggtgctgccggaagtggaaatgccgggccacaacatggccctggccgcatcctaccccgaattctgctgcaacaccaaacgggcccaggtatggacgcacggcggcgtttcctccaagctgatctgcccgcagaaaccgggcaccaagaaattcctcaaggacacctttgacaccgtcaaccagatattccccttctcgtacgtccacatcggcggggacgaatgccccatgggcgactggaagaagtgcccggactgccaggccgcgcgcgccaagaagggccagggggacgacgtggaagcccagatgagcgacttcacgaagagccttggagccatgcttgccaagaacaagaaaaagcccatcctgtggtacgacatcaacaaaggctactaccacaagggggaaaccgtcatgtcctggctgccgggagaattcccccgctgcattgacaagaccaaggaacagggcatcgacctcatcgtcactccccagtacaagtactacctggcccgcacccagatgaaattcccggcggacgacgtgcgcgcccggcccggcggcggccccatcctgctgaaagactgctacaacttcgacccccgcaacgggcgtgacaagaacgacgtcaagcacatcaagggcatcaacctctgcatgtgggcggaatggattccctccggggaactgctgatgtacatgacctatccgcgcgccatggcggtctctgaaaccgcctggggcagccataaggaccgccccagcctggaagactttgaaaagaagatggaaacccataagaagcgcttccagaagcgcttcggctacaccctggaacgcacggtggaaaacaagccctaccgggaatcctccatcacccaggaagaagtagaccgcatcaacgcgaactataagaagggccagcaggacgcgggcaaataaccttttccagcctctcgccaccatctgattccttcaaggccggggacgcgcgcagccgcaggtccccggccttcttttcccgcttgaccggagggccctcttcccttctaatcgttccgccatgttacacctttacgatacccgcaccagaacggcacaggacatttcccccatggacggaaaaacgctgcgtttctactgctgcggacccacggtgtacggccccgcccacatcggcaacttccggaccttcgtgatgcaggatattttccgccgcgttctggagctgggcggaacccccaccatgcacgtccgcaacctgacggacgtggatgacaagaccatccgggattcccaaaaagccggagtatccctggcggaattcaccgccggctgggcggacctgttccaccgggactgcaccgccctcaactgccttccaccccacgtggaaccctccgccgtaggccacattcccgaacagatacggatggtccaggctctggtggaaaaaggccatgcctatgtctctgaagacggttccgtgtacttcaggatctcctccttcccggaatacggaaagctttcccacctggataaacgggaactggatctgggcaaaaccgccaatgcccggtccaacgcggatgaatatgaaaaggactccgtggcggacttcgtcctgtggaaaagccgccgccctgaagacggggacaacttctggccctccccctggggggaaggccgccccggctggcacctggaatgctccgccatgatccacaaatacttcggcaatgacttcgatctccactccggcggcgtggacctggtgttcccgcaccatgaaaacgaggttgcccagtcccgctgcgcctgcggcggcggttttgcgcgcctgtggttccatatcacgcacctgctggtggacggcggcaagatgtccaaatccctgggcaacatgtacaccctggcggacctggacaaattgggccacaagccgtcagccgtccggtacgtgctggcagggggctattatcgccgcccgctgaacttcaccctttcctccctggaggacgccaaagccgcgctgaaccgcctgtccaaattcgacgcgcagctccggaacgcctccggaacggactccgttccgtcctatgaggaattctgcgccgcccccccggaaccgggcatcttccagccagcctgggacagcctgaatgatgacctgaacactccggaagccctgggccacatcttcagcgccatcaggaaggcggatgttcccttcctgactccggaggaagcgcgccgcatgcggaacgccttccacttcattctggccgctttcggcattcttctgccggaagaggaacaggcggaagcgccggagaacgtgcgcaccctggcggaacagcgctggcaggccaggcagaaccgggactgggcggaagccgaccgcctgcgggcggaagtaacggcgctgggctggaccatcaaggaccgcaaggacgggtacgacctggcgcgcaactgaacggcatggacgctttctcccctatccccaaccacacgggcttcacggccaggagcctgttcacggatgcgcagggaaccctgaaggacggagccttcgccaacatggaacccggaggcggcggccctctttccccgcaccgccacgcccacgcccatttattcatcgtcacccgcggaacggtcgttatcctgcttgacgaagaggaaaaaacggtccgtgagcatgaatccctgctcgtgcccggcggcgtccgtcatgccgtctggaacaggagcgcggaaccggcggaaatcgtaggcctgacgctggaagccgcccgctccccccaactacctacaacccgatgaactcccgccaacgcacgctgggccatgccgccgccctggtgaccatcctgatctgggggaccaccttcgtgtccaccaaggtgcttctccgggactttacccccgtcacggtgctcttcacccgcttcgtgatcgggtacgccttcctctggtgcctgaagccgcgcctgcttccgctctccggctggaaaaaggaactcctgttcgcgggagcgggcctcaccggcgtcaccctgtacttcctgctggaaaacatcgccctgacgtacaccttcgcctccaatgtgggcatcatcgtggccgtggtgcctttcttcacggctcttctggcccacttcctgctgaaaggggagggcttctcccgccgcttcttcctgggcttcgccgccgccttcacaggcatcttcctcatcatggcgaacggcgccttcgtgctggaactgaacccggcgggggacgtgctggcgctgggcgcggccttcgtctgggcggtctattccatcctgatgaaaaaaatcggcgtcaacacgtccaacatgatcatctgcacgcgccgcatcttcttttacggcatcgtgctgatgattccggccctgttcatccttccggtgaacatggactggcatctgatggtgaagcccgtcaacgccctcaatctgctgtacctgggcctgtttgcctccgccctgtgcttcctctcctggaaccgcgtggtggaaatcctgggagccgtcaaatccagcgtgtacatttatatggttccggtcgtggccgtagtggcctccgccatcatcctgggggaacgcctgacctggatatccctgacggggattctcctgaccctctgcggcgtcacgatttccgagtacaggaaaaaaacgcggaagagcgtcagagaaaagggagaaaagcccgttctgcaaaaaggctgattccccctgctttccggaatcatgctgttttttccaggaagaaaaacggctggcgaatattcccggacggaatgcctccggcgttgcaacgctttccgcccccagagcatggttgttctttttcatgcttctgattcattcgccaggataacaggcatgccatgcgcctgttatcttccgtttcaggcaaacattcattctattataccgtggcaggatgtctgttagcggattagatatccgcagacaacaaaattttttaaaaaaaaacgagtttcaccgcgggaaaaggggaataatcagaaatacgttcaagatgcaatgaagttccgtattcatgaatcattgaggatgtgttccatcattcacttccattttcccttctccgttaccggatatctaatccgctagcatggcgcgcatgaaaaagctcctttccatcccagcttttttactgtgcatttccggggtacaggcggcaacgacattgtatgaaacccagttccgccagaccgccatcaatgtggacagtgactttctggacggcgcttccgtctcgctcaccaatccttccacatccctttccggcaatttggccgcggacctccttgtccccaatgtccaaatgcagaataacaacgccggatggaccgtcaccttttccttcacggctacgcaggatatcatcatctcttccctgaacctgggcttccaattcgtcaccggtaccggaacacggcacggaaacacggattccaaaacgggaaccgctactgtcacgctggccgccggagattcctccgccacggcggatctgagcttcgaacgcgtccaggccgacaagaacggcacgccgacagcggacatccagcaagcctccttcaataccccggtcacggtcaaggcgggagaaacctttaccctcaccgtgaacgccaaggcacccaacaccgggggcaccttcctggggctttcccaactggccctccacggggacgcggtgccggaaccggccacagcctccctcggactgctcggactggccgccctgctcctgcgtcgccgcgtataagcgggagcatcatttaatctctgctttattcctttactaaaacaggaccgtcccccaccgggaaacggtcctgtttttttaaataaaaatccgctcaatttccggaaacgtttctttccgcctcttcttcaatacgggcttccgtctcttcaatcttttctgaaagatcggcccactgcgtaaaacaggtttccaactggcggtccgcctgctggaaccgggtggtgagctccatgacggcctccgtatcagccgccacctccggacgttccaactgggaggtgatctccgtcttttccgtttccagacgcgctatctccgcttccaactgttccagtttttcctggaggggacggagcaggcgcgcctttttctggcggatttccgcctccatgcgcctgcgcgccttgcggtccgccccggctcccgggtcagccgctccggagacggcagacgcagcggagaaagccagggcctggtcccgctccaccttctccagataatcggaaacgttgcctatgtaaacgcgcggtttctctcccggcacgaattccagcaccttcgtcacaatggggtccaggaagctgcggttgtgggaaacgatgcagtaggaacccggatattcggacagcgcctgctgaagcacctgctgggactggatgtccaggtggttcgtcggctcgtccagaatcaggaaattggccggatgcagcagcatgcacaccagcgccacgcgggagcgttccccgccggagagcacgcccacgcgcttgtgcacgtcgtccccccggaacaggaagcagcccagcaggttccgcaccatgggcgcggattcccgcgtagcggccccctccacgcattccaggacggtcttttccgggtccaggtcatcggcatgcgtctgggagaaaaaagcgatctgcgtatggcgccccatcgtcacgctcccggagctgggctcctccccgccggaaatgaggcgggaaaacgtggacttgcccgctccgttcacccccacaatggcgatgcggtcccccttcacgatttcaaaatccacatcctcaaagacggaaatggagccgtaccgcttggaaaccttttccagcctgaccacggaatgcgcgccggcaggcggggtgggaaaatgaaaattcatcacggcgtcatcctcctccacctcaatcagctccaccttctccaactgcttgatgcgggactgcaccagggaggccttggtagccttgtagcggaaccggtcgatgaactccttcgtcttggcgatttcccgttcctgggcctttttctggcgcagcagaatctccttccgcagcacgctttccttcaggaaataggaaaaattgcccgcgtactcctccgcgcgcccgtggtaaaaggcaatcgtgcgggaaaccagggaatccagcagcgcgacgtcgtgggaaatgaggatgatggccccccggtaggtgcgcaggtactgttccatccaccgctgggactgaatgtccaggtggttcgtgggttcgtccagcagcagcacttccggttcccggagcagcagcttggccagcgcaatgcgcatctgccagccgccggaaaattccccgcagtcccggtcaaagtcccggtccttgaaccccaggccgcgcaggatggactccgtgcgggggcgcagccgggcggaatcatgggcgtgcagcaccagctccagttccccgatctcgttgagcacttcggaataggcggcggaacgggggtccagtttctccatctcctgcgtcagggcgtcaatgcgctcctggaggtccatcaggtccgcaaaggcggacatggcctcgtcaatcagcctgcgcccgcggacatggatgccctcctggggcagatagcccacctgggagtgcctggacttgatgatggagccggaatccggctcattcaggccggccatgcacttcatcagcgtggacttgcccgcgccgttatgccccgccagggcaattctttccccatcctccaccgtgaaggaaagatcattgaacaggacgcgcgcgccgtactgcacgcgcagattttgaacggccagaaccatgtaccgaaggagtagagagaggaaggcggcggaacgcggcgttgcatcgcctgttccgccgccaggaaaagccggataagcttatttgtccagaaccttgttccacgcggcgatgcggtcggcctgctccgtgaacagatcatccgcgccatcttcaatcgtgataccggaaatggtatccccctgaccgatggaatccaccacgtcctggccttccgtcaccttgccgaagacggtgtgcttgccgttcagccagtcggtaggtacatgcgtgatgaagaactgggaaccgttggtgccggggcccgcgttcgccatggaaagcacgccgggaccgtcatgcttgaggtccgggcggcactcgtcctcaaaacggtagccggggcctcccatgcccgtgccggtggggtcgccgccctggatcatgaaattcggaatcacgcggtggaacttgaggccgtcatagaagcccctggaagccaggttcagaaaggaagccgccgtcacgggcgtcttggaagcgaataccgtcagcttgatgtcgcccttggaagtgtggatggtgatattcttgtcagttgccatgggtgcatgttaaacgcgcggaaaggcatggtaaagactgtattgcgtgctgccgccggccctgcgcccccatttctccgccggcctcttttcctccttttccatgccgggcaaggaggccgcccccgtggcgcctacctgtcatgacgggccctaatgacaggaggaacggttgattttctaccggaaagggccgaatttgaatgatatgagcgaagaattggtagaagaattcgttacggttgaatccatctttgtccgtgggcgcaactgcttggcgctgaaggcgaaattctctcccctgttcacggactactaccttcatctcatgcagtacggcctgcgtaacgaggaaccctacgacagcctgctgaaagagctgatggcctacttcaccctctacatggtcgcgcggccctgggcggaacagcacgcctggacggtcaacctcagaacgcccgccgtagccaacctgttcgttacgggctcctccctgacggaatccgtagtggggcgcatcttcacgcaggacatcaaggagcctgaggaaaacacgctgtactccaccctgctccgcaagggctttgaaccgcggtactccgtcgtccccattccgggaacctcccccgcccggtgggtggaggaattctacaagcagagcgaacagagaaacgcgcgctgcattgaactgccggatgaatgctacaccatggtgacggcccagccggacgcggatgaagaatggctgaattccctaacccgggaaaaaatggcccatctggaagaggatgaagatacccgagtactggaaacgcgccggttccgcttttactgcggctgcacgctggaccgcatcctgccgacgctcaaggcgcttcaggaaagggaggaagacctgttccagggggaagaggcgctggaagtcacctgccccaggtgcgccgccatttaccgtgtgacgaaagaaaatctggaagattgagacatacatgatttctttctgacaattagccttttcggcagcgaatttcgtgcttaaactttccccgtgccgacttgtccgaagtgtttacataatttccaccgcggggcggaatcattgtgccctcactgcggcttttccctggaaaacctggacaagaaatacggcagggactccatcccctaccgccgcgtatgcgacaacgccggcgccctgcggcagcaggaccgcgtaaagctgaacgccctgctggaaaaactggagcgccgcattccccccgtcctcctttccgtctatttccccaacatcctggagcccttttccctcattccccacagcttctggatgatgaaccacctgacggtggacgaagccggcttccccaaccaccagggcccgctggacccccagtggctcctgattctggtactggacgtgcggacggacacggcctgcttcatgtgggggtatgaactggatccctacgtagagccggacctgatcaacaaatccatcatgaaggcccgcatccccctgcgggaaagcatgctgctccaggccgtgggctccatcatgaaagacgccgtccagctcgtggcccggaaggcgcgctccaaggtcaggcaccccatgcgctacgggttgacgccccctccccccgcaaaccggaaaggaggcggcctatgagattcctgctgttccccttcatgctggcggcggccatgtgcgtggccccggcgcaggaactccccgcccttaaatggaacgcccgtgaccagcaatccctgatgaagggcacctggtgggaggccaatgcaccccttctgccccctgtggatgcggctgtggccccttccgcctccgtcccggaaccctccgccaatgcagactcccccgctgtggaccctgttccggaggatttcacggacgtcaacgaatacttccttccggactacatccgcacctccacgggcctgatcgacccccagaagcttctcacggaagtggagagcaatgacgtcattgaactcatcaagctcatcaaatcccgttacaacgtcaacctgttcgtcagcatcttcgcggccgggcagaaagtccccccttccgtcaacgcccccacaatcgcccgccagatattcaaaaacaaggaacggaatctgctcctccacttccacatgggggatattaaaagcgcccagatcgcgctggatccggagttgagcgcccagctcggggatgcggggcggcgggacctcctgtaccaggtgaagcaggacgcctcccggttcaccaacccgcaggacgagcttgttgaagccatgatttccctggcgcggaggacagaggcggacatggcctccgcccccaagccttccctgcccgcgctggacccggacaaccccgccagcatcccggaagccaacatcaccatccaggaaccggaggaagcgcgtgaatcccatctgcacgccatgatgaaggcctggatgtcctttgccctggccaatgtagccggtatcatcctgcacgcctccgcactggtggccgtagtggcgctctggctggtctggaaaaacaaaagagtggtgcgtctgctgccgtcagaaccggacaagcgcctgggcgctccgcacggcgcctcccagagccgtcccgtaaactactgcatgcaggacggccggggaccggactccatcggccgcaggcagatgcgccagcacatgcgcgacgtctcatgacagaaccatctccaacccccggcatccgcgccgccctgaacggcgcgggagaactggaactcaccatggtgaacgcccctgcgggagccgtcatccggatggacgttaatgcggcttccccccgcatgctctgcacgcagggccgctacctggctccggtgcaggccccgcccggcacgcgcatccgcttccgcctgttccaggggaagcgcggtctgacggccccggaaaccttcatcatgcccggagctcctcccgcccagcccgttccttccacgctgattccctgcacccagaacagggacttcatgatttacgactgggcggcccggcacgaagccgcttgccgcgcggtgaggaaaacgcatccggacctcctcttcatcggagactccatcacgcatttctggggagggcctcccgtggacgaaccgcaccgggacatcctccagaaatctccggaaacctggagcctgtgcacggagggaatgagggcggtcaatctgggcttcggctatgaccgggtggaaaacgccctgtggcggctccgccacggcgaactggacggagcggcggacgatgccgtctgcgtggtgctcctcggcacgaacaacctcgcggaaaacacggacggggaaatactccagggcatccgcgccgtctgcggggaaattaccggaaggctgaaaaaggccgtcatcatcctccagggcttctacccgcgcaacagcgcccgtaaagataccgcggaacgcattgccgccatcaatctcctcctgaaccgtctggccgcagaacagggcttcctgtacacggaaccgggccgcgtcatggcggacgccgcaggacacgttccggaaaaactctccagcgacgggctgcatccctccgcggccggctatgagcgcatcgccgccgtgctggcccccgtcatcaggcaggcggcggaacggaaaaaatgacgccgccaagaaaccggacccgctttccggtgtttttattcatggaaacctcagcagaaacaccacaatgaacgaacaggacgatacaaaactctggcagattctgggccatgcctcccagcctgcgccgggggatgattttgcccgcagggtcatgatgcgtattgccggggaagaacacgccaccgccgttccggtggaatccatccaccacttcaagcggaactccttccgcatctggggcgccgcggcggcggccctggtggctgccgtcatcggcattgcagccctgatggaaccctctgctccgcaaacgccccccctctccatcgccaccctgaacattgacgatgtgctggtggaagaagccggtctgactctgggccaggaaaacctggtggacgctctctgcgtgctgtcctccacggaaacgggcgtcatctcctcggacaacatccaggacctccttctgtaactccggaaatggaagcattcttcgttcccggcccagggagcggaaactcttcgccgggcaaaccggatttctttccaccccgtcccgaatccgccttcctgaaaaccggttttctccgcaaacgggaacaccggacaccggaaccgtaggaacgccgcgctgccccggcccccactgttataaagccttttctcttccggccatggctgtgcctcccccggtctttccagtctccacccggaacggaaggcagagtttccaaaccttctacctggccccggaactggtggagaaaacggccatccggaataggggatttatccggcaggaagggcgcagctatcaggcccggtagctgctgcaccaattaacctatttgcgaagaaatacatccaactgcaataacatatattagctggtaatgaatggaatgcgccaatttttcatatgagacgggcaaagatttttccctttctttcgggcgttctggccggatgatacggcagatatccaaaggcggccgattcttccaggaatcggctcttatctcgcatgaggcttgttgctgctgtcccaggaattcttcatgttcgttgaagaactaaacgtttagttcacaaacaagaaactatcaggaaaataaataattatattcctctaaacaaggctgttggcccgaaggtcatctgcgacggttaccaggccctcattccccaaaagctcggagtcgatgcaatgacgttcaactttgacggttcggcatgcgaacatgccacttgcgccagcgcgtcgaaatgttcatcaaggtcgaggaagatggtctgtattatttcggagcggaaaccgacgacaccggaagcctttccattgctggcgaagaactctgtaagaaggatggaacaatttgctctgggttttgagagcgatctttcgaatcaagtggaaaactatataaaacggttaccggatgaggtcaattctcgtccttattgtgccggccaaaaagccctgaatgaagtgactctccagattatcgcccaagcaaaaaccaacggatggagcacggtacccgatcaggtcacagaataaggcgcccttgagccgccttgtcctgaacgctgaaacagggaatacttgaaaaattgatacaatgttcttgtgaacacaaaacaatttactacagttactagaatgagaggtacttgtgctgtgatgaaaagaatctttcagtttttaggatgtctggcaatcctgtccttccatgcggcggcatggggggacatggccgacaatgggatcgaatgttccgtagtgatggaaaaaaccgagtttgacgcgagggaggctttccctgacttcaagctggtgttcgccaacaagggagaaaagaccgtgcgcctgttcgacgacttctatcccctgaaggatgacgggccgcatatttccatagagattttttcggaactgggaaaagagaaaaggaaaaaggtagcagcatattaccctcattattgcattgaacgaggacgtttcttgaattttattacgctgaagcccggagaaaagcatgaagtgctcattaaggatgcttatctgttgatgcactattttgggcctttacgccgtcttcgcaatggtgagaactatgagttggaagtgatctttcgggatgggtatggagatcccggtatttggaggaagtatgtagggagagaaaatttctccgtggtcgatcaatcgccctggaatcggtagaacatttgcaattctctcttcggattgtttcctgttttttcttccttgaatcggttgtcaaggcatccattttgttctgtaaaaaccttcggattgaaccggggtggtttctggcatagatcagagaatattcatttggcagtcttttcgtgaaggcggtcgaagttcgtcttcttatcacgtctgaagcgtgttgttgctggcccaggaactcttcatgattcctggtgaactaagcgtttagttcagaaacaagaaactatcaagaaaatgaataattatattcctctaaataaggctgttggtcccgtttgcatctatgatggtagtgaacctctcattgacaagaagcttggtgtagaagccacggaatgccgctttgacggctcggagtgcgaacacgcttcctgctccggagctccggaaatgtttatcaaggtggaagaggacggcctttactatttcggcctggaagccgacgacaagggattcctcaaaatcgcgggcgaggaagtctgcgtcaaagacgggactccccctcacggacgtctggaactggccaccgggtcaagaaacctgaaagcgggctattacaaggtcactctcctgtgcatcaatgcggaatattctcctaccagcggcaatgcgattgccttcaatgtgacgatggacaaggaacccatcaaggaaggcgattattccggcaattcgacaatgaagcgcaccttctccgcatccccgaagatgaaattgtagaccatcgtgaaagaggccaccatcacctgtgaagaatcccgggaggtggaaataggatttgacgaaaaggctccgactttttcaaatgaagcgggaaattgtataacgacgcctgtcagccccaaaatttttgtgacggcgtgcaaggatgaagtggccgatgtctggagactccgagttgcccacgtttcctgcggaaccgagatattgattcgcactggaggctaccgggacgcgcttgctaacccgccgaccaccgaaggggaagccgttatcgcggtcgagtgcatgaatggggaacaagccaggggtggtgttttagggtggagcaccaaggaagccgggattgcccatgaagaacaccaccgccagcagtggaaggaatcataccagttttactggaaacacttaaaggttcaggaagaactggaaaaggaaagtgtctcctgcaaggaatacccggatatggaccaggcattggaagcgatgaagaaggccgttaccgattgggaggagaaattccagcaagaagtctggacctacgtccaaaaacttcccgatgatgcgaatagtcgtccttattgtgcagggcaaaaagtcttgaatgaagcgaccagaagtgttatcgctttagcggatgccaacggctggacccgggttccccggaacgtcacggtgccgggagtaacggaacccgtgtgtttccttcccccggtcaacggtgaagaaaactgaacgtttccttattaaatcatgaacaaagcctgtctcttcgtcaatttgttggttggcgtgttgctggccggaaccgctctgggcgatcaggcggacaacggcttggaatgcaccatcaagatggaaaaaactttctttgacgtaagagacaggctgcgggactttacgctcgtttttaccaacaagggaaaagagccggtccggctttatgatggtttttatcctgagccaactttaggtcctcatatcatgataaaactttggagccagcaaactgggaaggagaagaaaaaagttggctcatatctgggagcctaccacgttaacccgatgtttcaggacatccggtttattaccttgaagcccggagaaaaacacgaagtccccattaaggacgtttacttgctggtggaatttctccctgagacgctgcgtttgtccaagggagaaatctacttgctggaagtggagtacatggatgagcgcggcgaaccgggagttcgcaggacatacaagggagagacaaaattctgtactaagccttaacaaatgattaaaaaatcactcgcttgtattcgatgagtgaggatttttcctttgtggaagccagctcgtttcctggggactctccgggcaacggctaaactctcgctgtaatgaaaaaaatcttccggtatttaggaattttggtttgcctgtccctccatgcggccgcatggggggatatggctgacaacgggatagaatgttccgtggtaatggaaaagacccgatttgacgcaagggaggcattcccggacttcaaactggtgttcgccaataagggcgaaaagattgtgcgcctgttcgacgacttctatcccctcaaggaatatgggcctaatatccgcatcgaaatatgggaaaaggaaggcgggaagaggcttggggcaatcatatacgggagagagaagcctatagcttggtatggagccgggtatcaaattgaacgggcagcggatgacatccgcttcatcacgttaaagcccggtgagaagcatgaggtgcctatcaaagacgcttacctgttgctggtgtatttcgagcatcttcgcaatggaggaaggtacgagcttgaagtaagtttcagggatggatgggcggaaccaggtatttggagaaagtatgtaggaaaatctgattttcagacggtgtgcagatcacccaaaggcacctttccgggttagttgttttttctctcttaaaaaattatggtatcctacgcaaagcctcccaaagttcctcaaatcgctttccagatataaaaacccatttccggaactggtggagaaaacggccatccggacggggaaaatttccgctgccgacggttccctttgacgtgcacgcccgtatcgtttacaacgggtttactccatgcaggacttcctttccaccgttattctcctgttcatcgtcattgatcccgtgggactggccccgatgattcagggaatgctgaagaaatattcgcccgcccagcagaaggccattctgatgcgggagcttgtgtttgccctgagcctgctgctcctgttcttcttctccgggaaattcttgctggacctgctggggctggaaccgtccaccctgaatatttccgggggcatcctgctgttcctcgtggcgctgggcatggtctttcccgccaaggacatgctctcttccgccggacgcacgaccggacaggacgaacctttcatcgttcccatcgccatgcccctgatggccggcccctcctccctggccatcatcatgctgcacgcctcccagagcccggacagcatttcccagatgacctatgccggcgccatcgtgactgcctggttcctctccggactggtgcttttcatcgcgcagaagttcctgcgcctgctgggggaaaaagggacgatcgccctggaacgtatgatgggcatggtgctcatcatgatttccgtccagatgtttatgaacggactcgccgggtacggcgtgaaataggaaggcgcgccgaccatgctttggctcctgcacggtaacctgggctctccggcggactggaaacccgtcatggaagtcctgcgcgccgggggagtggaagcccgcgccctgaacctctggaagtatctggaatgctgccccaagagcctgaaggacatggggcgcgtgctgtgctctgaaatagccgcccaggacaagcacccctggctctgcggttattccctgggaggcaggctggccatgcaggccgttctggcccatccccccctctggaaaggcgccgtattcgtcagcgccaatcccggcatggaggatgaaacggcaaaagcggcgcggcgcgcgaaggacgcagaatgggccgtcaagtgcctctccgcgccatgggaggattttttgaaggaatgggacgcgcagggcgtatttgaaggcggcccgccgccgccggaccgttcttccctgaaaccgtggcgcaaatccatctcccgcgctttcatcgactggtccgtgggcgcccaggaaaacctggccccgctcctgaagcagtcccctgttccccagttatggatagccggggagcgtgatcccaaattcactgccctggcccgccgggcggcgggggaacaagccgtcatcatcccccgcgccggccaccgccttcccctggaagctccggcgcggctggcggaaagccttcaacaattcatcctgcaaaacccatgaacgatcccaaaataccggacgcggaagatttgagaaaactggtggaggaaatagcccagacccacgtccccttcggcatgtacggtccggccaagtacccgcccaaggggtgcccgctgatggacgtgccccaggaatacctggcgtggttccaggccaagggctttcccaagggaaaacttggccgcctgatggaacagtgcctgctgctgaagggtaacgggctcgacccgctttttgaccccttccgcaaagccaacggcggacggacgaagaaaaacgcccgccgccgcgtgtgggattttgagagcgaataaccttccctccggaaggaacgcattcttcccgcgtcatcaggaggggggaacgagcttcacttcccgccttgtcccgtcctcttccgtgacggccagcacataaaacacccggtcctccttcttcccgcgcgtgacggtaatggtcaggctgccgcgggacagcttcacgccatcctccggaacggagaaaacgcccagctttcccagcagttcaagcgccctggcgccgtccctcacacggatggtctggccgtcgcctgaaatttgcttcttcacgtcctgccacgcggcggccagctggcccggttccctctgctgcatctccgcccgggaaagagggggcagagccatgcaaagcacggcggacagcatgatcaatagtctcttcatgacagggaggcggcggggagttgcttgttaatggtagcctggaacttttccagggcctgcatggcgtggtcggaagccttccggtcaatggaaagcttcaacccgcagtgggggcattcaatgccgccggacaacaggtccggaatggttgtggggaaatacactccgcatttggggcagtcaagccccggagtgcgctggtaggaataagtggttttctggtccatgttttttcttttaattagttattttttctcctgggagggagaatcttcataatgcggacgagaggtcagctgaaggaattgggacaagccggaaggcatgtccgcctgctgcatggtgacatggattttcatgttcgcctgcagggaggaagagaaggaacccctcccggactggggcgccagggaagccctgaagttcagcccgtcgtcctgccccttcccggcggaggaatccacctcacccttgttcagggaaaagcgttcatccggagcggaggcgactgcgtcaatgatgttgatgtcaaagtcaaaatccgcctgcttgatttgcagcagaggcagcgtcaccaggctgatgagcggcacgctgacttttttctccgcgccgccggaagcgtcactgtccgtaaaattgaagctgatgagccttaacgcgcctgtggaaccgtccgcaggattgtaggactcaaaagccagggacatgaaatgcttcatgtagcgttccgtggacatcgcgtccgcatcaatcgtcgcgaccagcggggccgagatcaactgctgcaggctcatgatgtgcccgttcaccttgttgtttgtagaatcactcataataatatcactattgcgcggccagcccggagacgtcgttctgctccgccaggacggcgggaacggcggcgggcgcgatgttgaggtgaagcgtctggatggaattctccggcatctttttcagcttttccgtctccacctccacgtccaccaccacattgcttacctgccgggtgaacgcatacttttccgcaagcacgtcaatgaaggaggagaggccttcccggaggttcgtgcggcactcctgcctgagggcgtccccctgggcaccctggaacaggtcggacaggtcgggattgtccatgaactccttttccgccacgtccgccagaagttcgttcagcaatcccttgtccagtccggtttccgcgcgcaggagggctccttcatggtcggagacggccgcggtgatcttcttccccaggtaggcgcagaaattccttttccattgttcctccctggcgagcaggcttgaaaaatcgcttcttgcctcgtcgtccggaaggctggaatgcaccacagccatcacgatggaacggatggcatacgccggcacgcgctccgccagttcctgctggaacaggctgcactgctccgcatccaggacctgcctctcctccatcccggaggtccccgtcaccgcatacttcaggtcgaattccagggcccctatctgggcgctgggaagctggaagccacgcacgctgccgtgctttccgtactggcgcgccagcgatgccgcatggcagttcgccgcgtgctgcgcttcaataatgtccctcagcagggattcgacgatcagattcagacgagacatggctctgggatggagaagaaatcgttacggtccggttatcaggctcctacggccaccttcctcttgaggtctccggcgctcaccgtgcagttcttggcgtcctccttggaaaccgtgtattccttgccggaatccgttttcacaatcttggcttcgttccccgtaccgctatcgaacgcttccgtggcatcccctatccggagggtgatggcgtccggctcaaacaggccctccttgttcttgtaggaggtcatcagtttcacgctcccgtcgtcctggatggcatgctgcacttccagtgacccctccggagacactacggaaatgctgttgttgagcatttccagcaccttggccatgccggcgggcatgctgtcctgcccggcatgaacggccacgtccatcgtgtattccacgctgtatttggaatccttcgtagcggaggagtccttcttgctggaatagctggcgttcatgctgccgcgcgcccagaagcatcttgcggaggcggatgtcttgacgtctgcggcgctggaggaatttttccgtttccgtgctggcggcggaagcgctgatgttcgccttgaagttgatgtcaatggagttgatggcgatgtaggggatggggacgatggtcagaaggggaaccgtgatctgggccatgtgcccgtccttgatgaactggaaggagacgttcaccgtcttcttctcttctccctctgtgtacaggcctacgttctggatgaactcccatgaggtccgggccgcctgggcctgggcttccacgcaggcgaccaggggaccgccgatgatgttgccgaaaggcagcgacttgagggaggcggtcgccacgtctgctgctgatttgtcaattgccatattattttattttctggttgaggttaatatgatgtgccgccttctggcgacgttgtaatgatggagccattccggagccgtttccatcccgcctgtccggaatgccggttccgccttcccggagcgccggcggggcatggctggcggctatttggaaaacgacagcatgttcaggctccccagcactttctttttcatgaacttgctgacggggatggagacattccccacttgaaggaaattgcccgcaatggattctatatgcagtttgttaaccagataggaacggtgcacgcggatgaaatattccccgtccaggtgttcggccacccgcgccagcggagcggataccagaatggacgacatgccgtgcacgtgcagcgtgcagtagcttccccccgcctccacatacaggatatgcttcatcaggatgcgctggaacccgtcgttcattttgacgaacaccatggggtttctggacagggaaaatccggcgggcctccccaacagcggcgtaagggagtcatccttcatttccatgatttccagcttgtctccgtgctccaccggttccggcgccggggcataacagatcctatcttttttagtgactttaataaatttaatggtcattcaaaaatcatagcaaaaactttaaatactcaataaattcatcaacgaacagcagaaatgaccttctgaaaccaaatttatctcttctgaacggccattggaaaccgggtcttaccaacgcattcaggccgcggaaaccgtattccgcggcctgaatggcacccgtctctgccgggaaaaaacctaattcatcagcgcctggtgccttttcagcaattccaccgtcagcggttcgggaaaggtcttcacgttggacgacctggcatcctccctaaagttttccccctcatacagcggcgcggggtagaccttgaggatgccggggcgggcggtccggacaagcgtctccgccatcttcatcgccaggggattgccccccgcgcccttgtccgtcacgcagacggactccgtcagcatgaaattgccttccgccgggtccacgtaatcaatggggaggccggccttcctgtccgctacggcctggtggcgcaggccgaaggcaatcgccacctccccggcgcgcacctttttcagcggtccggaaccggaattttccagatggggcccggcgttctccgcaatgccgcgcagcaggcgccccgcctcctgttccccgtacgcgctggccagggcctggaccatcagccatgccgtggaggaactgcggatattgggaatggagatgaagcccttgtacgccgggcttgcaaggtctttcagggaggcgggccggggcagcccgttctcctgaagcgccctcgtattgatgaaaatggccccttcctgcgccgtaaggggcgcgcagaaaccgggcgtcttttccagggcatggaacgtgaaggagaggggggcgaacatccggtgggcctgctgggcgctttccaggtagtaggtggaggcggtaatcacatccgcctcaatattgccgccctccgccatgatctttccgcccagctccgaggtgctgaaggaggaaaaaatgtactgtccggaaaatccggccctgtccagggcgtcctgcatggctagccgggattcttcgtccgcgttggagtaaatcactacctccgggccttgattgcagccgcccaggcacagaaggactccggaaacggcggcaagcgcgcaggcaatcatggtggactgttttttcatgacggtattttattgttttttggtgcatctggcggcaatgccgcccagaatgaccctggccaggatattcgtggccagaatcaggagggacatcacaaagatggaatcaaactgcgcgtaatgctgcaattccttgatcttggtggtcagcacggccgttctggcgcccaccaggaagatgacggcgctgatcgtgatcatgctgttgatgaaataatagctgaacatttccagcacggttcccagcgaattgggcaccacaacccggcacagggttttcagccaggaatcacccatcagggcggctgtggcctcccagcccttgttcattttctccagggagctcttgcccatcaggtagggcgtggtgaagaaatggaccacgttgcagagcaccagaatcaggaaggtgttttgcaggctggtgcccgtgaaggcgaacaggaatgccaggccgagcaccatgcccggaatggtgttggtcaccacggctattccatcaatcgcgccgcgggccacccgccccagcccggagcgcgcggaggccagcgcggcgccgtaggaaagcagggtgcccagcagcgcggtcagcagcgccacccacagggaattgccgtaaatggaaagcaggccgcgggaagagaggatgcgcatgaagcgttccagggaaaattccacctcataaggccagttcctgacgaaaggcaccacgaacatgaccgcaaaaaccgccgcaatggttccgatgacggccagggacccggcgccgcacacggcgtccctcaggcggcttttgacgatgtcctggcggcaaatcctgttgtaccggaaattgtaccgttccaggtaattgatcaacaggatgctgatgatggacggcagcagcatggaaacggcgaccgccgcgcctccgccgaagttcgggatggcccccagcatttcattgtacaaatggatggccaccacgtcaaaactgcctccgatggaggcgggaatgccgaagtccgtaaaactcagcgtgaacgactggatcagcgccgcccccagcgtacccaccagcggcctcacggccgttcccaggaaagtgcgaacagggccgtcccccatcaccttggaaacgatggcgaagtttctgtctatatacttgaaggtgttgttgatcagcaggaaggcgaccggcagcgtgtaaatggtgtagcccagcagcattccctggaacccgtaaatgtccagcacctggaaccccagcagccgcgtcagcagcccttccctgccgaaggaatagatgatgacgaagccgtacgtgatagtgggcaggaacatgggcgccaccgtcattcccgcaatgaacttgcggaacaagggcggcagccccgtattgttcacggcatacgccaggaaaaaggccagcgcggtggtcagcgccgcggaaatcccggaaatcagaaaactgttccggaaggattccaggaatgccgggctggccagcatggccgtgtaattccccaggccggattccccgcctaccaggaaggacttgcccagcagcagcgccatgggcaggaccaggaagacggagagcaccagggcaaccgcccagaaaacgcccctgatttctatctgggttttatgcataggagccctcaaagagggaaagaatattattcctcttgatctccagctggttcaggatgaactgcttcacaaagctgttgctggggctggaaatgatttcccgcggcgtggaatactgggaaatgcctccttcgttcaggatcagcacccggtcggacagggtaagggcctcctccgggtcatgcgtcacaatgatcgtggtcaggttgtactcccgggcaatcgtcttgatgcgggacttgatggactccttgatgacgccgtccagggcgctcagaggttcgtccagcagcaggatgcggggcttcatcaccagcgtgcgggccagggccacgcgctgcttctggccgccggaaagctggtcgatgcgcttgtccagatgttcgctcaggcccagcagctctaccagctcccgcacctcacggggggagctggcccccggcttgttcttcaggccgtacgtgatgttccggtaggcgttcaggttggggaacagggcgtaatcctggaacacgatgttgaagccgcgccgctgcatgggcgtgccgctcacgtcctccccgtcaaaaagaatctggccaccgtccagttccgccagccccaggatgacgttcagcagcgtagtctttccgctgccggacggccccaggatggagacgatctcccctttcccgatgtccaggctgatgccgttcagaatgggaactccgttatagactttcttgatgtttttcaactgtagcatggtaaactcctggccgcctcagcggcctgctgggattgatggatgggaagggaactatttgttccggcggatatccgccacggcctccgcaaggcggcggaaatcgtccgggaacacgtccccgatattgccgatgcggaaggtaggggcttccgaaatcttgccggggtaaatgacaaagccccgttccttcaaggcctcataaaacttctggaaatcaaaatcctcctccgggtacaggaaggacgtgatgatgggggactggagctcgtccggcagcagggtccggaacccgctccggcgcatcccctccaccagctccgcgtggttttcccggtaccggtcatggcgggcttccacgccgccctcatcttccagctccttcacggcctggaagaaggcgcgcaccacatgggtgggggaggtaaagcgccacttgccgcggcctttttccatctccgcccactggtcgtacaaatccagggacacggagcgggagaccccctcgcaccgggacagggaggagcgtctggcaatgacgaagccgaaacccggaacgccctggatgcacttgttcgcgctgctgaccaggaagtcgattcccagcttgcggatgtcaatgggaatgccgccgaagctgctcatggcgtccacgatgaacgtcaggccgcgaccgcggatcgccctggcgacggcctccaccggattcagaatgccggtggtggtctcgcagtgcaccatggccaggtgggagatgtccgggtgttcctccagcgcgcgccgcacggcctccggcgttacgggcgccgtctccttcagggaaacgaggacgtgattcaggccatggcggcgggcgatgtcccccatgcgcttgccgtacgccccgttggcgacgatcagcagcttgtcctgcggcctgacggcgcagctcagcgtggcttccacggcataagtgccgctgccctgtaaaagaacggtggtgtattcgccgtccagcccggccagcttcaaaagctgttcccggatgacggtgaccacgccctcgttgtaatccttgtcccaggtgcaccagtcctgaagcatggcttggcggacggattcggaagtgctcagcgggccgggggtaagaagaaggtaatttctcatggcagatgaatggttgaaaggctagcggttcatggaggcgttgatctcctcaatgcaggcgggcagctcacggatggaatccagcacgtaatgcgctcccgcgtccagcatgcggcggcgcacttcctccttcattctgttcaattctgcggcgggcatggcctcatattcctcctcgctcaggcccagttcattgctgcccgtaatgatgcccacggtgtgcactttcgcactcaatccttcccggatatccgccatcgtatcgcccaccttcaccacctggtccacggaggggatctccaggtcaatcatgttccggtaaaccatgtacggcgcgggacggcccgcgggcacttcgtccggcgtcaccaggttgtccaccacgtaaccccgggcggcagctccggggcgcacaatgtccatcatctccgccgtgtagcccgtggtggacccgactttgatgccccgggccttcaggccctccagcgtttccaccactctgggaatgggtgtggtgaaatccttcagggaggcgaacaggtgcgtttcaaacccggcgtaaagctcctgcacgtcggattcattccaggaacggccgtacttccgttcaaactgttcgcgaaccggatccatttccagaatggcgcggatgtggtccactttcagcaaccccatgggttcccgcgcctgcctgtaggtgatatccaggcccttttccctgaacacgctcaaaaaaacgttcaaaggggcgaaacagccgaagtccacggccgtaccggcccaatccatgatgatgcaactgactttattcataatctgtaatgtctggtcgttgaaggagcagcagcggcggctttcctccgggaacgtagccaacctaaaaccttccccgccgccggacaagagccgcctggttgcaatgttgtcacataaacggcgctggacacggtcagaaattcgtgtacgcgccgcagataaacgtccaccccgtaaacccggcggaacggcctccgcgggaatgcccgtactccgccatcgtcatgatcttcagccgcgcgggatcgtcccggtacacaaagaaattcaacccggcggccacggcctggtagcaatccacgcggttccctcccctttctgccagggaggcatagcgcttgttcggcttcacggcgtccggaccgaatgcgagctggtagcgggcgaccgcctgcacatgccccgtcaggttgaaggacggcatgacggtcagccccgccaggccggacggagctatcacgccgccggaggaatactcccgcagccgggaagcccaaaccgcctgggccatcagctcaaatgcgccctgctttccgtaataatacagcgccagcacgttctgcgccccggtgcccgtgtaattgccgtcgtaggggcggtccttcatgtcgccccagttgtaaatccagtcgcagtaaagccgcccttccttcagcagcatgccgtccgcgcgcgcggacaggcccaggctcatgttcacggactcccaagtgccccaggttccgcggctcctctcgtccgtgttggaccacaggcccgcgtaataccccagcggctccttcttttcgtcattatagctccagacgccgaaggaactgtcgctgaccagcatgttctccacggcggaaatctccggcagtttgtacttggaactggaaatgcggttctccgccagaatgacgggaagcaccttccccgcacccacaacagcgcccggcagggaatattccagatgggcctcataaaggttgccgcgggtcattttgtggttgttccagcgtccgcccttgtaatagcccagactgtccacgccgcccatgttccagatattagccactttcaggtcccggagcaccctggcgttccagcccagcctcagccgccgccattcctccgtgcgcccgtgggagccggtgtacgtcccggaaccgctgggggacacggccgccgcctggtactgggcccgcagggacacgttgaactcctgaagccacggattctcgccattcctgtacaaatgcacgttgccgggatgggctccgtagctttgcgcccagagtccggacagggaggacacgccgcccgccgttccgttccaggaggaaaaaccttccgcgccacacgcaaagccggcggcgcagccaaaacaggcggcatagaaaaaagaggccagggacatgattccccaccatatccgttccggaacccgcctgaaccattttcaggtcaaaaaatcgccacacaacaacataccggaaaaaggaaaaacgcggctttcatcttcgcgcctcctgatgcatgcccatgaaaaaacagggaggtcccggcgcgccctctgaagcttcccgtggaattcacggacggtgcagccgtcacggctctgtctctccggaaagcaggcggtcaaagacccactccccgaacgtccactcctcattctcccctttggcaagggcgaactgccgaaagagttcccggaacagccccctcacttcgccaaggggaacggcgcggcgcagcaggaacgccgtcctgtcgccctgggcgcgccctccggcaaaaacatcgtaaacgccctcgctacggccaaccatggccagctctgcaaacaaggggcgggaacagccgttgggacagccggaaatccggaacaccacgggttcgtcatccagcccgaattcatgcagaatttcttccagccatccgttgagctcccggtggaccagggaagaagcggcgcgggcgcggcggcaacccggcaagccgcggcaggagcaggattcaatggagagcggggaaaaatgcctggacccgcgcagcagtaccttgatgcgttccgccacgcacctgtccgccggatgaagcctcaaattgccccgcggcgtgatgcgcaccggagaagtcaaaaaagggaccacgcgccgccatgccgacgccacggcatattccggcgtatcctccagactgccggaagggagcgccaccagcagcccgttatagaaatcattgcggctccactccccggaagaggaaaactcaggttgctccccctctcccgggtacaagccggcgtttttcaattcattcagaacccagtccaggctgcgggaggcgaacagcgacttcaatctcctcttgcgcggattgtccggttccccgaactgttcattcagggccgtcagcacccccgccgccttcacggcctccggcagggaataccaccccagccaggatgccgcccgcggcgccagggccgcactgcccccctgaatgccgcccccgcctccggcaaacaaatgcacgccgccctccggatggcctcccttgggaaccacaaagcccaggtcacaggaaaacagcccgaattcatggtgcggagcctcttccagacaaatacgggcgcgcttgtgcagggcggaaaaacgttcttcaggctgcgggtccgaggaaaaaagacgttcgcggtttttgcgtatttcatacgcggggaaggaaacgggagcggaaaacctgttcaactttccggcgaactccagccatgcgtcccggttttccccccagcagagggaggaacctacatccacggcctgttccgtatagggaaccaggcgggaaagcttttccgccagggcaatgcccttctccacgcattcccgctcatccaccccgtccagaggaatggacagggtggaaaaggaaacaaggcggcatccgccgtccacggcgtccagaacggcctgccactgggcgggttccatccatcctccgcaaaacggatattccatggtgtaggtatttctcatgatgaataaaatcagactcgcgccgtcgccaggaacaccacgtgcatgacggaaaccagcgttacaaaatacatgtccgcccgcgcggacggcacagaggagaagggaccggccatgccgaggcccagagcgccgtgggaacaccgggaaatgcagtcccggcaaagggtgcagcgcctggaaatgcggcaggccccgccctcgcgcgagatggcgaggtcacggcaggcggcggcgcactgcatgcacccggtgcacgtctccttcacgcgcatgcgccagggggacagcctgcccagcaaaccggcggccagccccatgggacaaaacctgctgcaatattccctcacgccgcccgcggcgctcattctccaggccaggggagccaggaaagccgcggcaagcgcaaccgccagggcgtattccaccgggagtccccacagggacaggagcagcggcgttcccaccgctacggcgagggccgcccatctccagtcccggaggcccttgcctcccttcaccggacgcccctttctgcgggaggaggcggcggacaggcagtcccacaccccgaagtagcacagatggctgcaccacgcgctcccggccagaaggacggatacgctgaacagcgccagcatgaagatgccttctccccggtaaaccgggccggaaatcatcatgaacggcacgggaacatgcagcctgcccgtcatcagcagggaggaagccaccgtcacgcccagcagaaactgaagaaaaaacacggaggcgaatacggtccacatcagccgccgcctgcggggagacgcctgcggattcagcagcccctccgcacaatagcctccccaccaggccagaagaagaatcgcgagtccgttgacgccctgccacggcagaacacgctctcccagcagcaggcggaaaggggccagcgcatccagcagaaacagaaatagcacggaggcggaaaacacgcggctgcgcgccagctccggaacaggcaaatccttctccccgcgcctgcgccacaggatggccgccgcatgaagcagcaacacccccgccagaatggcggccagccgcagaaacggcagtccctccatcatccgcagcctggccagatgccaggtttccgccccccagaaaagcagggaggccagcagcaggaacgtgacgctcctgcggagccagccgcgccgggaaaacgaaagcgccgccagccccatgcacaaaatgacgcccgcatgcatcccgccgcgcaaaaaatgggcggccgtcatcagaaagcagaacaaggagaagagtccggggccggtcatggcatcgtgggcgcctgtctggcacccccaacataagtgaaaagaccgggcgctccagaaaaaaacggttcatccgcccgtgaagggagcctcattgcgtcacccctccgccggaacagcaacgcagggaaatacccctccgccgctccgtccggaagcctccggaacatgcggaagggcaccgttccacggcggcgaaagccgcgggggcgccctgccggaaacggcggcctccatgcgtggacgctgtccggccgcgcatggagccgcatcaggatgttaaaattacaatttcctggtgttcagctttttatccaccaccatgccgtccgtgagcttcggctggaacttcacgtcgcgacgggccttgaacttcagcacaaacagctcggaggttccctccaccggttccttgtccccgatattgacgaaggtgggatacagggccttggttccgttcgtatgaagcctgtcgttcgtcaggttctccatcttcttcatgttcttaacctccacgcccacgaattccaaatccttgggatcgtacgggagggcaaagctcagggcattcaccagccggaggttccggcccttcacggtcaccttgacggcgtctcccttggcgtacctcttcttatcggcgctgagcaggagctttccgtccaagcgggctttcttctttgcctcctcggcggctttcttcttctcgccgtccccttccttcttatccccttcctcgtccttcctggcggcttcttcctgcggctggtcggcttcgtcttccagctgggtggctaccacggaaatatcgtaagcgtcaataaggccattcttgttgatgtctccgttgctgatgtagccttcaaagtcggaatcgcccttccgcaggcccgtgtagttgatgtaggaggtcaggtcgttccggtcgatcttgccgtcattgttgatgtcgcccggcaggtagctttccgtgcccggcaccttgaagacgtagatttccctgccggagccgtagtcgcccacgccttccgtgacattcagcttgatgtagcgcgccgtgggggcgtccttgaagttgaagatcttcacgtcgccattcttgtcccactggaacgttccggccttcgtccagttttcccggtccatgctgtaggaaacggagcccttcaggagcgttccgttgccgccgtcctcacgcggaacgtaatggaacttctcaagcttgttgatggtcttcaggtccagaaccaggtcaaacggcacggccttctcgttgtacttcgtgtgccacgcgtccttttccttgaagtcaaagagtttcgtcagggaattgccctggttctccacgctcgtttcaccttcgattcccggaatggcgaactcaagcgggttggccttggtcttcgcgctgatggccgtccaggcggaatggccgtccttgttgacggcgcgtacattgaaggaatagggcgtttccgcctccaaatcctcaaacaggaactccgtccccttgatggtggtatacagcattccaccgaattcgatttcataaaaatccgcgttcggaacggcatcccatgaaggagtcaaggtatatgcggccgcgttttcctccgtcaccctggcattagcgggagcggtcagggcgccggaagagacacggtatttttccgcgggttcaaagcggaagccttccacggaaagcacggtgggggctgccgtaatatccgccggggccagcttcaccagcagctgcgggtttttggcaatcaccttcttctcaaaatcgcttcccttggtcgcaaacctgttcaggttgggagcctggtcatagaaatacacgttctcccgggacttgaaatcctccatggaattcgcttccgccaggttgacgctgttttccccgactttggcggaaacgctggacggcttctgcgttacgttgatgcggaactccgtggccttcttcttctggaagccgttgaaatcccccaccgccggatgaacggtgacggtcacgttgttcttgtcgtccgcccgggattcaaccagggtgcggacgcccttgccggccctgtattcctccgtcacgccgtcgtcgtcatacgcggtgaaggaagtgttgccgtgcgggtaaagctcgtaaatgcgcaggttaggattgatttccgagacattgttgctcggattggccatgggaatgatcgcgccgttcttgacgaacacgggcagtttccacaggggagcgtcaacgtcattgtaaatcttgccgccttcatacaaatccccggtgaaataatcgatccactgtccttccggcaggtaaatgccgtggcgcacgtcattcccctccttgtccgccctggtttcctggtaaacgggcgccaccaggaaataggggccgtacaggaactggtactgcgtggccttccccagcgtgtagggattggggtattccaggaacatggcccggatcatgggcaggccggaaacggattcctccgcgatgctgtaggcgtacggaagcaattccgacttgagcttgaggtaccaccggttgatggaggtatagggttccccgaaggcgtggggatacttttcattggctccccagccgtccatgttcagctccatgggagtgaaggtcttccactggaaatcgcggacgttcaccagcggattcttcccgccgaaaatgccgtccatgtccgaacagatgttgggctggccggagaggccggagccgatgtaggtgggaatatggaaacggatgtactcccagacgccgcccgtctggtcgcccgaccagatgccggcataacgctgggttccggcccagccgtccagggaaatgatgaacggtcggctgttgttaccgtaataggtcatgatctgggccacgtccgtaatgccattcaggccgaaggaatagccggcgcccacccaggccacgtccgtcttcagcacgcgcactccggcgtccctcacctccttcacgatgtcgcgctggagcagggcgctgatttccggcttgggatgcaggtcggactgggtccacaggcctatttccacgccgttcttcctggcgtagtccgccaggctcttcaaattcgcgatattgccgtccagggtatccgtctggccgtagccggctccgtagccgtcgttcggcaggagccatcccagcggcatgtcatgggccttgtagcggtccaccacggcgcggccggaaaactggtaattgttcaactccccgttcagggattccttaatgcctccgttatccttctggctttccttgtaccgttttccgtcttcaaacaggatgcccttctcgtcttccttccagtaatcccggttgtaggcgttcaggtggccctggtaaaaggcgaacttgggcagcaggacgggggcgccggtaagctggtagaaatcccccagcaggctgacgggcccgtcgttgaccatgaaaaagacgtccaggtaattttcatcatgcgaaaggctgaccaggttcttctccctggagccgaaatcatactggcccttcttgaaggtatgccacatgacgccgtagccgccggtggaccagtaaaaaggagtgggggaagccacgccgccatccgtccagctgttctggttctcaatggaaatcaccttccccttgtgggaaaaacggccgttctgcacgccgccgccgtagaaatattcatccggcttcgctttcagggaaaagctggtgctgcccttttcaaaaagaacgggggccgcctgctccaccaccacggaattgtccttcaggttgatgatcttgagaagagaggtctttttgtctatttcaatcctgatcttccctgtggtgatggtgaccacatttccctgctggtccacgtccaggcgggaaaccggcttccgggggttgtccgccaggatgcgggcttccggctccgccttggggtcgcggataatgccgcccttgtcatcccggaaaatccggaaaacgttgtccccgtaaaaatcgaatgtcatccggtggttcttgccaagcagcacttccacggcggcagggttgattttcctggcgccttcaacgggctggacctgttgttccggggtcagttctcccgatgcggcaacggcgagaccggagaaggaaaaggacaatccgaaagccagcaggacggacttccggaacatgccatggtcaattgagtttcccattattgtagtgttttatattattcagccggagcggcgccacggaagggatgcaaacgatcgtttccggccgggcaacgggccgttttccttcgtcatgccgtccagtggcgcagattatcttgctgcaccataccctttgtccgtaatcgccacaaggccaaagacggcagtaacggcgcaccattgctccacacggccataaaatacccgttcacagccacttccctttcaaggatgacctttttaaaagaattacttccgccccatggcgcaggggcacgaaaaagccctgcaagcttttgacttgcagggctttcaaatggttacgggagcaggatttgaacctgcgaccttcaggttatgagcctgacgagctacctggctgctccatcccgcgatttaaagagcatccgtagaggagtgcggaattgttataacctacttccgcagcatgtcaagtactttcaaataaaaattttcatggctgcgaccgtatgacagaggtccggaaacgctttccgggggcggcggaagggaaaggaaaaacgcaggccccttccggcggcttggctcacaacaggtaggagagttgcccggccccggcatgagggaacaagagcggaaaaatccccttccccgcacacggaaaaaaagaaaggattcctcgacaaacattgtcaaatctgtatatcttgaaaggtgcggactgggttccgcgcattaacatcaactagaaagaggtacgacaatgcaaaaggtaaacgtaaatacacccattacgatcacggggcgccacgtggaagtcacagacgcgattcgggaattcgtaacgaaaaagattgaggggatccgcctggacttcccgcgcattatggaggttaaagtattgcttgatgtgcaacgcgaccgcaagatttcccaggtgattctgttctgctcggaccacatcaccattgacgcttccacggaagggacggacatgtacgcctgcatcgacgaaacgatcaccaaaatcatgcgccgcatgcgcaagcacaagacgcgcctgatgaaaaatttccgcccccatcaccaggaaaccatccgcaagctggatgaaacggtatatgacgattccgtactggattaccccggagattccaaggaagacccggaacccctcctcattcacagagaaagctacaatctcaagaagctttacaaggaggaagccatcatggaactggaactttccgacaagcccttcgtgctctacaggaatgcgcgacgcgacgtgctccagatcgtgtaccggaggccggacggggactactccattattgaactaggcaccagcctgtgaccgtaaaaaacggttttgaaacaaaccgttttccataacgcatcaaaaagagcaggactcctgaaaccgggggtcctgctcttttctgtaatgccgtgacatggaacaagaaaatctcttgatttctacttgccaccatttacattggtcccagcaaacctccgtggatgcggaggttccagtagttaacaaacactgtatttaattcgaattatgaagaacatcgctatcctcgccatcgccggcgccgcttgcctggtcgcttcttgctcccagcagcagcagcaacagcaaaccaccgctcctgctcccgctccggttgtgcaggccaagggcaagtaagtttgcagcagggcctcgccctgcaacattagcaaatcatccaattaatccgcactcggtgtacgcactgagtgcgtttttatttgcccggaacccggttttcagccgtcatttgccggttcaccgggattttccttaaaaacggcggacgccgtagcaaacgcaggcattccccgcacatgcaggcgtcacccgccatcaagcagggatgtgcacaagctccggcctcgttaaacggccttttacattcaggcagccttggaagctccgccgccggaagcgccagcctctttatgggcagcagcggaaccgcttgccttcgcctcctcctgctgaccggactggaacatcctctggatcagcagggggcgtttcctggcccatccgggccagaccaggtgatggtccattccgtaggaatgcccctcaggaaaggccttggacacgaacggttcccgccagtcctcctcccatttgcccccttcccggtccttctgggtcagcaccaccagatgcccgcagttcttccaggcgtccaggacgatggaatcctgcaatccccctccggcggcgttcacgtacacgcagctgtgctccctgcccgttccatggtcgcggatggtcagccccacacggaaaaacttcacggggcggcggcgcatgtcacggtacaaatcctgctgcacctgccagcagagccccctgtcgcgcaggttggaattgaccaggatgttgttcagccagccgaacagcacaatcctgttattccgggcaatcgccgcggactggactaccgccgtgtccgccagccacttggcttccgccctggcggcaggaagagcggccttctccggcggcagcagccccaggaaagcattcgccaatccggacatctgctgctgcacgtaaggtctctgtatataatcctcagccggaggagtgcagcaggaactccatccgcacaggagggcggcagcaagcaaaagcctgaatgtctgcatggtcggcatggcgcgccaaggctagcagattacgcgtaaaaatccagtaaagctttcaaaaatgaccgtccctgccctgacggctcttgccttccccctccctccccggtagaatgccgcccctcttcaccatgctgacgatcaaaaacctcacgaaatcccacgccggacgcaccctgttccgggaaacggaaatgaccattaactggggggaacgggttgccctggtaggccccaacggcgcgggcaagtccaccctgttccgcatgattctgggagaagatacgccggacgaaggctctatcaacatggatgaatacgccatggtgggctatcttccgcaggaggccagcgaaccgaaggatgaaaccgtgctggaaatagccatgggcatcacgccggaaatggaacgcgccatccacgtcatccggacggcggaaaacgccaacaagacggatacgccggagtatgcggaggccattgacacctttaacgccgccaacggctaccagctggaacccaaggccaagaaaatcctcaaggggctggccttccgggaaagcgacttccaccgccccgcgcgggaaatgtccggcggctggatcatgcgcgcgtacctggccaaactgctcgtcctggaaccggacctcctgatgctggacgaacccaccaaccacctggacctcctttccctgctgtggctccagcgctacctgaaaaactaccccggcgccatcctgatgatttcccacgaccgggatttcatggacgaactggtggaaagcgtgtacgacatcgacaacgaggaactggtggaataccgcggcaactactcggatttcctgaaacaaagggacatgcgctttgaacagcttcaggccgcctaccgcaaccagcagaaggaaatcgcgcacatccaggaattcatcgaccgcttccgctccatcaactccaaagccgggcaggtccagagccgcatcaagcaactggaaaagatgaagctcatccaaaaacccgtggcccgcaggaaggtgttcaaattcaactttccccagcctccgcgcagcacccagaaggtcattgagctggaaaaaatctgccagtcctacggcgaccacaaggtttatgaaaacctggacctgctggtggaacggggagaacgcaccgtgctggtgggccccaacggcgcgggcaagtccaccctgctgaaaatcctggcgggcatcatccccattgactcgggaaaacgcactcccggcaccaccacgcgcatcggctacttctcccaggcacgcacggaaaacctgaatacggaaaacaccgtcctggaggaaatcatgaagtgcaacgctgaaatccgggaggaggaggcccgatccatcctgggctccttcctgttccggaggctggatgtggaaaaacgcgtcagcgtgctttccggcggagaaaaatcacggctcagcctggtcaagttcctggtggacccgcccaacctcctgctgatggacgaaccgaccacccacctggacctcctgtccgtggaagccctggtgcaggccctgaaacattatgaggggaccctggtcttcatctctcacgacgtgcacttcatccgctccctggcggaaaaaaccctgcacgtgaaccggggaaccatcaccacctatgcgggcgggtacgattattacctggaaaagtcaggcattctggacgacgaaaaaggcggcatcacggcggaataaccgtcctccccttttcagcttcccttttctccttgccttgggtttcatcctgccttagaaagacaggatgaagactttcctcgtccccgtcctggcctccgccctgatggccggagttccgctcgcctttggtgaaacggccgccccggcggcttcacccgcgccggcaaccccggcggaaaaaactccgtccgcggattccctcctcaaccaggccttttccgtggccattgacgtccagcagacgctggcggcagtacaggacaaggaaagcggggacaaggccgtcaagaaattgcaaggcattcagaaggacattcagcgtctcatgagcttccgggagaaattgagcgatgcggaaaaggaaaaaatggacgctctgtcagaaaaaatggaggaacggatggacatgctgagcgaacgctgtgaaaaggaaggccagcggctgctggaagcccgctattacggctccgccgccctgaaggacatcctggaaaactcggatgaattcagcgatctcgtcgagccggatgaagatgtggcggaaccggaggaggacaatacgccagccacagccggaaacgttctttctcccaaccctgaagacctcctcccgccgaattgaccggaaaaagatgcccatacaggaaaagccgtggagaacaaccgccctttcccgcttccatttcaagcttgccggaaccgtgaaaaacgggtttactgtgggcagcatgcaaaagttagcaggtaaaacagccatcgttaccggggcaggccgcggcatcggcaatgccatcgcccgccgcttcgcttcagaaggagccaaagtcatcctgatcagccgcagcccgtcaagctgtggaggagccgcagaagagattaacaaggaattcccggactcctgcaaggcctatccctgcgacgtggcggattacgccgccgttcaggaaaccgtctccgccatcctgaaggacttcccgcagatcgacattctggtgaacaacgccggcattacccgtgactccctgatgcttcgcatgaaggaggaagactgggacgccgtcatggacaccaacctgaaaagcgccttcaatacggtcaaggccctccagcgcgtgctgatgaagtcccctgccggacgcatcattaacatgagttccgtcatcggcctcgtgggcaacatcgggcaggccaactatgccgcctccaaggcgggtctcatcggtttcaccaaatccctggccctggaattcgccccgcgcaaggtgacgtgcaacgccattgcccccggcttcatttccacggaaatgtccaacgccattccggacaacctcaaggaagaaatcgtcaagaaaattcccctgaaggaacagggctccgtggaagacatcgccgccctgacggccttcctcgcctctgacgatgcccgttacatcaccggacaggtcatcgcctgtgacgggggcatgacgatgtaaggctttcccggtcttcaccatcccatgcgcggcattttccttgtttcctgctttctgggaggaagcgccctgctggccgggtgccgggacgacggctccccccgcccggccacggaggatgccgcgcgcattaccggcgcgcgccagtggggagagagccgctccgcactgcaaaaacgggagctggaccgcgccgccggacccgccctccctattccggacgatctgcccgccagggagctggtcggcaccacacgccaaatccaccagctcattgaagcctccgggatcccctcacgttttgaatcctatacggaagcggtgcccgcggcgggggcttccctgcacatggccgccattcccggcggaacctttctcatggggagccctgcggaggagccgggccgcaagccggacgaaggtccgcggcatgaagtgaacgtttctccgttctggatctcggaaacggaaattccctgggaactctatacggccttcatggaaaacggacgcccgcgcgccaaggacggccagcttctggaggagcagccggacgatgaactgtgggactccgtcacgcagcccacagccccctacaccgccatgaacctgggcatgggccacggctatgaacacggcctgccggccatctccatgtcccatcacgccgccagcaaattctgcgaatggctgagcgcccagaccgggcattactaccgcctgccgacggaagcggaatgggaatacgcctgccgtgccgggaaccccggagcctactcttacggaaacggggaggaagccctggaccagtacgcctggtactgggacaattccaacgaccgctaccaaaaaacaggctccaaaaagccgaataagtggggcctccgggacatgcacggaaacgtggcggaatgggttctggattcctaccttccggatgcctacggcaagcgggacagccagcccgccaaagaccccctggtcatcgcgcccaaggctccccacgtcgttcgcggcggctcctgggaagacgatccggaccgcctgcggagcgccgcgcgccgcgccagctctcccgcctggaaccggcaggatccccagaaccccaaaagcatctggtacctgacggacggcggcatgatcggcttccgcgtggtacgccccatgaacattccggacgtcatcaccatgcaccgcctctggaacttctccaagggggagccgtgaagagagacctcctatgaccatcaaattaagaacggaacagcccgcagactatgccgaaacggaacatgtcacgcgggaagcgttctggaaccattattcccccggctgcaatgagcattacctgctccatatcatgcgcggcagcccctccttcatcccggaactggatgtggtcgccgtccacgacggccgcattgtcgggaacatcgtttatgcaaaatccgtcatcaggacagatggcgggaaggaatgcgaggtgctgggcatggggcccatttccgttcttccggaataccagcgccggggaattggacggcaaatgatcgaacataccaaaatgaaggcccgtgaaatggggttccgggccattctgttgtacggcgacccggactactattcacgccacgggttcgtggccgcggaaacgctgggcatcagaacggcggatgacatgtacgcggcagccctccaggtctgcgaactgcaggaagaggccttatccggcatgaaaggccgttacgtggaagctaccgtgtatgatcttgatgaaaagtgcgccgccgaatttgacctgcattttccggcaaaggagatggtctccggaactccgtcgcaaaagcgctttgagaaaattgccgccatgcggagaaaagcggatacgggaacctgaaaccggaaatccttgcaccctccggatgtcatgaatcccgcatccggatacgttaaattcgcagcccttttttccaggggtaaaaaataagggccgttccatgagaacagcccttatccgtcaaaagcctgtcatcaagggctcaggccctgcggcggcgcatcatcagggcagccagccccagcaggctcagcgtggccgtggcgggttccggaaccacttccccgcggatctccgtaaaaatgggagataattgagcgaaggtattggttccattggctcctgtaatgacaatggaatcatcgggcgctcccgcgctgtcatgatggccgcgaatgccgggagcagtcaatccgttgctgatggttaccgtatctccatccgtggaagaagtaggcgcgcctgtccctcccgcagcatacaagtacgtttttgacgtatctccattgatcatgtccatcacggcctggctcacggtcaggtaacggtacgtcgtgccggcgtcaagaatcagggaagaaccatccacggctgagaaattgaacgtcagattgaccccgttgccggaggttcccatattggtgctcaggccgatgaccgaattatcggaagcgttcagcaccagaaaaccgtaagtgacgttagcgcccgtattgccgctgggcccgcgcagagtaaaactgtccagccggatatctccggacagggaggcgggagagccggaaccagagacgggggccagggcggaagaatccagccccagatagaacccatgaatggcgctgttgtaattgtctgctccaggagtgtaataattaaaaacagtcgcggcttctgaggaaacggcgaaggttccaagtgcggctaaaattgttagtgttttcttcatgtctattgtcctgttccttttaggctttgtagcggatttggaatccgcaaacaattaaaaatattaaaggttaatatattgcattcataattcgttggaaataatgattttttgatgcctctggttcttttattaacgtggtggaacggtctttgttattcattgatttccctattgctttggcctctttttcatacttgccggattccaaatccggattccaaatccgttatttagttacttacgcagaagccctgcttatgcatgcgcacgcgtaccatttactccagaacattgatcatgaagaaaatactatccgccttaatgcttgcagccggcatgagcctgagcgccaccgcggcgaccacgcttctggacagttccatcgtagggtattccgacttcgcctcccgtctggcggatttcggcacccggaaggattccgttgccatcacgaccgatggcggcaatctggtgttgtccggcacgacctttagccagcccgtttccgggggaagcacgcgcaacaacatgaccgtgaccatggttctggatctgtccaaaatcaacactccggaagcctataccgccctgtttaacgccaagggaggaagtaccagctggggtgcgggcctgaatacggaccgtactctccagggattatggaacaatgccgcatacagcggcggccctaccacctccgctctgggcacggaaggcaccctgaccatttccgtggtcaccggggaattcggcacccgcatctacctgggcgacagtgccacgtaccatactgccagcggcctgaaattcggcggcgtggatatcacccagattctgattgacgcgggactggctgacgctgttgaacagctctacgttcatgactccgctctttcccaggagcagatcggccagttgatgagtgaaatcgccagcgttccggaacccgcaacggcaaccctgggcctgctgggactggccgcgctgatgatgcgccgccgcagggcataaaaccgcaccggttctccgtttttctttcagggctgcctcgcgactccgtgaggcggccctttctgcatccgcacaacgcgcctaccctaccggaggcagatacttcttcctttcctcccctgaaaaacgatgttcaaggcagcctccggctgaaacgcttcacggggcgtccgtgtcaccccaccttccgcacaaatccttttcccccacgccggaacagccggaaccggatacggaaaaaaccgtcttccctctgcgggcggcgcgcctcatccttgcagccgtcctacccctgcgcagaccggccattcaggctctgccgggagcagcacacccccacgttccgggaagggcgcctgttttaagctgctccttccgcctgaaagggggaaacgtttttaacctgcataccccacatcctgatcatgaatctccagaaacagcaattgctcctgcgccttttccggtatttcaaaagcaaaaaaggagaaccgcggtttttcaacaagcggaatatatggctgctcgccattgccgccgcctacatcctgactcctgacgaattcctgtttgacggaatcggcaagctgggtctcctggatgacgccgcagtcatcctgggagccgtcttcaccgtcttttttccggacggggactagcggcccgcggccagggatgcggctagacggacgataccttccggaacttcggggactgtcccatgaacgcctccggattgcctaaaagaagcttctccgcctcctgccgggaaaaaccgcgcttgtaaagctcgcaggccagggccgtaagcgccagggggtcggaatctccccagtccgccgcggaattggcccagacgcgatccattccgtacagctccagaatatccgccgcccgcttggggttcagcttgctggtggggtaaagggtcagcccggcccagtagccggcctccttcaccagcgggaaggtgtgctcctcgcaatggtccaccagcacccggccggggtccagctccggacggtttttcagggcggaaagaatcattctggtccctttcagcttgtcttccagatggggggtgtgaatcaggacaagctggttcaggcgtattgccatgtccagatgctcttcaaaaatagtcatttcatgggaggtattccggttcagcccgatctccccgatgccgaggacattcggacggtcaatgaattccgggatgagcttcatcacttcccgggcaaaggccacgtcctgcgcctccttggggttgatgcacagccacgtgtaatggtccatgccgaacttggccgccctggccggttcgcattccgtaagctgcacgaagtaatcccggaaaccgtccgcggaggaacggtcatagccggcccagaacgccggttctcctaccgccaggcagcctgcctgcgccatggcccggtattcgtccgtggtgcggcacaccatgtgtatatgaggttctatgaaagccatgattcttatttgctgaagttcggggctccgcaggccgccttggcggcggcggtttccggcacggcgtcatcccggtaggaaagggcttccagaatggcccgtacgcgcccggcgccggaggcggacaggagggggagcgcttccatcagggcgcggtagcggaaatccgcctccccttccccccggtccacccggtccagaaacgcggctatatccagcaccccggcgcgcgccgccgcaaaatcggcgtccaatacctcttttttactccttttcatacgcagacgatacgcccatgcggaaagcctcgtcaagccggaacaggtaacaaaattataactattccaaactagtgaactgcaacgtcttttcacgtcttttcaaaaatccaaaaagcgccgggaattcaagaagaggcttgccatccgggtttgaaccgggcatcctgtggagacgcatttatttcattagagcgcctatgaatgcactagtaaaaaccatatgtacattcgtgacatcctccatcggccgcaaaatcattgtggctctgacggggttatgtttggtcttgttcctcgcgggacacctggcaggcaaccttcttatcttcggaggccctgaatggatcaacacctacgcccacggcctgcactccatgccggaagcagccctctggggcatccgcgcggggcttgcggtgatcttcatcatccacatctggctgaccatccagctgaagctggaaaaccacgccgcccgcgaaccctacgtgttcaagaacacgatcaaggcaacgctctcctcccgctacatgatctacaccggcctgactatcctggtgttcctgatctaccacctgtaccagtacaccctgcgcgtgggttacgatcccgcccagtacaccgccttcatttccgacggcaaggtggaaacctttgacgtgtacaagatgatcgtggccggattctccaacgtatggtgctccgccttctacatcctggccatcctgatgctgttcagccacctgcgccacggcgtgcagtccatcttccagacggtgggcgctgattcccgcaaaatccggcccttctacaactttgtcgccatcgcctacggcgcagtgatctgcctgggcttcatttccgtgccggtctcggttcttctgggtatcatcaaataaccatcaactcctctcaaagtcatgattaattttcccgtaagcgactggatgccggatgccaagattccttccggcccgattcaggacaaatggtccaagtacaagcttgagtccaaactgatcaacccgaacaacaagcgcaagtacaccgtgctcgtggtagggtccggcctggccggcgcctccgccgccgccacgcttgccgagcttggctacaacgtcaagtgcttctgctaccaggacagcccccgccgcgcccactccattgcggcccagggcggcatcaacgcggccaagaactaccagaacgacggcgactccgtctaccgcctgttctatgacaccgtgaagggcggcgacttccgcgcccgtgaagccaacgtctaccgcctggcggaagtttcctccaacatcattgaccagtgcgtggcccagggcgttcccttcggccgtgaatacggcggcctgctggacaaccgctccttcggcggcgcccagctcaagcgcaccttctacgcacgcggccagacgggccagcagctcctgctgggcgcctaccaggccctggaaaaggaagtggccaagggacacattgaaatgttctcccgccatgaaatgatggatctggtgctggtggacggagaagccaggggcattgtcacccgcaacctgatcaccggtgaaatccagtcctacgcaggggacaccgtcctgctctgcacgggcggctacggcaacgtcttcttcctgtccaccaacgcgatgggctgcaacgtcaccgccgcctacaaggcctacaagcgcggcgccttcttcgccaacccctgcttcacgcagattcaccccacctgcattccggtcaaaggcgactaccagtccaagctgacgctgatgtcggaatccctccgcaacagcggccgcatctgggtgcccaagtcccgtgaaaccgcggaaaaaatccgcaagaaggaaatcaagccttccgacgttcccgaagaagaacgcgattactacctggaacgcaagtacccctccttcggcaacctggctccgcgcgacatctcctcccgcgccgccaaggaagcctgcgacgacggccgcggcgtagccatcaccggcaagggcgtcttcctggactttgcggatgaaatcaagcgcatgggccgcgaatggattgacggccagtacggcaacctgttcgacatgtacgaggaaatcacggacgacgatccccatgaaacgcccatgatgatctatcccgcctcccactacacgatgggcggcctgtgggtggactacaacctcatgtccagcgtgaagggcctgcacgtcctcggtgaagccaacttctccgaccacggcgccaaccgcctgggcgcttccgccctgatgcagggcctgtccgacggctacttcgtcattcccgccacgctgcccgcctacctcacgaccatcaagcccggctccgtcaccaccgcctccccggaattcaaggccgcggaagacgaagtgaaggaacgcatcaacaagctcctgaacgtgaagggcaccaagacggtggactccttccaccgggaactgggcctcatcatgtgggaagactgcggcatggcccgtacggaagaaagcctcatgaacgccatcgaacgcattccccagctccgcaaggaattctgggaaaacgtgcgtgtgaccggaacggcggacggcatcaatgcggaactggaaaaagcctgccgcgtggcggacttcctggaattcgcccagctgctctgctatgacgccctgaaccgccaggaatcctgcggcgcccacttccgcgtggaataccagctgccggacggcgaagccaagcgcaacgacgaagaatacgcctacgtggccgcctgggaatacaccggcgtggacagcctgcccattcttcacaaggaaccgctgaccttcgagaacgtgcaccttgccatccgcagctacaagtaaagatagccaatacattaacacttaaaagaaagattataacatggctaaaacactcaatctcactctcaaggtctggcgccaggaaaaccgggaagccaagggccgcattgagacctatgccgccaaggacattccggtggacgcctccttcctggaaatgctggacatcgtcaatgaaggcctggtcaaggaaggcaaggatccgatccactttgaccacgactgccgggaaggcatctgcggcatgtgctccctgaccatcaacggcatcccacacggcccggaacgccaggtgaccacctgccagctccacatgcgcaagttcaaggacggcgataccatctggatcgaacccttccgcgcgaaagccttcccgatcctgcgggacctgatggtggaccgctccgccctggaccgcatcatcgcctccggcggctacatcgacgtgcgcaccggctccgcgccgaacgccaacaacatcgccgtggaaaaagtgaaggcggaagccgcctttgacgctgccgcctgcatcggctgcggcgcctgcgtggcctcctgcaaaaatgcctctgccatgctgttcacgtccgccaagatcgcccacctcaatctgctgccgcagggccagccggaacgcaccaagcgcgtcctggccatgatgaagcagatggaagcggaaggcttcggcaactgcacgaaccagtatgaatgtgaggccgcctgcccgaagggcatcagcgtggacaacattgcccgcctcaaccgcgacttcatcgtggccaacaccaaggaaggcctcgcctactaaggcgggcccccttttcaaaacgttaatcagaactcccggcggcgctcgtgcccgccgggagttttttattgctccgggaaacgccgcaaacctgcgcaacagacagaaaccggggcaagtgaagcattcccgctttccgcaagacggcgctgcaaccaaccataaatggacggaagaataggcccttaaatggctgaaaagatcaggaaggggaaagaaaagggtgaagtgtccccaatgggacaaatgcccctttcaattattcaagacggcccctttcaggcatttatttcttcaattgccccgtggccattccattctggagcggaagcctgtattttcaagcttcctcaaccaatttcaacccttttcaagtattcatggctggtcacagcgcgccttatacgcgccaaacgcaaaagcggtacggcttccctttattggccctgtcacttccggatggaggcagtccccattccgcaaggcctctccactctccactctccactctccactctccactctccactctccactctccactctccactctccactctccactctccactctccactctccactctccactctccactctccactctccactctcacccctcccgtcactccctgttacgggaatccatgaaaatggtcaccggaccgtcgttgaccagggaaacctgcatatccgcgccaaattcgccgctttccaccctgccttccagcaaggacgccagttccctcttgaacagttcatacaggggaacggcctgctccggccttgcagcgcggatgaaggagggcctgttgcccttcctggtggaggcgtgcagcgtaaactggctcaccaccagaacactcccccccatttccttcacggaaagattcatcttcccctccgcatcggaaaaaatacgcatgtccgccgcctttttggcaagccagcgcacatcctcttccgtatccgcctcttcaatgcccgccagaatcatcagtcccggacccgtgcttcccgcacagacgccgccgatgtgcacggcagcctccgtgacgcgttgaatgaccagcctcactgcgccgctcccttctccctcagaatggtcaccttcgtgcccgcacggatcagcatggccagctcattgcagtcctgccggctcaaataaaagcccggtgaacggggagctccgcgggaaacgtcaatgacatagccccccgccgccagcaccagcgttttgtccgcagagggaaactgcttgctgtaaatggaaacaggggcctgctcgtccttgacggacgtctccaaattcttttttcctccgtccttcatggagagaatgggatagcccttcacaaaattcgtcccgtcgtacaggcagacttccttctccggcacgttcaccactacatgaaaatccaggggacggtacttgagcacatcccccgcatgcagaacgggaatgtccatcaggccgttgaggtgcatcaccatggcctgggagcagtccagcttcctgaccatgcgtatccaggaatcccctctccgtacggtgtatttcttcacatccggcccgttggggtccagcaattgccggatgcgcaggctgccgatgagatccttcgcttcccttcccaccacgccgccctgctccaccaggggctgcaacagctccagagcctgcggcaggctcccccggtccatcaggcgccgggcttccgccagggcttccggacggcgcggccagagggaatagttttccccatccgcaaaaactccctgggcgcagcaggccgccgccagaaggctaaagaagacccttgcgcttgaagtcaaagatattgatctcatgggatttttgtatcatttccacggtgaatttcaagagggagacctcccatgcgtcatccaccccttcaatgagggccatgaacgtatcctctccgttgcgcacctggtccagcagacggccgcgcacggcatcaaggggttcatgcagaatttcctcattcacttccgacctcttgaacctgaagccgtattccagcagcgtcaaaaagcccggtccgttcttggaaagccagtcaaagaagcgcttggcctctccggaaaagccctccgtactgacttcattgtaaacggaagggcgtatgatcttcggcttttccgcttccacccagccgctgcgcacgcgcaccacgcccgcttcatccatcagctcgctgaggagaaggaaattgaacctggtatcgccaaaggtatcaatgcgacggtccggttcataaaccacccgggtcatttccgccgcatagcggatatcgtcacgggagaaggagggcagatcactcatggaagaagaagccgggagctttccatgaaaaagcggcttccttgccttggacagggaagccgcttttgtaataaaggatttttagcagttcaacttaaccctgaaccttttcgatgtaagcaacgacatcggcaacggactgaagcttttcagcttcttcgtcgggtacttcgatgtcaaagttttcttcgaaagccatcacgagttcaacggtatccagcgaatcagcaccgagatcctcgatgaatttcgcatcagcagtcactttatcggattcaacgccaagttgctcaacgatgatacttcttactttttcttcgatgctgttgtcagacatgatatttattgttaaggttcatggatactacatggggtatacgcaatttgcaacacctatttatgagtttttacgtgtcatccggccccctcgccggaagtaacaagctcccggccaggccgttgcccgttcttcaaagattaagcacggcagctatccgcaaaccgttcagcgtaatatccgggtccacatggtcgatgcgctccacgcccctggcgatcagcgcggcgtccccgcccgtagccaccacggccgggcgcgtgcccagctcctcctccagccgggccaggatttccttcaccagcccccggtagccgtacacggcgccggactgcatggcctccaccgtgctggttccaatggcatgggcgggctcctgcgggtcgatggcgggaagaagggcggtattgcgctccaggtaatcccccatgctggcaagccctggagcaatgacgccgcccagataggtgcattgggggccgatcacgtcaaaggtcaccgcagtgccgaagtccaccacgacgcacgggcagccgtaataggccgcggcgcccacggcgttcgccagcctgtcggctcctatctggcgcgggtgggggtagtcgatgcccacgcccagccgggaatcgcaggaaaggaaatggcacggcttgcctatccagtttttcagcacctcccccacgcgcggcactacggagcacaccacggcggcatcgtaatggacgccggccagcacttcatccagccgttcctcgctcacctcccgggtgggaatcatgtaccgttccggcagcagggcgtccggcgtggaaagcacgaacttggtgcgcgtattggaattgtcgatcagcagataagtcacggaaatcagttagtacgttcctccgccagtttcaagaccaaatccgctatcttgccgcttcccccggtcatctccgccttcaccaaattttcatgcatgcgcctccacggcgcaccgccttcctcaaccatctcccgcaaggcggcagccagggcacgggcgtccggcacatggcggccgccgcccagtttttccagcaggcgggcgttgccctcctcctggcccggaagaagaaagtttaccagcatgggccgtgcagacgccagcacctcgtgcacggtggcccctcccgctttcccaaccaccacatggctggcggcgagataggagggcacgcggcgcgtccagccgcgcacggccagcctatgcccgtatctggcgcgcaaatcccggatatgggggtaaatgcgcctgaaccggcggcccaggatgcaagtgacgcgtatggaggggtccgcctccagcatggcctccagctccgcgcgcgcatgccgtgcggaacgctgggcaaaataaagcacccggaacggctcgcccgccttccaggaaacggggcgctcccgcgccagcgcccccaggccgggattgacggggaatcccgtgacgcgcaccctgtccggaggaagccccttctccaccatgatttcccgcgtccaggggtccgtcacggcccacaggggggactccgaacacagccaggacttgttgatgacgaaggaatccgtcacaacggtcaagtacggcaccgcgttccccgtgcgggccgccagggaatccagcatgtagggatacaccatgtacgtgcagaccacggcgtccggcttccaatcccgcagcagccgttccagaaaacgctccacgggagcgagccccttgacgggtttttccgccaggttgcgcttgtcgctcacctcgtacatcagcttccagaggcggggcaggcgggaaataatccacaggtaggcggcgcgcgtcaggcggaacatccggggcatcgcctccgcgcacaggtccgtcacgcggacttccgcgcgccctgcgagggcatcccgcacacccctggcggcggaattgtgcccttccccgtatcccgcagtcacgatcagaattcgcggcagccttctcttctccatgggacaggatataccagtattccagtcaatcggaaagaacttcttgcaggaagacgggcacgcccgcagagcttcttccggcagatccggcgcagcgcctgccttgacggcaggggccggaagagccttgttcccggcgggacagccagcgggaaacacggaaaaacaccttcccgcggactgcgtgaaaacgccctgccgggaatgaaggcctcccggccttcatcattggatccaatccggaatgaatcgaaggggttttgtctgcaagggccgaaaggcccctgcagcccgcggacggaaaaggaccgcaaaacagcatttgcacaccattattcccctcccgaatccggatttaacattgacctgcgcaggccgtcagggcaagctttcagccatgcgcatcgtcttcatgggcacaggcgacattgccattcccgccttccgcagcctggtccgtaactcggacctggtaggcctggtcacgcagcctgaccgccccgtcggcaggcaccaggtgcttacggctcccgctatcaagaacattgccagagaagcgggcattcccgtgctccagccgcactccctgcggactccggacgcgctgatcaaccttaaaaggctgaatccggacctgatcgcggtcatggcgtacgggcagatcctgagccaggaagtgattgacatggcgcccatgggctgcatcaacgcccatgcctccctgctgccgcgccaccgcggagcggcctgcatccagtccgccatcaagtccggcgattccgagacgggaatcaccatcatgcacatcgtcaaaaagctggacgccggggacatcatcgcccagatcagcaccccgctggaaggcacggaaaccggcggctccctgcacgacaagctggcccagatgacgccggacgtattgctcccagccatccacgccattgaaaagggaaccgccacacgcgtcccccagaaggaattcctggcgacgtacgctcccaagctcctgcgtgcggacggaaagattgactggacgcgccccgcagaggaaatcggacgcatgatccgggcgtatgacccgtggcccggcaccttcaccaattactggaaccgcaagaagcgtatccgcaacatgaaaatcttccccggcttctccatcgttccggaggcggaagggaaaccgggccaggtgctttccgccggagaacaggggctgctgatcgcctgcggaagcggcggcctgctggtgacgaacgtccagcttgaaggaagtacgcgcatgaacatctcccagctcatcgccggccacccgaatttgaaagacatccattttgacgtgtaaatggccaagtccttttccatggagagcctgaacgcggcccagaggaaggccgtacagaccctgcaggggcccgtgctgatcctggccggggccggaacgggcaagacgcgcaccgtcacctgccgcatcgcccacatggtggaccgcggcatcagccctaaaagcatcctggccgtgacgttcacgaacaaggccgccctggaaatgagggagcgcgtaggccagatggtggaacggaaggcggcgcgccagatcatggtgagcaccttccattccctctgcgtgcgcatcctgcgggaggacataggccggctggggtacaagaccaatttcaccatttacagcggttccgagcagagcggactgatccggcgcctgatcgtacgccacggcggcatcacggaaaaaatcacccccaaggacgtgctgtccgccatgagccggatgaagaatagcggcctgggcctggattccattgaagacaacctgacggccaacatcgccgcctcctaccagcgggagcttcaggcgcagaattccgtggattttgacgacctgctgattctggcggacaagctgctgaaggagcaccgggacgtcagggaggcgtggcagcagcgcttccgctatatcaccgtggatgagttccaggataccaacagcctccagatgagcctgctgggacatttggtgggtcccgcgcacaacgtctgcgtggtgggcgacgacgaccagtccatctacggctggcgcggcgcccagatcagcaacatcctggagttcgaacgctttttcccaaaccccgccgtcatcaagctggaggagaattaccgctgcaccgcccccatcctggacgcggccaacgccctgatccgccacaacctgggccggagggacaagacgctgcgcgcccacaagggcggcggagaagcagtgaggctgatttccatgcccggagacgcggaggaagcggagttcatcatcacggacattgaaaacgtccgcaggcaggaggagcgcccctgggaggatttcgccatcctgttccgggccaacacccagagccgcattattgaacaaacgctccgggagcacaagattccctaccgcatggtgggggcgcagagcttctttgaccgcaaggaggtgaaggacctcatttcctacctggcgaccatcgaaaacccgcaggctgacgaatacctgctgcgcatcctcaatacgcccccgcgcggcatcagcgagctgaccagccacctggccatcgactggagccgggaacacggcaacagcgtatgggccgccctgcaggacgacgaattcctggccacactctccacccgcgcccgcaacagcgtgctggagttcaacgacctgattgccagatacatcgaccttttccaggataaggagaccgattttggagacgccctggaacagctcattgaagaaaccggattcagcgagtacgtcacgcgcctgtgcaagacggaggcagaaatccagaagcggctggtatccatcggggacgtgaaagcctccctccgcaacttctggcagcccggaaaaaccctccgggactatctggcccaggtcactctggacaaggaggacaatgacgacgacgtggagaacaagcccggcgtgtgcctgattaccatgcacgccgccaaggggctggaattcccggtggtgtacctcgtggggctggaagaaggcatcctgccccacaagcgttccctggaagacggcaactgtgacgaagaacgccgcctgctttacgtgggcatcacgcgcgcccaggaaaagctcatgctgacctattgcgccacgcgcctgcgctacggggaccgcatgccctgccagcgttcctccttcctgagtgaaattcctccccacctgatggattattccaaatgggaggatctcatgaatgcggaagcgacggaagaggagtccggaaactttttcgactccctccgcagcatgcttctggaagatgaataaaaggcagccgggtgtttcaccggctgcctttaaaccatgagttattttttaccgggacaggtttaacgggaacggcggcggcgcatcagcagggctgccagtccaaaaaggctgagggaagccgtggccggttccggaacagccaggctcggcattccgtccctgactgccagggcggacattccgtagtcgccggccagggaaagcaggctgtcggagaagtccatcgtgaccgaagagctgggattgaaagaagaattggtttcaaactgccaggtcagcatgaacgtaccgctggaaagcagggtagccaggctgccgccgctgatgtgaagcagatccactacctgcccgttggagccggccagatagatattcttgacgttgataccagtaccggtcaggttcacggggctgttcgttccccacgtggccacatttgccaagccgcttatggtgaacacggaagacatcgtataggaactattggcctgaaatccggtgacgctaacgtcaccgggggcgacgaggcctcccaccccaagaaccagggtctcattccacccgcgggtggtcttggcggcatccaggtcatagccgtaagcctgcttccacatgttcaggccgccggtcccgatcgtgtgcgtaccgtacatgttgctgttggtagcctgcactcctccgagcagaccgccggagatgttatacgtaacctgaatcgcggacgccgtaccgtccgtagctttcatggaattgccggtcgtgcggttgccacttgtcattgtaccgcttgccaaattccacggagcggaataggtgttcgaactttcgccgaacgaaaccattgtcgttttcccccatcccggtgcggagcacaggagagcaaggagcgacattatacataaacgcattttcatatcatcaacagagatggagtttttccgtttgcttatatcctgttgacgtctttcctttgattgacgatcaacaagggatttgactcgaacccgcctcccaggttcacacgatagatgaaaaaaaagtcccattttttcaatttcatacgcaattcgtttagatacaacaagaaagcatttgtcatccgttttgacatccttttccgctccaagggcttcagggcaggttcatcctcctttccgggcacaaaaaatccccccggcctggaccggagggattgaaaaacacaggcttaacgcccctgcccgttaccagaagatgatgtacagggcaaccgtcgcggcaatcacgaaccagccgaatatcttggcgcgtgaagaggactggagggccaccacgcctctatcgggcagcacgatggactgtccgccgcgggcggcgttcactgccgtgaagatgaagccgatgatcaccaccgtaataaagcacacggccatgcggttcaggaaggccatttccggctgccatatcttcaaggctccgtacaggagggcattgatgacaatacccagccagccgaagatgcgcgggcacttgggcacgaagaagccgaagaggaacacgcacagggcgccaggactcaggaagccctggaattcctggatgaagttgaagattcctccgaaagccgggctgtccaggaacggcgcaatgcacagcgcaatcacggcgcacaccagcaggccgatcttgccaacagtaacaagctccgtgggcttcgcgttcctgcgcagcttgttgtaaatgtccatcgtaaagatggtggaggcggagttcagcatggacgccagggaagacaccaccgcgccgaagagtgcggcaagcacaaaccacgtccagcccgtgccgggcagcagcttcctgatcagcgtgccgaaggcggagtcatagtcaaagcccactagggtatccgtcagataatagttgtccgagttgtctacggccggcttgatgatcttgctgttaagcgaggcgatcttttccacgaacggagcgcgttccgccagagtagtctggtcattggcggcatccgccttcagatcggcgcaggcctgtttcaattcggccatgacctcgccgccaaccttcatcacttccgcattatgcagggcgtgggcgcagccttcttccacgttttccaccaggaagctgtccgtaagcttgtagatgacgggacggcccttgacggcctcgggattttccgccttgcggatttccgccgcatacttcacttctgcctgttccttcaggtcattgcggtacaggttgtaggccagaatgccgggaaccaccaccacaaacggaatgatgagcttgaggaacgcggcgaacacgatgcccatctggccttccgccagggacttggaagccagcgtacgctgcatgatgtactggttcaggccccagtagaagaagttgggaatccagagacccaggcaaagggccgtccacgggatttccgcatcgtcagcagggcggatcatgtggagcttgccgcccacggtattcacgccgctggccgcatcgccggagttgagttcaaagaagcgcgtcaccccgtgccagaggctgtccgagggatttcccagggaagcgaccgttgcgccggaattggcggcggcagactgcaccagatggttcgggtccgcaccgctcagcgccatcagggcaaaatatgccaccacgccgccgcctacaatcagggcggcgccccagaacaggtccgtccaggcgcaggctttcaaaccgcccacgaacacgtataccgtagcacagaaggcaatgatgatgcagcccacggtgatgttgccgaagtcaatgcccatggcagtgtaccccgtaaagaacacggagataaccttggcgccggcgtaaatcacgcccgcagtcggcacgcccaccagaatcagcagcgtagcaatggccatgagggaacgcgccagcgtattatagcggtattccaggaattcgggaatggtgtatacaccgcccttcagcagcttgggaaggaagcagaaggccacgactaccagcgtgatggcggccagccattcatacccggcgatcgccatgccaacccagttggcggccttgccggacatccccacaaactgttccgtggaaatgttggcggcgatcagggagaagcctaccagccaccaggtcaggccgcggccggccaggaagtagtctgaagcgcctttggtcttcttttcttcctccgtttcctcaggatcacggcttttccagatgcccagggcgattacgcccaccacaaccacacagaacaggatgacttccgttatggaaaggggggctgtcttgggttcagcggaggcttccggagctgtctgggaggcgacggcggcgggggccgccggctgaagttccgcagccggctgtgcttccgcagcgggggtcacggccggagcggccagggcgggctgcgcatcagccgccggtgcgggcacggagccctcctgggcggaaacgccccacgtcatcagggccagagccccgaatatggttgctagtgttctcataatcagtatggattaagcttggtacaggacacgggcgccttctccggcacaggtcacaaggtaagtggtttcaatgcccgtttcctgacagtagccgtccagaagctcgcgggccaccttgtccacgtcttccgtcttcaccagggccacgatgcacccgccgaagccgccgcccgtcatgcgcgcgccgtaaatggaggatgcggaaggaatgcggtcgcagagggaaaccagggtatccacttccgcgcaggaaacttcataatcgtcacgcagggaggcgtggctgccgcgcatggctacgccggcttcatcccagtcgccgcgggcaagggcgttcgcaaaggcgtttacgcgggcgttttcaccaatgacgtggcgggcgcggcggtagcgcacgtcgccaagctgttccttgaaggattccagcagctccagcgtggcttcccgcagggagggcacgcccatgatggcggaggcttcctcgcactgcttgcggcgctggccgtaggctccgtccgccagggagtgcttcacggcgctgtccagcaccagcacggagacggactcgttgttcatcggcaccagttcatattccagcgtggcgcagtccagcttgagggccatgcccttctttccgttggcggaaataaactggtccatgatgccgcagggaacgttcacgaattcatgttccacggcctggccgatcaaggccacttccttgggatcaatttcaaccccggcgaaggcggcaagcgccgtgcagacggaaacttcaagagcggcgctggaggaaaggccgccgccgcggggcacgttgctgtcaatcagcatgtccaccggcccgatttctatgccgcgcctgtgcaggttggccaggacgccgcggacgtagttggaccagaacggatcgccgggaaccagggcgtcctccaccgcaatttcatggatctggtcgcccagggagccgcagaagcggtgcttgcccacgggggagggagccacagccacaacacagtggttatcaagcgccatgggcatcacaaagccattattataatccgtgtgctcaccgatgaggttcacacgccccggcgccgcagccacgtgagtcggctcctgaccgaaatactcgatgaaatacggagtcaccgtttctttagagatttctcgctgaactaaatccatagtgggctgattctgccccatccctttccgcacctcaaggttaaagtctccgccccgcaacaattttcttcattttcaaccaaatattccaagcacccgttgccagccgcccgcattcctttcaaaaacgggcctgcaccgaccggccacgaggcgccagccccctccaaatcccgttgcaaacgacggcctccggcctgcatttcagggatgcggggaaaggcggagcgtcacttcgccccgcgggcgaacagcaccgccgggacagttttcaagagcagtttgacatccagccacagggaccagttgtcaatgtactccatgtccagctccaccagtttttcaaattcccggatgttgctgcgcccggctatctgccagtaccccgtcaccccgggcaaaacgctcagcctgcggcggtgggcgtcactggtaaaggcctccgtctcataaacggggagcggccgcggccccaccaggctcatttcccctttcagcacgttgatgagctggggaagttcgtctatgctgaatttgcgcaggaagcggccgaaggggaagatgcgagggtcatgctccagcttgaagatggggccgttcatgtcgttgccgtaactggccttcacttcatccagcctcttgtccgcatcccggtacatagtgcggaatttccacatgccgaattcccggccatacaggccggaacgcttctggcggtagaagacgggaccgcggtcagacagcttgatgcctacggccgccagcacccacagggggaacgtgcccaccagaagcaggagcgcgcccacccagtccagtatctttttcaactgccaggaggtggtgtagggaatgggggtggacttgtacaccagcattctggttcctcccagcacgccaaaataggttttatgcacgtcgggcatgctcactaccatgctcgcgtaaaaatccactcccatcttgccgcacagctccaccaggcaccgcgccacggcggagtccacctcctccggaagaaacaccaccttgctgatgcagcccttgatcagcaaattcctgacttccgcgcggtccacctcttccggagccatcaccagcagttcatccttgaagtccacatggtcgctttccagcatcttgcggaactccttcacatggtccggaatgcccaccaccagcgtgggggcctcctccaccagcctcttttccgcccggaaccggctgatgcgcagccagagggcgcccaggaacgtgagcagataggccagggtctggacaataatgttcgcggaaaagggaacaaagtacttccacgtcactacgctcaacaccacaaaacaggcgtacgccatgacaaaccgccggatgcttccgcccagcgtcatgcaccggtagtaaacgcccagctggtcacagcagacatacagcagcagggacatcgtcagcggcgtcagcaccagcgtgcgcagccgccacggttccggagccacccccatccattgccacgaaacgaacccgacaacgaagaagatgacgaatgcgaggatggaaacgacaattttattgatcccgtaggtagtacggtctgcattttgaatcagcatcgagagagagtgtaagttagtcggcacttaaagtgcgctgtcccggtctttttgtcaagttgcatgctcaccctgccgctttccgcccggaataatgcgcccttccggacggtcttcctgtctccggacgggcggaaagcccaaaatgacggtataccggcttgcaagaatccggctccctgtgcattggtatacgcgtcaatcgaccggactggtaccgcacctagcctgatcgcccccctatcagaccacgcatggaccgttgatcggggcacggggcatccttactcctggcttttctcatggtagcggaacgtcccggcgattttccggatggaacttactgcgtacagcgataaatccgacatgacaccaacataatcatcaacttagaatataagtatgtcacagcacaacacacagggaagacagggccagggagcccgtcgccgctataacaagggcggacgctcctatggcaatgaccgccgggattccagcggctaccgtcccaagtataaaaaagaagcacctgccaaactctccttgtggcagcgtttcctgggcctcttcggcatccgcccggccaagaacaacaaacccgccgccagggataaagccgccgccaaaaccaatacccgcgtggcccgcaacaggcaggagcgcgtttccgctcccaagcagcccgtctccaaccgcaggctttacgtgggcaacctttcctatgaagcgacggaaagcgaccttgaagacgtattcaagggcatcggggaagtcagctccgtggaaatcatttacaacccccgcacccacaagtccaagggctatgcctttgtggaaatgaagaagatggaagatgccgtccgttccgtggacatcctccacaaccagcccttcatgggcaggaacctgctggtcagcggcgccaatgaacgccaggaacagtcccggcagccccgcgaaacccgcgagccccaggaagaacaggtttccatggaggaagtgaaggaaacctccactcccctgctccagccggaagcttccgctccccaggcccaggaacaataaccgttttatcatgcagaagccggcctttggaaaaaggccggcttcttgcgtttacaggacgacgcgttttatccctctttcacaaaatcctctttcgccctccgccttctctttccggaaaaccttcggcctcgccccggtcaaaaacgtgcaaaaccatgcagcccacacgcttgcgcctatgccgccacggactggaaaaacttgaagccccgtgtcccccttcccggcgacggaatgagaaaaggaccatgaccgtcacggcaatccccaggctccgcgcaggcgcaggtattccttggcgggcaacaggatgtaaaggggatgccgggaggggtccagccatgcgatcatggctctcaaattttcctcgctcatggcggtgcaccccgccgtaggagctcccccatccctgcgccagatatggaagaagatggaggaaccggcccccggcacgggtttttcccgtccggatgcggcattatgccggatgaacagtttcaggctgtgggcgtaatcgttcagcttcatctgctgcttgaactcccacggcgtgacggggtcatgcttcagcacgaagtgctggttgtacagtggagaagcgggatcatccacccacatgtcccgcggcgtgatgcggcggtacggcatggaacgcttcttctgcggaacgggaacggtgccatacacgccccccagctcaaagatgccggcgggagagcgcaagtccccctccttcttcaccggaccgccggagggaggcatgctgacgcccctgccccacaccagaccggactttcccagacgcgccggaaacggacctttcaccatcacccagccgcgcggccccttctccagaaggctcaattgcacatgggagctgttccagccgtccgcggaacccacaatcacctggctgcaatccgcgggaagagccgcggccgaaaaacagaacgccgccagcatgcacaaacacaggtatactgccttcatggtccgtagcataacggcgccgctccggaaaaaaagcaaatactccgtctccgcagccgcaccgctgaacagaaaacttccctagttcagcggaagaacctcgttcaacagggattcgatgccttccttggcaaagcgggaatacaggtacagctttttggcctccatgtacttgcccagggcggaacccacttctcccgcgttcctgcacttttccgcatcattcagcaggttcaccagggtactcgccttcgtcgtcaggtccagatactgggcgttcaattcctggtcattgatgaacagctcctggtccttggaacggagctgctggagttcctcccaggcgccgtacacgtcctgcatggcttcgcgctggcgcgccgcgcccagagcccgttcaataacggccatcttgccaaggtcctccacaaactgcttctggagttccggatcatccttcaccagaacggcgaattcatgctggttgtcaaaaatgcggcggtaattcttattcttgtggaagcgcttgaagtcctccagcgcgtgggactgctgaccggcggccatcatggcgttccgcagcggaagaaggcgggggttcttgggccagatttcaatggcgctcttcaggcattcctccagcttggcccggtcacctctggcgagggcttcctggccctgggcaatataggcgtcactggcgaacacggcggcgctgatggcggattccgcacggcccgtgctgaaatcccgggaggtcttcttgaggttttccaccagggtgagggcttcctcgtaatccttgccgttcatcagctcaaacagcttttccacgtcccgcttgaaggcgtacagcttctgcttcttttcatacgggaacgtgttcacggcgggcatgaactccccgatcagcagcgcctcattcaaccgttccagggcatccacgtaatgatgggaatcaaccaggttgttcacggccttcatgtggcggtcggaatcacgggccagctcccgggaaaggttgtccagaatggcgacggtgggcggggtgccgagcgtgccgctgaacatcttggcggcgtccgaattcttgtccagccgcagcttggtatccccgtcattgaacaggcggctgtaaatgccgcagcctatggaaacatggtcaaagcgccgctgagcgaataactgaaccagcgtggactggaaaacgatcttcgcttccgtcaccgtcagcacctgttcactctccagcttcagcttgcgggcctccatttccaccatgcgcttttccaggtacttgtagcgtgggttgttcttggccggattattggcagaagtgccctttttcccgcccttctggttggagggagagccggagctggtggtcacgccgctctccatgaggctcattttctgggcattgctgcgtatttccctctccatcgcttcaagcatcttccccttgttctttccattgctcttggcctgccatgcggtgtagatagcctggcagagggcatcggaaacgccaccgtccagcggattgctggaagcggcggtcagcaggtccaccacctgccgcaccacgttgtccgccatcagcttttccttgcgcatggaaagcgtctcatgaagcttttcaaaaattttctggtattccttcgcatcctccgtgctttcctccggctggctcaggtacttattgaagcgcgcctcaatttcccggaaactgcccatgttcagcgttgttccgttgatggtcacggtgccgtcctggggattcaggaaaggaatttcattgccgtacagggacttggcatctccctgccgggaaggctggtaggcattcggctgcgcggcaggcggggaggaagggggcgcggcaggcgcaccgccgccggaagcggggggattgtacatcatctgccccaatgcgggaaccgcgcaggccagggtcaggagaaagcagcttttcatggggcggggaaggttgttcatttaggctgaatggatgtggctacgcatacgccgcgcaccttcggattgacgtcttccacccggaactctattctgtattgctggtcccggttgatgttcagtccgttcctggcttccgcagaaacacagacgggaataatgtactcacgaccggaagcgtccctgtacaaaaaggaaatcagctcggactcgccgcgcggaaaacggtcgatcaccgttccgtccagcgcatagttgttattggaaagctgggaggcgttcgccgccaggatatccagcggaatatccgaccccgcctgcggcttttccctggcacggaacacgacaaaccccacgatgacggccagcacaagaacagccgcgccggccatcagcatcggcgtggatgatgaggaactcttcttttttgctgcacgtcgtctcgccataacttttgatggaaaaagtatataacgaactccgtgcaagtgcacgcattaaattacagctcccagcgcgagcggcggattcccgcgtaggaagccgcgatgccgcaggcaacatgcacgcccagaacaatgtaacaggtcagcgcgggcgtcaggtccgtatccagcacattcttgacggcgttgtacacgtcagacttcagggcggagatgctgccggaccacgcccagtatgcggaaatgaagggccgtatgaagccctccacctgttccggaagggccagcaccgctccggaaaggggaagctggaagcccaccaggtaaatgctcaggagggaggcctggtccgcactccgggccagggaggaaatgcccaggcatacaaaggtcatggcggcatccgccagaatcaggaacagcaggtgcgtcaggcccccgccgcggtcccagaagaagtccacaaaggcgaacatccagacggactgcaccagcaccagaacgctcaagtaggccagcttgctccccaggtacgcggagggcctcattcccgcgtatttctccttttccatgatggcccgttctccggccacctcccgggcggcgttgttggaacccatcaggcccagcagaatcacctcgaacatgatgatgccggagacggcggaacccgtcttcatgttcaactgctgggcttccatgtccttctggatggtctggacgtcctgcgtggcggaaaggcccacgatctgcccggtccccttgtccgtgaacatggctaccagcaccgggaacagcagcaccatcaccagttgaagaaccaactgggaacggtctcggaaaaagatgcgccagcgccgtcccagcaggcagaagaactgcgtgaagaatcccggaacttccggaatggcttccgccgcggcctccgggtaattcccgttcccttccgcaggcgcagtttccccggaatcgctccgcacggcgtcccccttttccgttccgggttcctcgggagccttctccgcctccacgttgctgcggacggcatcagggtccggcaattctccggaaagaatcttcttctccctttcctgttccaggcgggaataataggaatcccggtgcttgccccacgaacggcaccaggaggggccttcacggtcctgaagcttcggataaatctcttccagcgaggaaacgccgaagtaatgcagcatcgtcttcggagaaccgtgataggccacgcagccctggtgcatgaccaggatggaatcatacatgtccaggtgggaaaggctgtgcgtgacggaaatgacgatgcggccttccgaacgggagatttcatgcaggaggtccacaatatcgtgctcggaccgcgggtccaggccggacgtcacctcatcgcaaatcagcaggcgcgggttggacaccagctccatggccagcgccaggcggcgcttctggccgccggaaagaatcttcacatcccggtccgcaatcccctccatccccgttacctccagggcattgtcaatgctgtcgtccaaatcgtccacggaatcgaaccggcagcggagcctggcggcgctctccacgttctcatccacgctcaactggtcataggcaatgctgaactggggaacaaacccgatttccgacggctcgaagtcctcttcagccaaatcatggccgttccagaaaaaacgtccgtccgtttccgcaatcatgcccgcaatcgcctttaacaaggtggtctttccacaaccggaagggccaacaacagccataaaatgcccgcgaggcacattaaaactaacattgtccaataatttcaaaggaccatccggtgtttctatttcatatgtaatgccgtccgcctgcaacatggttcttttactctagcgtatcaacttccgcatcatcaaggaaaatcgggcatcagtgttttatcttgccgtaaacgaagaatatgttattcaaaaactttccctttaaggcatttccccaattaaaatcaaatggttttcccccgcattcttgctttagccgccttgctggcccccctggcgaacgccgcccggcctccatccgcggaccaaccccgttttaccgccgtcctggatgattggcgcatttcctatatggacgaacccggccatgtccatctcggaatctccatcatgctgcaaggcaaaggaaccttcgtcattccttcttccggggaagggcagctcacgcgcctggtcatgcaggattccaccggaaaagaaataccctgcaatccctatcagccatggggaacgcccggcaagctcaatccttcccatgtcaccgggtcccactcatcatcctctcccggttcaccctacaaaaccctgcaattctcctgcggattcagggagcttccggcccctcaatcggaatggctgcgcatccgcgggacctggaccgtccagttctgcccggaaccgcagcggctgatgctgaagcaaacggtcaaaccggcggaacaactccagactttttatctggaccttccggaaccgaacgtccgggaggacagcgacatcgcccgggccgattccgccagcaacactgcttccattcagctgaaaaccaacgaagagcggaccgccctctcctgcgaggcggaattcccctcttccgcttccattcaaggctttgccattctggattcctccggacgccccataccgggcctgcggcgcgcccatacgccggaaatcacagaacataaagatggtaaaaccagcatttcctgcctgtatgaaatggaagaaggagcgggaaaaccatccccttcccttccccgtgaattgaatctcggcgtcgtttaccttccccgcaaacattcactggatgttcccattgacctggccgtgaacccctccctctctccgccttccatcccccgggaagcggtgaacaaccatgaatccggcctctccgcacaaccgtcaccggctcttcaggtaaaattatacaattgggttttccataaagaaggccatgaacccgtcttcctcggcatttacattcatacggataaaaaccacgctctgcttaatgatatggaacagcagggcgccagttacatcaacctttccacccccggcggaaaaacagccgttcactgccgggttcatccccccacatggagcacttccacctacaatatgctctttttccctcttccccgttcactgcctcccggcgacaagggatggctgctgaccggggagctccgcgtgccggccggagaggtccggacaactccggcccggacgattcccgcagaaccgggcaaacaatgggcgatcgacgttccgggggcatccggagactatcctcccttccaggttcaggccaccctcctcagcatcaagccctcagcaaaggaattccgggccaccttcaagttgaagggtcaccatggaaatccgcatttcagcggcttccatgtggaagggggcatgcagatcatgtccaacaaggacccggaggatgaaaccgcgcagctcatcacctattcctttccgcactctcccgctactttaagctgctgtgtaaaatacatcggccgcccaaccgtcatacgccaccccctgaacatgcgcatcggactgggaggcatcgtcccggaccctccggaaaaatgacattccgctttttttcatggcttccgtcctgctacggaaccatgatggaggcatgatccggcaagcgtcccgggaagattttccggcaatcctgaagcttcaattactcgccttcggagaagtggcggagcggcttggactcgccagcatcccgcctctggaacaaaccctggaacatttgcgggaagaggcgcggaacagcgtcttcttcaagtatacggaaaacagccgcatcgtcggctccgtcaggggctgtctggacggcaaaaacgtctgccatgtcggcaagctggttgtggacccggcccgccggaacaggggaatcggccagcaactcatgcttgccctggaagaacacttccgcggacaggccgccgcctaccttctgttcacttcggcagatactcctgaaaccctgtatctgtacctcaaactgggctatacggaactgtaccggaaagaggccggagggatgaccacggtgtttctggaaaagaaagcgtgaggccgccggaagccctcatttcatcagcttccacaccgccagccgggtgatggagcctatcagcagaagagccgccgcaatcaggaagggagaccatcccagcgcccccgcagccagcagaaacgccacggcgcacaccaatagaaaagcattgatgaaccgcatcaggctccattcctccggatagaggggcgataggctgaagacatccgccagcctgttcatcaccaattcaagaatttcactttccatccattcccacatagacttaacttttttaccgcaatttgaccatcaatgatttacctgcacatgcaagtaaaagaatggtcggagtttttcatgatgaaagggtttttcaagggcccggaggcccttgttcccggcagcgcgggcatcaggcaacacaggggaatggggccgcccatggcgtggacaaaacaggcatcccggccttcacggaccctattcagaacgggaagtccgcatcgcccaccgggtccacggccttttcctcaaacttcttcacggctttctgctggggattcacggcgcggacgacgagcgcgcggggcggcatttcccggcgctttttgaactcgcacttttcctcgcacaggttgcaggtattcaggcgcgcgcgttcctcaggccgttccgtggtgacggggcaggcatgttcgcacgcgccgcagccgatgcacagggaggggtccagcctgggcaggcggtgttcctggccgtcccgcccgatgtagggcaccgtataaagggccttggtggggcaatgctccgtacaggcgccgcagtccatgtcctcccgggcaaccaggcagcggcagacgtaaaaccgggctacggcgatgcgcgtggtatccttcgtaatttccgcggtatccctctccgcagtaatgggcagcctgcgaatggctcctgtggggcagacttccgcgcagcggtggcagtcgtacagacaatacttggtggaaaaatccatccggggcttcatgaaccctttcagcccaagctgcaaataggcgggctggagcacatgggtagggcagttggcaatgcacatctggcagccggtgcaaacatccagaaaacgttccagggaaccggctccgggaggaagaacgcactgggtggggtccagcctctgggcggcgtcgccccggcatccggaaagagccgccgtagccaggccggccgccgtagcccccaggaactggcggcgggagctcccggcaatgaagggaaccgcggcagaagaagcgggagcgggcgccggagcggtttttttcttcctggcgggaatcaggcggcgggttttggcaaaccagcggtagcgtatccccccctcgctgcacgaacgcacgcagtcatagcatgctacgcagcgggaggagtctattttgtattccttgaggttcaggcactgggccttgcatgatttgacgcatttgccgcatttcttgcaggaggcgggatcaaagcccagccggaagagggaaacgcgggaaagcagccccagcagagtaccgacggggcataccgtattgcagtacaaccgccctttccaggcgctcatggcgaccaccaggccgagcatgccggcagaagccagcagagccgggagagccacgggaaaataattcatccggaccaggtccgcggaagaactgtcagccgccagcaggttattgctccagatggcggcaggccacgccagcacatacatgatgcgcccgaaaatgctgtacgggtccagccagttcagggaaagtccggccagtcccgtcacgcagcaggcggccagcaaaaccagaaccacataccgcacccacggcacggggcgcgcaaacttcaagaagcgcttcggcgcaatccagcggcggattctgaaaacgatgtcctggagaatccccagcggacagaggaaggagcagtacaccctcccgaacagcagcgtaagcagcagcagaaccgccagaatcacggcggaaacggccaccccgtccagagccccgagcacggatggaatgaattgccactgagccagggaaaaggagtcttccatgccctctccgccgcccgtcatgttcggcacgttccacgcggggatatggtgcaggaaagcgtacgcaatcccgaggaagaagatgacggccaccgtcacgcggagccacttcagcggactgacgaaaaaggctttgatgactgacatatttattttaaacccgccggaggcggaaagttggcccccttcgcgtcatccgcaggagggggcgccgcgtcaggccatgctgatgcggcggatattgagcttggaaaggtcggcggtgcccagccccatttcttccccaagctgcacgtggcggatctttccggccttgttcagcagggccgcgcctgcggcgtcaatggctacgatgtcacgggaagccagaagggttttgcgctccaccaggtcattcgtgtccttccccacggggccgttgcgcaccatgggcatgtaggcgtccagcacgcacaggtccggcttgcggaaatacacggcgtccgcgatgcactggtgcaggtcattcttatgcatggctccacggtcccagacggtgcccatcacgtttttcatgcaggcggtcatctcggaaccgctgtggtgcttgagcggggggcaggtgatataaacgtccgcttccagcacggccttgtgcaccttggcggaggtgaattttttggccttcgggttttccgtctgcacgtactgcccttcattgccgccgtccaccatcacgcccccggctttttccacggcctctttcacgccgctgccttcataggcgccgttgtggcagcagtggtcgaacaccctgacttccttcgcccccgcctgcttgcacagctccaccagcgtggcgacggtttcaggatgggtgttggagccgaattccggagccttgttccagccgatgttgggcttgatcacgacggtctggcccggcttgacgaatgccttcatgcctcccagcgtatccacggccttcctgaccatttccgcacgggttccgttgcggacggccaccaggtccggaatgccggaagctgccgaagctccggcctcctgggcgaacagggaatccatgtccgatatggctgccagcgcccctacggcggcagtcccttttagaaaagtgcgtctgtcagtcatcttcgttgcaaagtcagtggtttatccccgcatgcaaaggcatgtacaaggttttatgcctcttcctaacatacgccttgctgaaaaacaacctgtcatcattcctgcacgggaatttttacaaacgaattgtcatacaggggcggctcctataaaacccggtcatgaaatgttccctgctcagccgtcccatgacctgcacgcatgactggatcagccgcgtcgtcctgcccggggatacggtcgtggacgccacggcaggcaacggacacgacacggttttcctggcccgtctgaccggcccttccggccaggtgcacgcctttgacgtgcaggaggaagccattcgcgccaccagggagcgtctggagaaagaagggctgctcacctccgccgtccacctccatctggccagccatgaccgcctggcggaactggtcaccggtcccgtgaaggccgtcgtcttcaacctgggctacctgccgggcggggataaaaaaacggtcaccagaacgggctgcaccctggcggcgctggaacaggccgccgccctcatcgccccgaacggccttctcagcgtcatgtgctatcccggccacgaaggcggggatgcggaagcggaagccgtggaggatttcctttcccgcctgccgcaccattcctggcgcaccggcaaataccagctcctgaataccggaactccggcccccttccagatctgcgcgttcaggctggactgaccttccccgtaaaaatacgggaacaaggccagttcaccatcaaatgcccggaaaaaccatcagtcccggcattccttcatccattccatcacccgcgccagagcccgggcgcggtgcgacatggaattcttcacctccatgggaagctgggcaaaactcagttcatggccttccgggacaaacagcggatcatagccgaaccccccttccccggccggttccgtcagcatgtggccttccacggaaccggaaaactccgccagcacgctgccattcctggcaagcaccatcacgcagcggaaccgtgcggagggcttgtcccccggcttgactccggcgcgccgcagttcctccatcatgcggaggttgttccgcgcgtggttcccttcctccccgccgaaggaggaggaccagacgccgggacggccgcccagcacatccacctccagcccggaatcatccgccagcaggacgccgggaatgcacctggaggcggaaagcgccttgagcgtggcgttctccgtaaacgtaactcccgtttcatccacgggcggagcctgggggtagtcggcaaggtccttcacttcccattctccggccagcatggcgcggatttccccggtcttgtgggcgttgcgcgtggcaaccaccagcagaggcaattcttgttccatcatcatgaattttttgcagttgaaaaccgtatggaagaccgcgttcagcagtcaatttccaggctgacggggcagtggtcggaccccgtcacgtccggatggatggcggcgcccttcaccctgggagccagcggattggaaacgcagaagtagtcaatgcgccatccgacgttccgagcgcgggcgcctgcgcggtaggaccaccagctgtaccagcccggttcctccggatgcagggcgcggaaggtatccgtgaacccggcctcaagcagcagcgtgaacccggcgcgctcctggtcgctgaacccggcggaaaaacggttctccctgggacgggcgatgtcgatctcctcatgggctacattcaaatccccgcagaagacgaccggcttggtttccgccaaggccgccacatacttgcggaacgcagcatcccactgttcccggtacgggaggcgcaccagctcgttctgggaattgggggtatagcagttgaccaggtaaaactgttcaaactccatcgtgcacacgcgcccctcccggtcatgctccggccagccgattccggtggacgtggaaaggggctgcacacggctaaggatcagcacgccggaataaccggccttctccgccggattccagagctggtgcggccaggaggaaatccacaggtcattcacctgttcaggacgcgccttgatctcctgaaggcagaggacgtccggctccagcgcctccacggcgtcccccattcccttgccgaggatcgcccgcaatccgttcacattccatgagacgagtttcatgcacgcatacttcccgtttttgccggctccgtcaagccctcaaacacccccgccccgcacccttccgggggaccgctgaaaacccttcttccggaatcatccccagtcttttgcatgccgcatagaacaagcgttttttcttgccaggaccgccccctcatgcttacttagataggcaaacaccccgagagacactcgagagtgggtctgtcgacccgctcttttttgtctatccatcacactcctccacactcatgacaaacgatatcaaagctttaattgactactacgagagggaaaaagggctctcccgtgaaaaaattcttctcgctctggaatccgcttttctctccgcctaccgcaagatggttcccggctccggcagcatcaactacctgagggctgaaatcaacgtggacaaggggaaggtgcgcatctttgcggatctggaagtggtgccggatgaagaatactccgacaagttcaaccaaatccccctctccctggccgtcaagctggaccggaacgccgtcctgcacgacctgctgcccaccaacatcacgccgaagggctttggccgcatcgcggtgcagactgcccgccagaccatgctccagaagctgctggatgcggaaaaggaaatgctttacgacgagttcaaggaccgcgccggcgatctggtgacgggcaccatccgccgctttgaaaagggggacatctttgtggacctcggcaaattcgagggcgtcatgacctcccgcgaacgcgtgccgaatgaagactacagcgtcggcgaccgcatgcgcttctacgtggtggaagtgcgcacggaagcccgcggaccggaagtcatcctctcccgcagccatccgaacctggtgcgccgcctctttgaatcggaagtggtggaaataggcgaccagaccgtggaaatccacggcatcgcccgtgaagcgggctaccgcaccaaggtggccgtcatcagccatgacgacaaggtggacccggtgggcgcatgcgtaggcatgcgcggagcccgcgtcaaaaacatcgtccgggagctcaacaacgaaaaagtggacatcctggaatggacggaggaccccgtcatcttcgtccgggaggccctcagccccgtggaaccgcgggaaatcaccgtggacgaggaagccaaaaaaatcttcgtcatcgtccaggacgacaaggacctctccaaggccatcggccgcaggggccagaacgcccgcctcacctcccgcctgatgggctgggacgtccaggtgcgcgtctttgacgtccaggaagcggaaaaacgccagaaccaggccgcggccgaggaagtgatgcgccaatgccaggccgccgcaaagaccctcagcgaacaactggaaatcccggaagaaaccgccatgggcctggtgaccatgggtgggacggacctggtggccctcaccggatttgaagcttccgacatcgcggaaagcatgggcattcccgcagaggaagccgcccagattctggacaaggcccgggaccttatctcccaataaccgttgagcgcggcgctcaatatctaacaaacttaaattaagatgcctaataaacaagaagagaacgaacccaaaaaggaagtgttggatctgatcggcggatctcccaaaaagaaacgcgcaccccagccggaacccgcaccggcgccatcccgtcctgccccggtcaagaaagaagctctcgacttgctttccggccccaagaaaaaagcgcccgcctccgctccctccgagccggctaccgcccctgcccaggccgcacccgccgcagaatctgccgcgcctgccccccaggaaacggactccgcagacgataaaatcatcaacctcaagccgcccgtctccgtctccgagctggcaggcatgctgcaagccaagcccttccagatcatcaaggacctgatgggcatgggcatcttcgccaacccgaatacgccgctggacgcggacgccgtcagcgccatctgcgacctgcacggctacaccttcgcccgtgaaaaacgggaaaagggcggcggcgtcaaggcccagcaggaaccggtcaaggaaccggaacccgtgccggtggtggaagaacccaaggccaccctcatcctgcgcacacccatcatcaccgtcatgggccatgtggaccatggcaaaacctccctgctggactacatccgcaaggcgcgcgtagccaagggggaagccgggggcatcacccagcacatcggcgcctatacggtggaatacaacggcagcaccctcaccttcctggataccccgggacacgccatcttcacggaaatgcgcgcccgcggcgcggacgtgacggacatcgtggtactggtagtggccgccaatgacggcatcatgccccagacgagggaagccatcgcccactccaaggcggccggcaaaaccatcatcgtggccatcaacaaatgcgaccttccggccgcagaccccgtcaagaccaagagcggcctgatggaggaagggctggttcccacggacttcggcggcaacgtggaatgcgtggaagtctccgccctgaccggcgacggcatcgacgaccttctcggccttctcgtcctccagtcggaagtgctcgaactccaggccaatcccaaggccaactgccgcgcctccatcattgaggcccgcgtggaacccggcacgggcagctccgccacggccatcgtggaaagcggcaccatccgcgtaggcatgcccttcatctgcggcccgtacgccggcaaggtgcgcgccctggtcaacgaccacggcgaacgcgtcaaaaaggtggggcccggcatgcccgtggaaattaccggcttttccgaaaccccgaacgtgggcgacgaactggtggaaatggaaaacgaacgcgccgccaagaagctgggcgaagaacgccaggaggaactgcgcaagcagcgcctggcccagccccgcaaggcccgcatggaagaactgctcgccatgatgggcgacggcacccagaaagcccagctcaagatccttctcaagggggacgtgcagggctccgtggaagccatcaagaaggccattatggacatccagtcggacaaggtggaatgcgtcttcctgaacgcctccgccggccccatctcggaatcggacgtgctgctggcctcctcctcggacgccgtcatcctgggcttcaacgtcaaggtggaagccaacgccgtgaaactgctcaagcgggaaggcgtgcaggtgaagctttactccatcgtttacgaactcatcgaccaggtgagggatgccatgctgggtcttctggaaccggaaacgcgtgaaaccatcatcggccacgccaaagtgctccaggtcttcaaactcaacaagggccgcgcggcgggctgcatggtggaggacggaaaaatcctccgcagctgtgaagcgcgcgtcatccgcgacaagactcccgtctttgacggtaaaatgtccaccctgcgccgcttccaggatgaagtggaagaagtcaaggccggcctggaatgcggcatccgcctgggcgacttcaacgaatacgaggcaggcgacatcatcgaatgctacacgctggaaaaaatccagcaaacgctgtaaccccaagcaggaatcatataacagggatggacgcccctttcacgcccctccgggcgttcaaagaagctccatccctgtcctttctcccccattcttccttctccgattgaaccaatcggtccatccatcactctatcccttcatatgagcagacgcactgacaaggtaaatgaactcctccgccgtgaaataggcaccaccatccagcgggactttgaattccccggaacgattgtcaccgttattgaagtggaagtgacggacgacttgaaagaaggaaaagtatgggtaggcgtcgtaggaaaaatgtcccccgcccaggtgctggaaaaactgaactccaggcatggcctcatccagtccgccgtagccaagcgcgtggtgctgcgcaacacgccgcgcctgtcgttccggctggacgactccgcccagcgcggcgttgacctggtcaacctcctggaagacattgataaaaaccttcccaaagcccctccggccgatccggaaaacggcgaggaataaaaccctgctgaacagtaaaaaatcctccttgtctttttgcaagacaaggatttctttttccagccaaaagcacggaggcaatcgccgtgccgtgtttacggaccggcaaaacggcgaagtggaattggcaggatgatttcttcaggagaaattctgtaacagatacaagggccgggaggcccttgttcccagaggaaccgttaccgggaaacggggtggaatttatttcttccttacctcgtcaccttcaacctcagaaaccggcgtgccggggcactttcctccagagccgccgtatcacggaattccccgcggacaccggccggagtgacgattccttcatcggcccattccttcaagtcggacgaactttccacactgaacgccacatccgccgcttccggatttaccggccaggaaagcacgaggtattttttgcccccttcctcccggatcgccagccccgtcacgcttccgcacggtttgttggggtccaggcccgttgcatacttcatcaggttggtgaccccgtctccggcgggacaggcatccggagccatctggtcctccggcgttccgtccccgaagttgtcctttttccacttatcgtaccctgccggggccggagccgcggactgggtcagcgtgaacgttctttcctcgccgccgcactggacggtgaccacggccacccgttccgtttgctgggcgttggcttccatttgaatgtccagcgtggcagttccggaacctgaagccggccggatcgtgacgcaggcctggtcacaggaggccgtccatggaagctgcgtctgtacggtcagcgtggtggaggcagcggcaaaccctacggtttcctccgttttgtcgatattgacgggatttacgtattcatagctgaaggcgctggcgggaatctcctgcctgcctattcccggcccctcccattgcatggtgagggcagagccggaggcgtggcccacataaccgatgcggatgggatgcacccccgccgcaagccggacggcctgtaccgcattgggcgtgacttccgaaccctgccgggcattggagttggcttccgtgcccggcgtataggcgtagtccgcatcaatgagctgcatgccgtgcaggtgtacgaaggctttggatcccgcgttggaatccgtctgaaggtagaatttgtactcccctgtaacgggaacggtaaggtagcccgtgagttccacccccttttgagcggcggaaccggcattcacgctgagagaagccacagcgcctgtgacagagggcgcctcttccatctggcggaagtcgggcacccagtcaaaaccacggttccagcagcgcattttcagaccttgccggagattggccggagccgtcgcagcgggcacgtcaccggcattcagagttccattcgtggaaggcagggagcgccgcacagacaaggcccgggccttcatcttcgcctgcaagtccggacgggaggaggcgagattagaagcttcctgcgggtctttttcagtatcataaatctggaagtcctgatccgtcccggaaatgttgaaacgcacgcctttaaggccatccacaaacacgacctgctgcaaaccgcggggagagcttttgtggtgcgacaggaagtcctgataggaggcgccattgccgccatagttatattcggaataaatcaggctctccttctggcgttccggaacgccggccagcgtcggcagcagggaaacgccgtcgcagcgcgcaggaaccgccacgcccgccgcatccgcaaaggtagccatccagtcatggaactggcaggcattcaggctgatgccattggcaggaatcacgccgggccagcgcaccagggtgggcacgcgcatgccgccctcccagcagtcgcgcttgatgccgtccatcatgccgtagctttggaagaaggcgggattctgcgcgccccgctggtgctgcccgtccgaaccgctttcattatgaggtccgttgtcggaggtaaagacgatcatcgtgttgtcatcgattcccaaatccttgagcgtttgaatcaaatcccccatcacatcatccacgcgcctgatcatggtggcgtggcgtttctccgtctggttgggggaggcgtcattgattccctcattgtccggatggatgtaggtatccttggaaaaggttccttccaccccggccgctgccgcccgctgcgccgtagccgtgttggaggcttcatacccgtcctcattcccggccacccactgcaagcctcccttgaggcccggtttggggggataggcgcacgcgggcaccgccagggaaccgtgcggagcggggaaggccaggtacaggaagaagggctgggtggccgatttggcatggtggtccacgatccactgcttggcgcgcgcgccgaacaggtccgtgtcataggccgtatccggaaccttgttcgtcacattggcgaaggcgggggaagaggcgccgtcattgtattcgtaaatattcttggattccgtgatgtagtggtagtgccccgtcaggtgctccataatcccgtaaaagtagtcgaatccgcgttcgttggggcgggcatacaagccggacggcccctgcccgtagccgccgatgccccatttgccgacagccgccgtatggtacccggcgcctttcagcactgtggccagcgtgtgggagttttctatgggataatcaaagctgttgttgcggataacgcgggaatggccctggtgcacccccagcagcagggaggcgcgggccggggcgcaaacgggcgccgcgctgtaatggcgccgcaattgcatcccttccaccgccatggaattcagctgcggcgtcttgaagctgttgcgcctcgttaccgttcttccgttcttgtcctgatggttccagttttcttccaggtcgccccagcccatgtcatccaccagcacgaagatgatattgggcctggccccggaaacatgccccggcatggccggcttttccgccacatccgtctgaagcgtcagtaatttggccgcctcatcataattccatgaaaccgcccctttcggcagttccttcacagtgatggaggcggttgtttccggcttgaactgcacgcccagcgtatgcctgcccggccaggcggcaatgagatcttcaaaagaggaatcaaacaggacaacgtattcccgcgcctgcagggaggggctctccggctgtacggctgacttttgcggcacgccgtccagcacggatacatggacgcgccccagcgtcagggaagagctgggcagggaaatgtccccctccacggaaagagcgcttccgggcgcataagtgatcgtccccggaaacgtgccgctgccgcccagcgtgcagctcccctgcaccaccaggtccaccgccggaatctccccgtcaaaatggatggaggagttgttcagcgtaatcgttacattcctgcccacgttccggatttcccccgccttgacgtgccgatccgtataagtcacccgggcgtcatccagaatcgtctgtttcagcgtccccttgtcaccggtaatgccggatgagccggaaagcgtcacattcccgtccactccagtttccgccaggtccagcgtggaattttccagcgcaaattccgtgttcgcgccgatgttccattggccggacgccttggcagaggttccggaaaaagtcacggaggccttctcctgcgtcaccagggagccctggtacagggacatgccctccagccgcccggcgtcttccaccgtaatcgtattgctcatgccccggtccgccaggtccagcgtgggcattcccttcccggcactcattacaaagccgatgaggccggaaatattattcagcagcattccttctccaatgcgcacggctccccctcccgtcaccgtcacgcgccgcggagcatcgttttcagaagtcagggaatacaatcctccggagggagctccatcgtcctgccccacataaaaacagcggccttccgccacattccactcctggtcggcggctacgcgcagctgtgcaatcccgaaatccgcattataaccgcccgcggttgcgttttccacggtaatgccgcccgtctccacgcgcagatatacgccggaagaagtattcaacacgaagagctggacctttcctcccggctgattgttaactcccgccacccggattcctttcaaataccgtcctccggaccccaacccgcctatattggtcatgccagccgaatccgtcccgttcgtgaccatccaatgcgtgtaggcggaggccggcgcgccgggagcagccgacggcgcgcttccgttcagagcccagtttgacaagttcgaccagggagacgccgcccctttccagacatattcatcggcggcagacctggctggcgcgagaaataataaagaaggaacaagaacagataagaaacggtacaggaacatggcaagctggcggaaaagtgattcaagaggcatcaggctaaagaacaaactgcctgaggaatcatgttgattactgatattaaatattaaaaagtgttagattctgctaactgaaaataaaaaagccgccaatttcaaaaaacggacggcttgatcaaatgtttcaggagcatggacttaaagtctgcggcggcgcatcatcagcgcagccagccccagaagacccagggaggccgtggcaggttcgggaaccaccaaatcaccgttaatctgaattcccgaaagcccggcaaagcagcccttgttataagcgctgttattggaagccgtgatggtgatggtcagggattccccggctttcagcagaaaatcatcgtacgtgtggcttcccgtatgaatgccggtccatgcgccggtggtaccattggcggcggtggaaccgttgtaggtcagcgtctggtccggctgcccgtcaatggagagagtcatatcgacaggcttgttgaaattgccttcatatccgcccacataaccattattggctataccgccaccgccattctgggcggcccccgcacccgtgaacccgaccatggacaggtcaatggaagaaatcagcatgtcgtgggaaccggtattggtgaatgtgaaggaaacgctccatgtattgtttccggcgcctcccacattggcattgggagaaaacacggaggccggaatggaacctgaggccaggaggtcattgcccgaggtgctcttgctgaaatcgtccgaactgatcgaggtggaggaagtgagccctacatcggatatcgtgttcaccgtgacggtatccagggaagtgccggtccggttaaaagtagtggaacacaacaccgcagcctgggaaactgctgttccaaaagtcagggaggcaatgagtatcaatgatttcttcataactaggagaggttggatgaaaacaacctttatcccttagcggattgccaatccgaagtcaacaataaatgataaaaacaagatgtttaggatgataaacgcccaggagcgttttctgatgagagtttcttttttgggaattttaaatcgttgtaaaattcctaatgccagatttttatgcataaaaatggcacatcggatttctttttcggattggcaatccgttccgtatttttttatctttcactaacggcttgccagaagagaggagaacagttaagttccccgaacggacagcctgtccatgagatggctggacctttttccaacatgaacggttactgctacttcattctggggatattgatcctggcggccggttatttcacctacgggcgggtgctggaaaagattttccggccggacgcctcgcggcagactcccgccgtggcctgcacggacggcgtggattacgtggtgatgccgcgctggcgcgtgttcctgattcagttgctgaacattgcggggctgggccctatcttcggcgccgtcatgggcgtgctgtacgggccggccgcgctcctgtggatcgtcatcggctgcatcttcggcggaatggtgcacgattacttttccggcatgatttccctgcgccacaagggggaaaacctgccggaaatcctgggccgctacctgggcagccaggcccagtggatcagccgcgccgtctgcatcgtgttcagcgtgctggtgggcgtcgtcttcgccgtgggccccgccgccatcctggcccccatgacgggctggagcgtttctgcatgggtgtggatcatcttcggctactactttctggcgaccatccttcccatccaggccatcatgggaaaggtgtatccccttttctccgtcgccctgatcatcatggtggtgggcattctgggcgtgatgctcctggctcccttcgcggagttcatgccgtactggatgcacattccttctatggaagtgctcccggacctggacttcttccataaccgccacccggcggatttcccgctcttccccgtgatgttcatcaccatcgcctgcggagcggtgagcggcttccacgccacgcagtccccgctgatggcgcgctgcctgaaaacggagcaggaaggactgcctgtcttcggcggagccatgattacggaaggaatcatcgccttcatatgggctgccgccgcgctgaccttctacggcaccccggaagccctgggagcggctaccgccaacggaaaggccccggcgctggccatccagatgatttccgaatcctggatgggccacgtcggctccatcctggtcatggtcggcgtggtcatcctccccatcagcacgggggacggcgccctgcgggtcacgcgcctgatgattgcggattgcttcaagctgaaccaggagcaactgagccgccgcctgatgatcgccatccccctctttgccgcagccattgccgtaagcagcatggactacgccatcatctggcagtacttcggctgggccaaccagctcctggccgccgccaccctctgggccgtctccatttacctgcgcagcaaaaaccgctgctgctggacggccgccgttcccgccgccttcctgagcctggtggtgctccagtacctgttctccagcccggaaatgtgcggtttcagttatgaagcttccctggtctgcagcgtcctgttcgtggccgtcatcggcgtgctgtgcctgttccgcggctccggactggaaaaagcggaggagcccaacctgtaatttcatgaaccccagcccccatacgcccggacacgcccgcaaggttccatggggagccttctggaggctcgtgctgatccaggcgcagaattcctttaatgaaaagggggcgcaattcctgctcattcctctgggcgtctggctgtacggcacgcagggagacctggaatacccgcttggggccatcatcgtgctgcccttcatcctgttttccccgttcgtcggctggctctcggaccgtttctgcaaggcgcgcatcatccagtccatggcgctgctccagatctgcgtgctggcgggcatgtactggagcctgcgtacccataacctggacggggccatcctgtggttctgcgtctttgccgtgcaggccactatcttcagcccgtccaagaagggcatcgtcaaggacatcgtgggcacctcccgcatggggttcgccagcggcattgtggaaatggcttccatcctcagcctgctcatcggccagatcggcgttttcgtctggttccgctacctgctggagccttccacggataccgtctggcaccactggctgggggaaggcttcttccagtggtttgacgcctggctgaaaccctccggcctcaacgacggctggtatgccgcctccttcccctgcctggtgttcctgctgatggccgttcccgtggcgatttccagcttctacctgccccggtacgctccggagggcttccggcccttctcctggtccctgttttacgaacacttccaccaactgggcaagctgtggaaaaaccgcaacctgcgcgtcagcgagatgggcatcggctacttctggttcttcggcggcacgatcatgctgatgaccatccagatggccaaggaaatctccggcggcagcgacgatttcagctccgtgggagccgtgctgatggcctggatgagcggaggaaccgtgctggggggcatcctggcctccctgatctgccgccgccacatccggatgaacgtctccgtgaccgggggcgcgctgatggcggctagctgcgtggccctttctacggtctccatgacttccacagtcttttatgccctgctgatggcggcgggcatctccgccgcactgttcctggtgccgctgaacgccttcttccaggaccgggcggacaacgacaagcgcggggacatgattgccgccggcaacctggtggactgcgtgctgggactgatggccgtcggattccaatacgccatgatgctggtgattcccccctcctggcaattcgtcgtcatgggaatcctgagcctcggcatggcgtgggtgatcttccgtttttcccgcgtggcgccgggtgcaagataaaatgtactggcaatcaggcagtaatctttaaaaatcctccttttaaagaaaaacctttccctccttccgcgcaccctgcgccattctcccgtcagggcgcgcgatttacttgcaaacccgcttttattcgggcaacataggggggaaaacaagaagccatgaaaaagtatcttacccttctgttgtgctccctgtgcgccctggcgggcttcaccgcctctgcggcatccaccgccagcctcaaggacgtcaatatcgtcatctccaccaccaagggggacattgaactggccctttacccctccaaggcgcccgtcaccgtagccaatttcctgaacctcatcaacaggggctactacaagggaatctccttccaccgcgtgattccggacttcatgatccagggcggcgaccccaccggcacgggcatgggaggccccggctacagctttgaagacgagttttccccggacctcaagcatgacggccccggcgtgctttccatggcgaacgcgggccccggcaccaacggctcccaattcttcatcacccacgttgccacgcctcatctggacggccgccatacggtcttcgggaaggtgctgaaaggccaggccatcgtcaactccatcgtccggggagacaagatcaaggacatccgcattctggacaagaacgccgcggccgccgtgctgaaggcggaagccgcccgcgtggcccagtggaacaaggccttggacgccgccaaataaaccgggagcaatcaacggcatgaatattctcaggcggttcatcaaccaggtcttcactccgcaggaagtggaggccacgccggagaacgtcgccaaatgggaaaaaagagcgcccggatggaccatccgctgcaaccgctgcggcctggaggaacccttcgggaaatacggcatcctttacaaatcggcaggcaggaaaaggaactttggccactgtccccgctgccgcaaatggtcgtggctcgtcatttccagaaaaacggcgtgaaacaaccccgtattcatcatcaagcgactctaaaaatccatccaccaaccattcatttttatgaaaacactcattaaaaacgcacgcatcatctcccccggcattgacctgcccggggctgccgtggaaatcgaaggcaagaccatcaccgccgtctatcccgccgggagcgaactccccgccgcagacaaggtgatggatgcggaaggccgcatgcttcttcccggtttcattgacatccacagccacggcgccggcggctgcgacacctgcgacgccaagctggaaagcctccgcaccattgcggaatgcaagatgaaggaaggcgtcacctcctggctgccgaccaccctcaccctgtctcccaaggtgctggaagacgtgtgcgcctccgtggcggaatacatgaagaaccaggaattcgccaagacgcccggcatccatctggaagggccgttcatcaatcccaagtgctgcggcgcgcagaatcccgcctttgtccgccagccggactatgatgaagtagccaacctgaactccatcgccaaggttctgctggtctccctggcaccggaaatgcccggagccgtggaattcattgaaaaagccacggccagcggcatccgctgctccgccgggcacagcgcggccacccatgcggacttcaacaaggcgaaatccgcgggcctggtgcacctgacccactattgcaaccagatgtcccccctgcaccaccgtgaaatcggcctggtgggctccggcctgctggacagggaaatcaagattgaaatcatctgcgacaccatccacctctgcgcggacatgctcaagaccgtgttcaagaacaaggaaacggaccagatgatgatgattacggattccctggcctgctcctggatgccggacggccccggagacctgggcggcctgcccatcatcgtgaaagacggcgtggcgcgcctgcaggaatccggcgcgctggccggcagcaccctcaaatacgcccacggcctgaaaaacgtgcaccgcctgaccggcaagcccctcagcgacctggtgaaggccacctcctggaaccaggcgcagtccctgggcctggaaggcctgggcaaaatcgcccccggcttcacggcggacatggttctgctggacgatgacttcaacacctgcaaggtgttcatcgacggcgtggaaaaatacagcgcgtaaccgcgcacccgcgcgccggacgggacggaaacccttccggcgcgccatccccctcttaccgtattccaacgttcaacattcacctccatggctattaccattgaaatgccccgcctgtccgactccatgcacgaaggaatcgtcctgagatgggtcaaaaagataggagacttcgtagaagtcggcgaccatctggccgacatcgagacggacaaggcccacgtggaactccaggcatgcgaggatggaaccctgatggaaatcctggtgccggaaggcggttccgccgcggtgggcgctcccattgcgctgcttcagtcggaattcggcgccgcctcctgcgactgccctccgtgcccgcccgtcaaatgcagcccgctggccgccaggctggccgctgaagccgggctgaacgccggaaccctgcgcggcaccggaccacgcggcaagatcatggccgcggacgtgcgcgcctccatacgccccgcagacggccccgcccgccgggtgcagaccccgctggcgccccgggacacacgccacgccacgcgcgtggataatttctacctgtactccctggaggcgaacatggcctacctggccgccatcagcacgcccatcgccgtccagtgcgaaaaactcatcggcggccgctacagcctctttgactacgtggtgcgcgccgcggtgaaagcgtgcatcagcgagccggaatggctggcgggagactccgccgcagaactgctcatggtgctggacaagggggaaaaatacgtcttcattgaaaacgcctccggcaagacgatttacaacatcgccatggaacggctggccgcccccgcggcagggccgccccccgcgggcagcatcacgcccaacatcctgctgtgcgacagcggcgtgaacgtggaagcccagcgcaccgtgctcccggaaatgccccacagcatcatcagcatcggcggcaccacgccgaaaacgggcatagaagcgggacgccccgtgtccaagctcatcctgcccgtcaccctgtacgtgaacgccaacatcctgccggaatgcaaggcgtccagaatcgccgccgaattcaagacgctgctggaaaatccggtcctgcttctcctgtagggctaccggcatgctccgcccttttccttgaacgttcccttccctccccctgtctcattaaccatgaaaaaagccgccattcttgccgcccccggatttgaagaaatcgaactcatggctccgctggacatcctgcgccgcctgaactttgacgtgctcctcgccggcgtgcagtccgacaaggtggtcagcacccatgacgtgaccgtcaccacggacaccatgctggacaagctccatgccgacaagctggacgccctgatcctgcccggcggcgcaggcgcctgggtgctccgcgacacgccggaagtcatccacctggtcaagaagatgcatgccgcgggcaagctggtggccgccatctgcgccgcccccatcgttctggcgaaagccggcttggtgaaggacaggaacgtcacggcctacccggcccaggacgtctaccgggaactcaatgaggccggagcccacatcgtgaaggatgaaaacgtggtgctggacggcaatatgcttaccgccaatggccccggagccgccatgctcttcggctactgcatcggggaatacctgggagaagacctccaggtagcccagctcaaggagcagatgtgctacacgggcctgtaggattccggaaagcattccgactccttcacggtctcataccacaccaaaaaaccgagggaagaaggtttttccatctcacctctccaagtgccttttcagggtataataagccccccggcgtcctttgcgggatgacatcaggcgggcacgcagggaagaaaagaaattgccctggagggggtagtccagcagaaggcggcagaacgcctggtcccaccggtccagccgggagagggctttctccccgcccaccagttccagccattttttccacccggacaggagggtttcccggtcttccggcggcgccttgaagaaggccccttctttcatgatgaagtgcctgcggatgaattccatgtagtagtccaccagcccgaagacggcgggggaatccagcaggccgtgccgctgccagaaacgggccacccggtccatgcccagcaggtccatgcggaagtcgcccagcagcaaatcccgtccatacgtggcggagccgggacgttccctgcggtaatggtaaaaacggtccgacagggtccggagccggggtgcgaagggcagcagcatcagcaggaaggccaggtcctccccttccttcaagcccaccacaaaacggagggaatgttcttccaccaggcttctgcggaccagtttgttgtacacgggacccacgcaccggcaccaggcggaaccgcggcggaattgctccacccgttcctccggataaaattcatcatccggggaccagccgccctcctggacggccacaccgtctttttccacgaattcccggcaaccgcacaccacgacgtccgcatcattcttttcagcggcgccaagcaggcgcgagaacatcctccggtccacccggtcatccgggtccacaaagcccacgtattttccctccgcggcatccagcccggcattcctggccgcggacactccggcgttggactggctgataacccggaggcgattgtctttttcccgccacctgtacagaagctccagcgtcccgtccgtggagccgtcatccacgcagatgatttccatgggacccagcgtctgctccgccaggccggacatgcattcgtccacgtagggcgctacgttgtaacaggggacaatgacggaaacggcggtcttcatgataatccggataacaggagcttaagacggtggtaccgcccttttcttccgctgcatgccgacatcagggtactgtgaagacgcgcgcagggaccgagttttaccggttccgcacccagcaggcggcagaacgcgcggtcccacttgttcaggcctgcaaagccgggaccgatttccacgcctttcaaccatttgcggtaacgcgccgccagtcccctgcgttcctcttcatccagccgccggaagatttcctctgcggaggtgacgtgagccagcagataacgcttcatgatatgggccagccagccctgcctgacggcagattccagccagccgattttttcccagtaggccgtcacatattccagacggtccatgttcatggagtaaaaccatccgtcccggtcccagacgtcggaaagggatccggcccttttcctgcggtaaaagtataattgatccggaatgaccgccagacgggaggcgtgcgggagcgtcatcagccagaatacgtcatcttccccacccctgaacgaaggttcaaaccggaatccgaggctttccaggaattccctcttgtacagtttgttccaggcaaccacgtccattcttttccagacggcatcctcatggaacaggctcgcgcgcgcatcctcctccactccgcagaacggggcatgggaccattcttccagcacctttccgtcaccatcggaaaaactgacgtaaccgcaggccgtcacttgcgcctcatgcctgcgggcttccgccaccagacgggcatacatggaaatatccacgtagtcatccgggtccacaaagccgatgtattcgcccgtcgccgcatctatcccggtgttgcgagccgcggaaaggccaccgttttcccggtcaatcacccggatacgggcatccttttgagcccatccgcgcagcacggccggcgtatcgtccgtggagccgtcgttgacacagatgatttccaggtcttcccaggtctgccggaccaggctttccaggcatttgtccagataaggagcaacgttgtagcagggtaaaataatggaaacagtaccatccatagagaaatcgggagtatcattcagtttttcatgggaaaaaccagcggaaaccatgattcatgatgcccgcgccttttcccgcaacggctaccttacttcaacacaggcgttcccgcaagccccaacgatgcgcagaatgttaagaaccagtccgccgggaagctatttcccaccgccgcaagaggaaagcttccctttaagcctgtagtaacgtccccgccgtccgcggcagcgggagagaagcttccaccacgcacgggacaggaagccgggatgttccggcggagaagccagcatccggcatagctcaaagtcccatttgccgagagtccggaacgcttccgcttcccccgccagggcaaaccattcccggcatttgccgcgcaggcgcctccattcctcctcactcaactgcggcaggggctgccccggattcagcagccggaccagaagataatgcctcagagcccggagtacccagccgcgctccaggccggattccagccagccgcattttttccaatactccgtagcatgcagcagccgttccgccaccagcaggaggggacgttcctgcgcttccagcatctgggagacagagccgtgcctctggcggcggtaccaatacaagcggtccggtatcacagccaggcacgtggcatgggccagcaccatcagccagaggacgtcgtcctccatggatctgaaagaagtttcaaaacggagaccgtgccggtccagaaaatctctccggtacagcttgttgcatgtcaccacgtccatccgctcccagacggagttcgttcgcatcacgtctgactgcacccccttgtccacgcccggagccggagaccagctcagttcctccagcacggagccgtctccgtcggaaaagctggtgtagccgcaggctgtcacatcagcgccatgcctgcgggcttcctccaccaggcgggcaaacatggaaggttccacatagtcgtccggatccacaaaacccacgtattcacctccggccatatccattccgaggttccgcgccgacgcctgccctccgttttcacggtgaatgacgcggatgcggtcctccttttccgcccatgcgtccaaaagagccggggtcacgtccgtagaaccgtcattcacgcagatgatttcaatattccgcaagctctggttcaccaggctgtccaggcagacctccacatacggggccacattgtaacacggaacaacaatggaaacggacatggtgcatcagctatgggttttacctccgcaggaagccagaagcagacggagagcgtaatagcgaccgcggcgccctttgcggagggaaaggcgtttccacaagatgcgggacagcaggccgggacgttccgcaggtcgttccagcaggcggcaaaaagctgtttcccatttgtcaagaccctgcaaccgctccgtgccttctaccagggagaaccattcccggaactggccgtgcagctgcgcccattcccccgcagtcagacgtgggagcggcttgtgcgcaggcaccagatggacaagcaggtagtaccagagggcatgcagaacccagccgcgttccaggccggattccagccagccgcattttttccagtacgccgtggcatatagaaggcggtccgccacaagaggcagcggacaaccttcttcctcccatggcagggaaatagccccttctctttggcggcggtaccaatagagccggtccggaatgaccgccagacgggaggcgtgggccagcaccatcagccagaaggcatcgtcctccccctgcctgaagcggggctcaaagcggaggccgttcctttccaggaattccctcttgtaaagcttgttccatgccacggcggccatccttctccatacggcattttcctgaaaaacgcatgcctgtacattctcttccactccttcttccggtgacaggctccatttttccagtatggaaccgtcacggtcggaaaaaccggtatagccgcaggccgtcacatccgcatcactcctgcgggctttttccagcaggcggccatacatggagtgttctacgtaatcatccgggtccacaaagccgatatattccccgccagccagggccatgccggtattgcgcgccgcagaaaggccgccgttttcccggtccaccacccggatgcggccatccctttcagcccatgcgcgcaggatggctggggtatcgtcctcggaaccgtcattcacgcaaatgatctcaaggtcccccagcgtctggagagttaggctttccatgcatttatccagataaggagctacattataacaggggacgatgatggaaacagccgcgctcataccaagaaaaccctatgtaaacggatttcaaatccggggtcaagggccgattttcataccaaggagcttacgttgcgtggcccttcctcgaggggaaaccgttttcccccggaaaaagccttccggaattacgcaacggaaacctggaccgcggcaagcctctcagccgttgaaatgcatgcattccgtcaggacgcactggctttcaggaaagagagttcgctgcctcccggtttggcttccggaagccgcaagcgtttacggcactccaaacggtacgggaatcattccatattaatccatgacggatttgaaattcgtatgatgcccaaacaaaatatgagcgttttcaccgccgggaatgtcccatgcagagaataacggaacgccggaacagggatgcccgttttccctgtttcaacagctcttccggtattcatctccgccatgaaaaacaagacctttctcccaactacctttataccggaattcccggcaggcaccggaaacgctttcagcttttcccattcttcttcatgacctgttgaattccttttatgccgactatctctcccttatccggcatggcgaaacctcccgtttccgtcatgttcgccgtcacttcctcctggctcatcccgctggccgtggcgatacgctccctttgcgtgcattccgatccgcggcggaattatgaactctacatcgttcatcatggattggaggaagagcagatgaaggaactgggaaaagccgtttccggctatccccgcgtctcgctggggttttgcaggcttccggagaggctgcttcgcattctgcagcacagggattgcggacggttctcccctctcacgtatggacgcctgctggccgccgccctgttcccccggcacgacagggtggtttacctggacgtggacgtgctgctgaatggagacgtggccgaactttacgatgcggacctgcacggcgcgccgataggcgccgtccgggactgcgccgtcctgcaaagcatcagtacgggccgccttcccgaccatctggaatacatcagcggcatgggggtaacgaatccgcgcctgtactgcaataccggggtcatggtcatggacctggtccagatgagggagcaggaaacggaagacaggctgctgaggctgcttgaggcccatccggattcctttccgtacgtggaccaggacattatcaacattgtctttcacggccgcattgctccgctgcccctccgctggaattaccacttccagtttgagctgcaccatgcgggaatggcggacctcatctccggcaccgagtttgaagaagccccggccctgtttgaaagccgttcctggaagcttttccacctggtgggtgattacaagccgtggctgccgccggatatggaaaaaatctaccaccgcctgtatctcgccctctggtggccccttgcccggcaaactccggctttccgcagggagctgcgcgccctgtaccggcaattcacgcgcgccttccgttcccggctgcgccaccaccaatggagcctccccgtctctccgggccggaatttccggaaacgccgggagaaaatcaaaacccttaaacgccaactggccgtgtttgacggctcatggccctgattccatcccatcctttaacatcatgccctcctccctctccgccgcaccgcccgcagtcttccatgctgccgctgcgcctcctgccatagacgtcatgtttgccgtcacctccgcctggaccgtgtgcctggccgtcaccctgcattccctggcacgccattccaacccggaacggaactacaggctgtgggtggtccatgacgggctggaagaagaaaacatgcaggaactggacaaggccgtttccggttatccgaacgcaacccttcagttcatgaccattcccggcaagctggaacagatgctgcgccggagggacgtgaaacgcttttccgccctggcctacgcgcgcctgctggcacccagcctgttcccccggcattcacggattgtctatctggatgcggatacggtcctgtatgcggacgtagcggagctttacgatacggacctctgcggggcggccgtgggcgccgtacgggatacggcggtgctgagcagcctggtggcggggtatccgcggcgccagctccggaaacttcaacctttgggcctgcacgatcccttccactatttcaactccggcgtgctggttctggacctggaccgaatgagggaggaggatgcggaagtccgcctgctccacgtcattgaagaacacaatgagctcctggaacatccggaccaggacgcgctgaatatcgtcttccaccggcagatttttccgctgcctgttgaatggaactaccatttccaatttgaactggggaaaaacggactggaagaggcctgcgcaagcacggaattcgccggggtttccaacattcacgccacatgctcctggaagcttttccacatgatcggctccaaaaagccctggctgttcccggaaaaatcagaggaatacatcgtgtctgcggccgtctggtggaagccggccatggaaacggcctcccttcggccccatctgtcccaattgctggaggaattcacgcaatggacgcgacggcaattgcgccacaatcaatggcacctgccgttctccttcgggaacggcttccggaaacgcaaggctagaatcaacctgctgaaacgcctgctgcgcgtctttgaaggcgtatagccccgccggcggcaacaggcgttcgagaagagccgcagtctccaatcactccggcagtttgatgatttcccccgttttaggttcccggtctttcagagccggattcaggcggataatttccccggcgcgctttccgtccttcaaccggctttcagcgatggacgcccgggtttccccggccttcacctggtaatcccgcgctccttctgccgggcacgcctgtacgtacgccattttccccacattcaccacctggtcccggccattcaggcggaataccagcgttttccgcttttcctgcggacggccgtaatccgtgtacacttccgcgtacagggtaacgggagccagcattttctgcgaccgggtgccgtaataatgcgtctggaccagatagggaccgggaagagccttgcgcaccaggtattcttccggcccgtagccctgcgtcacgtcacgggacaaatggccgccatgagtggtcagccgatgggagtaatagcatttttctccggtgatgtccgtgacccaaaggtccatgtcagacgcatccgtgtcccagttgatgaccacgcgcaaatcagcctccaccggctggagaaaggcagggtccagccccccggtatccagcttcactcccgccgccctgctccgggaaacaagccggttcagttccaccagcacaatctgctccacgccggtgaagcggcgcggcatcgggcgttccagcacctcccggtacatgtcgaacgccttttgggcttcccccagttcatccagcaccagcgccagatcccggtaggactggggttcttccggaaacagcgtttttacggtttcaaaaatgaacctggcttgccggagttctcccatgtaacgcagcttgtagcccagcatgcgcagcagggaacggttttccagttccagctccgccaggttggacagaatctggacagccagcgccttgtcccccttcccggcaaaccagtcagagcagtccatgtaaaaaccggggctgtccccatacttttccttgagtttcatatagaccgcaaaaggccggtcagccgcatccagagccgccagatacggagccttggagtcccacgccttcacgttcatgacgggggaagaaccggcatcccgttcccgcgcctttagtccatttaatgtttctccccctcccaggaacagggaccctaccacctcttgattttccggagcggaattctcgttccccagcagatccggggaggcggagtccggagaactaccggcttctgcattaaaacttccggacgccctgatgacagcaccggaatctccggatatattgttaccttgaactataacaggcgccggagcggattcccccgaattttcatcctccggagaggatccggccggacgctcccagagagaatccacttccgccagcatggcgcttcttctttcatcataagcggcggagtaataggcagtttttctgcgggccacagtctccgcaccccttcttgccgaaacattttccggagccttttccaatatcctgttaaacagggaaagggccttatcgtaatccccaaggtcataaaagccgtaggccaggcggaggcttcccgctatgtccgcaggctccctgtccagttccctgttcaagtttgctcttgcctcagccagctccctgtcacggacagcgttttccccagcggctttttcagcctgtgcttctttttcccggaggcgcctttccatgaccgtgacgcccttcaaggccgtccggttattacgctcatcctttaatactttcaggtagatttccagcgcctcccggtcattgccccggcacgtatgaatcaaggcctgtttcaaccggtcatctttcaagacgctttccatctcttccggattgaaaaattcctttgcgtaccatttctgcatttctttccaggaagcaaggcacgctttcaagcggtttaatcttgcggtctcttcagccatgtcctccttccattcgcgtttcagcatcctcttgtcatattccgcccgcaattctgaagcggaagcgggaggacgcacaccatatttcaggtattgctccagggagtccagcaccagcagagaggtaccgggcgtcacgattccatattccattcccaggttcccgatagcttcatccgtcacggcagagggtggacggcagagaagttcctggagccttgcctgggcatacaaggccctcagcatggttccgggcgtccccccggaggcatccgccgccacgggaatttccactccggcaacctccaccgtcccgcggtaggaacccggctccagttccgccagcaaaaggacggaatccgatggcattccaggaatttcataccttgaaaacgtcctccagggcatatttcccctgtcaataatgtaacggatggaaatttcccccctgacgaggcgctccatcgcctgctccgccgtttgactggccaggtcaatcacaggaatgcccatccggatgaacgtattcgcatccttgcgcggtgtcaccatcagggcgaaggttttagcggagctagtcccccgcttttccggcacagggctgaaattgataaatccatcactgacaaccaggcagtccgacgccccggaacaagcgctcagcttttcccgaacagcgctccagtcacacgtggccccgtcatagtccagagccagcagttcgcgggccagctcgtccagattgtccggagcgacctcgaacgtttttgaaggcatgatccggtcccggaagacagtcaggttgatgcgggtttgccgcccctgcgttctgccgcaagcaagatatcgtttcagaaaatccaggaatttccggacatccgctcctttcatggaaccggaagcgtcccaaagcagctctatcgtgggcgcagcttccacgccgctctttccgtccgtccgctcaggccggggaataatcacggcggcatagtccctgccgtcaaaggactccacaaataccttcgctctccccgcatcttttccctgcgcacgcggcagggagatgaacaggtcttccgtcagggacagacccttccattccttttccgccaggaaggcgctgcgccaatccttgaattccacgttgtccagcggggaggaaacgacaacgggcttccggccggcgaacacttccaccctcagcttgagggaatccagtttctccttgaaattcatcggaagctgcagggacggcgctcctgcggcatccacgggaagaaccgtggaatagcgcagccgcacagtgcgggttcctcccgcaggaatgggatatacgcgcgtcttgaacatgttgccgccggaccattccaccagtccgggatcaacctgtttgcgtacctcttcttcaaacgccacgcgcgccttttgcctgggtaccggcacgccatccaccatgcggccgttgatgtccagcgcatacccctgtacgatggctccagccgggagagggtacaccaattccccttccatcacacgcgtgttggggttgtgaaaaaccagcgtcacttccgtttccgccaggaaatccatcacgcgagacttgatttccgcccgggaaatggaaacggggctctcatccgcgcggcattccactttcatggaaggaggagggagaacaacggaacgcaaggaagccgtctgggccagagaaacgcagcaggcaagaatgcacaggcagagagaatatgtaaatttcatcattctagggggggttggggagagatgggaaaaggcgggctttcccatctccctcccttcctaccacaaggcacagtccagggcaaactatttgttgtaaacggctcccgcatgattgcccgcacaagggccaatcccccgggaggaaaggaatctgcccttccccgttcaaaagtggaacctgacggcggcaaaccaggtccatccgctgaagcacttggcgccttccggcgctccgctggtcgtcgtatattccccccctgccatcaatttcagcatgtccgggtcttccgggaaaaaataataattcaggccgaagtaaaaggagttcatcgtgctgacccatttgggataggtggtcaccgcgggaacatagcgggcgtacattttcacggcgtcccgcccatgggagagctggtagcggaacacgccttccagatgcggggaaaacctgtaggaaggcaataccgccaggccgtaaacattctctcccagagaggtccccaccacgcggaagccggacatgagttccgtcaccatggaaaatttcccccgggacatgacccagtccaccgccgccacatcccgggcgccaagcccggagtaataggaatcctccggcagggagcgtcccgcgtaatgggtgaagttgtgggcatacgtcagccagacgcggcttttctcccccggcagaaagccgcgggcgtccagatggacggaggccttggcaaaggcattgtccgccgtattaaacctgatttcatgcgccaggctgtcgctggtgtcgttcaggaagacggaagcctcccaccccacgggcacgtcctgccgcgggttttccagcacaacgccccaactggagatggtcccgagctggttgaccaggtcggaccgttccagggtcttgagttcactggccgtctcccggaattccgccgtcatcttggaggtgattttcccgacgcgcgcaaagaaggagggattgaccttgtatttcaggtagagttcaaagatgctccagtccgtcttcgtccttctccagcggccatcctccaccttgtacatgccgtccagctcccccatgttggtcaaactgtgcagcgtcaggcggtttttgaagaaaacggcttcaaaccctatctggagcctccgccattcgttttccctgccatgagagcccttgcggaaccggttggctccggaaggggagacctgagccccctggtactgccccgtcagcagcagcttgaactggttcaggaactccgcgtccttgttgtcatagagatagggcatcttcttcagacgggagtacaggccatcctccgccggatgggaaggagcccttacggaggctccggggcccgcaggcccggacgcctgccatgccgaaccttccgcccatacagagccgtaccccccagccagcgcgatcaggaaaaaacagcatacgcgggcaaacatgtctcatgaaaagacatgttccggacccctacgtgttgaaggtatgccggaggatgccacgcatgcggcccaatgctccggaccggattaatgcggcgtgtggggctccagcatctgctggcgttcccgttccttgtccttggccaggcggcgggcctccttggtcaggtattgctggaggcggaacgctttctggccctttttgcgcacgatgtgctcggaagtgccgtcaggcaaaatattgcaggcctgcacgttgtccctgaaacaggcgtccaggatggatttgaggcggcgcgccagcttcccgttggtgacgggcaccatgagctccaccctcttgtccagattgcgggtcatccagtccgcgctggcgatgaagagctggtggttgccgccgtggtggaagaagaagatgcgcgcgtgctccagatagcggtccacaatgctgaccacgcggatcaccttgccgttgggccgggggcccgttttcaggcagcagatgccgcgcacgttcagttcaatgtccaccccggcgtccgcggccctgtacagggcgtcaatgatttccacatcctgaaggctgttcatcttggcggagatgcgggccggttccccctgccgcgcgcgctccgcctccccttcaatgagttcaatgaggcgcgccttcatcagcaccggggaggggtacagcttgcggaagcgcatgagcttggtgcgtcccgttacggagttgaagaactgggaagcgtccgcccccagctggtcgtcacaggtaaggtaggagatgtccgtataaatcttggcggtggtttcattgtaattccccgtgccgaagtggcagtaacgccgcagcatgccctgttctcggcgcaccaccaggcatatcttggcatgggttttaagccccttgacgccgtagactacctgcacgccggaacgctgcagttcctccgccttttccaggttgcgggcttcgtcaaaccgggctttcagttccaccagcgccgtcacctgcttgccgctttccgccgcctttttcaaggcggctacgatacgggagtttttggcggtccggtacaggacctgcttgatggcgatgacgtccgggtcttccgcggcttcctccaccagacgcaggacgggttcaaagctctcatagggatggttgagcaggatgtccccgttggcgatgttttcaaagatgctgacggcagggtccacagagggtgacggctgcggggaccattgctccactttcaattggtcattgccgggggcaaaggccatttccatgaagtcggaaagcatcagggggcccttgaggtcatacgtttcctccttccccgcgccgacgatctgcatgatcctgtcatgcagggggacgggagcggaggattctatttccagcctcacgcattcggagaatttgcgggccacaagcacttcctccatttcatccgccaggtccagggcatcctcctcctgcacggcaatgtccccattgcgcgtgacgcggaataccgcggcggagagaacggtttcaccgggaaaaacggtgccgatgcattcccggaccaagtcctccagcatcacgtagcgttccgtttccgcggaagggacgggcacgcgccgcggcaggccgtccggcagggccaccacgctggcgcggacctccccggtttcattgtcccgcagttccacgcccatgagcagcttgagggacggcagcgcgggagcctccggcgcatccatgtccagcggcgtcagcagcgggaatatctggttgttgaagtattgctccagcgtcagcttctgggaagtgctgaggtcctccatggccagcggattgatgccgttgatttccatccacggcaggatttcttcatgaaacaggcggtactggtcctcaatcatgcggcccacgcgggtgcggatgtccttgagctggcgggttggggtcagcccggaaatgtccttcacgcgggagccggaatgccgcagcatctggaggccgcccacgcgcaccatgaagaactcgtccaggttggaggcggtaatagccaggaacttcaggcgttccagcaggggaaggtccgttctcacggcttggtccagcacgcgctggttgaattccagccaggagagctctctgttgatgtattcgttagacatggagaaaataagggatggaagtttcttgaatcggcctaccgctggggcaccagtacgacgtcataaccgaagatgtccgcaaacaggtcgcccttcagccgcagcgccaggtcttccacggcggtttcacgcacgccctggagctccagctccagcatccggccccggatgcgcgcccggacgccgttcacgcgctgggcatggccgcgttccagggcgtccgccacgcgcaggatggcagccatcttggctacgcgcatgcggtccgtcagctccagctccccgtacatggggtcggaattggcgggcacctcatgccggtggtagcgggccagcagggcgatcgtttccacgtcgtcccgggaaaggccgaagatttcactgttcaggatgatgtactgggaatggagctggtggtcctgctggctgatgaaagaccccacctcatgcaggatggaggccacctccagcagcagccggtcgtgctcggaaaggcggtgcaggtcctggagctggtcaaacatttccatgcacaggcgcgccacatgctcgcggtgccccttgtccgccttgtacctgtccgccagaatcccggcgaagtggagcacctccgcctccaggtcccccggatgctgttccgcccggatcaggctgcttgagaattcctcgtcatagccgcttccggggatgatcacgtcattcaggttcaggctgcgggcaatcatctccgtcatcagcacggcgggcagaagggaatccaccccggcaaagtccgccccgtaaacgttcatgcgctgctccagggtggtgcgggacatccgttccgcttccgccaccagggcggaacacgccaccttgccttccggcgtggggtccaggcggtcacggagctgctgcatctcctggccgatgacgatgagcccagcgaggcccttgacgccgccgtaatccaggtaaatctggtccacctgcccgcgcatgtgctcccgcagcagggaaagttccgccacatcgtccccgtattctatttctccgacggcctcgcccgtgcggtgcgtccccagccggtagcaggaatagcgcacgatgcgccccttttggaacaggagcacgcgggtattgcccggccccgtatggaccacgagcacctttttcttgctgaatcccgggtattgcgccagcgtttcctgcaccttcacgtaaatgaggcgcgtcatcttgccgtcgtcaatccggcgtccccgcaggccgtgggccacgtgcatgcggttgacgaacacgtccacattgtccgcctcggaaatgatgttggagatcatgagccggacggaaagcctgctgccggttccgtattccttgagaatttccagatagtctccgatgatttgcacgcagcggtccatggtatgccgggaaatgcggtggaaacggaagatgtcccgcgccatgggcacgggctgctggaggaagtccagcaggcgaatcctgtcctgaaccacctcagccaccatcaggctcatggagctcggccccaggtagatcaccgcctgcgttgataattccgaatcctgaacttgctcgccttgaatcattgccataccatgtattgtttcccagccgtggagcaagaatggcggcgtgacaaaagcgccatccccgcccgttccagcaaggggcagaataaggaatttgccttttgacggcaagagataagcgcggctccttttccggtccggaggaacggccctgcagggcggctatttcccgtaggctcccagcaggggaaccaggcgcggggcaaaccttttcatgcagaagaagagccccgccagcacggcgaagatgaccggaaccaggcagagccacaggacgtcccaggcctcccccttccacgtaatccagccgctttcacgcagcaggatgatgacgatgtagtgcgtgccgaagatgaagaagcacgccggggccagccccgccacccatctggccgcgcgcggaaaccactccgtgaacaggatggccagggacatcagccccagcattcccagcgcaataagcatggagttgtgctggtcccggtggctcaccagccaccaggtgagcgcgagcgtggcaagcaggaacggcaccgcataccgtcgcacggattccgtcaggaacggaagggagtaacgggatacgtacatccccaccaggaaaaagcccaggctgttggcgataggatagtcatgatccgccaggtccagcgcaaagtagttcagggagagcatgatgattcccacccagagcatgtagttccccatgcggtgcaggaggggcgctacagcggtataaatgatgatgtcgcgcagaaaccacatgggggcgtccaccgggtgcccggcaatgcccaggcagcggccgaacgccgcgagggcggaccagaagccgctgcccgcctcccccttcagccatgcatacatgggctggtaggagacgtagtattcatgaaggggggaccagccgatcagaacggccgccgccagcccccacaccaggtacgggcggagaagaaaccagctccgcttccacaggaaaaagctccccccgtccagcggaccgaacgaaccgcgccccacaaagtaacccgccgccagcaggaaaaagggagtgcgcgccgccagaaattccgcccatatccaccggtagagctccgccgaatagaaggccatgtggtttgcaataatcaggatgcaggcaatcacacgggccacatccacccacaccatccggtgcgtggccgtcctctccagaattacgggagcgggaatctgggcgtccggcggcgtcattcccttgcggggctggagttacaaaggggcgatgccgagctgctccggcaacgcgatgcggggacgctccgtcacaatcaggggagccccgtccgtcacgatgaccgtgtgttcaaagtgggcggatggcttgccgtccgccgtgacgaccgtccagccgtcatccagaatcttgacggaaggcctgccggcgttcaccatcggttcgatagccagcgccatgccctttttcaggcgcggaagcttgtaatgggggcggtagttgggaacctggggctcttcatgcagatggcggcctatgccatggcctacaaagtccctgaccacggtgtacccgcggggacgcacaaagccctccacagccgcgcagacgtccgccagcagcgcgccgggcctcaccagttcaatggcacggaacagggattcctccgtcacggccagcaggcgcaacttttccgggtccaccatgcccacgggcacggtcatggcgttgtctccatgccagccgtccacaatggcgcccacgtccaggctgacaatgtccccgttctggatgcggcgcggaccgccgctgccgtgcaccacttcctcattgatggaaatgcagagctggccggggaacccgcggtactggtagaaggagttgcctaccttgtgcttcttgaagatttcacgcgcgatgtcgtctatttcccgcgtggtgcggcccgcctggacctcggctccgatctccatcaagatttccgccgttacagctccggccttttgcatcttggcaacctcgccaggagacttgatgtggattcgttctgccatggaattcgtctttctattgccggtattcttccagcttgcgggccaggtcgcgggaaacctcggcaggttcccgttcctcggttaccgtcattttaaccaccaggccgcgggcttcgtagtacctggctacgggcagcgtcatggcttcaaagtctttccagcggcgggcgaaggcctccatgttgtcatccttgcgggagaccattttgcctccgcatttggagcattcctcttccgacgtctgcaccacatggccgcacgtggagcattcccggcggtgcatgatgcgctgttcaatgagttcccgggctacgtccatccagacgaccacgtccacggaggttccgcgctgggtcaggaaatggtccagggcttccgcctgcgcaaccgtgcggggatagccgtccagcagccatgcgtcattgtccatttccgaaagccagccgcgcaccatgtcgttgacgatctcgtccggaaccagcatggccttgtccatatagcccagggctttccgtcccagctccgtgcaggattccacttcccgccgcagcagggagccggtgctcagggagttcaggttgaaagtatcagccagaaaccggccctgggttcctttgccggatgcgggaggcccaaccaggatgaaatgcttgagatccttcatgtctttactttcggaagagggaatggcgttccttactgcatggcattgtaggcgatggcaccagccagcaccagcagggcgatgacgacccacatgacggtgaccgtgcggctgcctgcggcggctccggtaccctggatgtgaccgtatttgcccttgagcttgccttttttcaggaagccatcgtagttgcgggagagaagagtggtttccacctggcgcatcatgtcaagcagcacgccgaccagaatcagaaggctggtgcccccgaagaattgggtgaccaggtaggggatgctgcccccgatgttcagcagggaaggcaggaagtagatgagggtcaggaatgcggaaccggcaaaggtcagcctctgcatggtctggtccaggaaaagggcggtgggaggtccggggcggatgccggggatgtagccgccgttgcgcttcaggtcttccgcgatctgggagggctggaacatggtagccacccagaagtaggagaagaagaagatcatgaggccggaaatgatgtagtagccggaggaagcggggttcatccagtcattcatcttggtggcgatccactgcagcgtggtgttgtagtgggcgatctgggagaagagcacctgcggaagggacaggatggccgtggcgaagatgacgggcatcacgccggagtagttgagcttgagcggcaggtactgagtggcgccgttgaacattttattgcccatgacccgtttggcgtattgcacgggtatgcgccgctgggcctgcgttaccgtgacgacgagcgccaccacgataatcaggaaggcgatcagggccacgagcagcatggcgcccatcgggacaaccgcgccgtccttgtacaccagcgttttccaggccagggtcaccgcgcccggaagggcatggataatgttgacggaaataatgagggagacgccgttgccgacgccgcgctccgtaatctggtcgcctatccacatcaggaacatggtgcccgccaccatgatgagcaccgtcatcagggcaaactgcatgcctgggtcaatgacgagctggcagtccggagggatgttgaggcccacggctttcaaacggtccggatgttccaatgtaccgaccaggaaccagccctgcacaatggcgatgacgatggcaatggcgcgcgtccatttggtcatcttctggcggcctccctcttcccgcaccatcttggcccactggggaaccaccgcggaaaggagctgggtcatgatggaagcggagatgtagggcatgatgcccagcgcaaaaatgccgcactgctgcaggccgccgccggaaaagatggtcagcacggtagccaggcccgcgccggggccgctggcattcgcggaggcttcaatcactttctgcagctccatgacgtcaatgcccggcaggggtatctgtacccccaggcggacgacgacgatcatcgccagtgtgaacaaaatccggtgcctgagctccggtactttcatggagtttgcaaatgcggatatcatggtcctgtaatatagaagttgtcgcgcagcttggcttgcatgtcacggcggcttgtacccggggcatccatggggaccgcaacagtaaacacaatgatgcgaaccgggtcaagctgcatgacccggttcgccaaatgtgattaggcttcgctgagcacggtgacggtgccaccggcctgagtcaccttttcgcgggcgctggcgctcacgaagtccacgactacgttcaggcttttggtcagggtgccgttgccgagaagtttcacggcgtcacagggaccttgaacgagcttggctgcacgcagggtgttttcatcaaccgtagcgccggcttcaaacacgcgttcgagctgggagaggttgacgatgaggattttgtcctggaagcgggtgttgttgaaccccttcttgggcagacggcggtgaaggggcatctggccgccttcaaatcccgggcggatggagccgccggaacgggccttctggcccttgttgcctttgccgcaggtcttgccgagaccggagctttccccgttgccgaggcgcttcctgcggtgcttggctcccggattgggcttaatcgtatgaagctgtaacatgttatttacaatggttggatttcgtggaggcggcggcacggggcggccgcctcctggtcagattagatggccttttccttcttcttgccgcggtcggcaagaacctggtcgctcgtgcgcagggaagcgagagcctgcagggtagccttcaccacgttggcatggttggaggaaccgagggatttggcaacgatgtcacgcacgccggctgcttccagcacggcacggatggtgttgccggcaatgaggccggtaccgggggaggcgggcttcaggagcaccttgccgccgccgaattcggagtagacttcatgcggaatcgtgccgttggcgatggagaccgggcgaagctggcgcttggcggcttccgtagccttgcggatggcgtctgccacttcattggccttgccgaagccgaagcctacgcggccttccatgtcgccgctcacgacgagggcggagaaggagaagcggcggccgcccttgacgaccttggcgcaacggttgatgaacacaaccttttcagcgagctgggggccttcttccacgggagcttcagcctgggggccacggcgtccgtcacggcggggaccacggggtccgcggccattctggccgtcacggcggggtccgcggggaccgcggaagtcgcggccgccctgtgcgggttgctgcgcttgagcgggagcggcggcttccgtagcaggagcagtgttttccgtttcgttattcatttagggaatctttcaattagaatttcaaaccagtttcgcgggcggcatcggccagggccttcaccttgccgcagaacttgaagccaccgcggtcgaagacgacttcagtgacattggcggccttcgcacgttcaccaatcaggttgcctaccttggtggcagaggcgcggttggcgagcttggaaggatcggcgatggaggcatcggccgtggaagcggagcagatggtcttgcccaccgtgtcgtcgatgatctgggcatagacgtgacggttggagaaatagacagccaggcgggggcgggaagccgttccggagagctttctgcggatgcggcggcgaaccttggagcggatggctttgcgattgatagtactcatcgtgtataaatatgttgtaatagttattacctgaattacttaccgacgctcttgccttccttgcggcggataacttcaccggcgaagcgcacgcccttgcccttgtagggttccgggggatagtacgcacggacttcagcggcaaactggcctacgacctgcttgtcgatgccttcgaccgtcactttcgtgttttcggtcacggtcaccttgaggccttcgggaattacctggttgatcggatgggacttgcccaggttcagatccaggatgttgcccttcacggcggcgcggaaaccgacgccgacgatttcaaggtttttgacgaagccttcggaaacgccgatgaccatgttgttcaacagggaacggttcgtgccgtgcagggcgcgaagctggcggctttcgccagcgcggtcaacggaaagctgattgccttcaacggaggcggtgatgccttccggaagcgtccaggaaagcttgcctttggggccttccacctgaacggaagagccgttaacctttaccgttaccttgtccggcaatgtgatggattttttaccaactcgggacatatgtttaggaaatgttaatggttaccatacaagggcgagaagttcgccgccgatgctctgcttgcgcgcctgcgcaccggtcatcacaccacgggaggtggagacgatggcaatgccaagcccactgagaacgcggggaatgtcctcggaagaaacgtactggcggcggcccggcttggagctgcgcttcacgtcggtgacgaccggcttgccctggggggtaaatttggtcttcaccttgatttgcttcttggttccttcaccggtcacttcatagttccagatgtagccttcttcctgcagaatccgggcgatttccaccttgatgttggagcagggagcggtaaattcctcgttgccggccaggctggcgtttttcaggcgggtgaggaagtcggaaatggggtcacttaatacggccatggtaagaaatagttaggcgttagcggtttgagtttcttcggccttcttcggttcacgcatgggaacgcccagaccacgaagcaggtcgcggccttcatcgtccgtaggagcggaagtcacgaaaatgatgtcgaagccgatctgacgcttgatctggtcaagttcgatttcggggaagatggactggtcggagataccgatggcatagttcccgttgccgtcaaaggacttgtagggaaggccgcggaagtcgcggatgttcggagccgtcacgttgatgaagcggtccaggaatccccacatgcgggtgccgcgcagcgttacgcgggctcccagaggttcgccttcacgcaccttgaagttagccacgctcttgcgggcgaaggtgacggacggcttttgtccggtaattttagcgatttcattgacggcatcttccacggcctgtttgcggtccgggtgcttgcccatgcaggaggtgacaacgatcttctccaggcggggaatctgatgcacgttcttgtatgcatgcttcgcttgaaggccgggaacgaccttttcacggtagtatgtttgcagtgttggtgtactcattgttttagcgggtcagctctttattaatgatttatgtggcttaagcgcagggtcaggccggaggcctagcctacttttttcacgttggaaatgtgaatcgggccgttaatctcctgaatgccgccttccgggttctgttccgtcgggcgcacagcctttttcagggtgcggacgccttctacgatgacagtacctttggaagcattcacggcgagaacggtgccgcgcttgcccttgtggttacgtccggcgatgatttctacttcatcaccttttttcacgtgggtcttcatatatgactatttcttacgcgtttatgcgatcaagatctaccacccccttggtggtagggcaggaagagtattataggataggccttttcgtcaagcccgcatcctaaaaaaatcgttttaccgcccctgcgccaatgcggaacgatcaatggagaagcgccccggcctgcaaaagacgccgggcccggtttccaaaccgccggaacggttttattcatcatccgtaggaatctccgctccctgccagcgcagcttggccctcaagagtgcgccgaagttctgtttgcggagatgaaccagggagagggtttccggagctttccggatcacgaggctttctcccacttcaatgggataggcggaacggccgtccagggaataaaccatggaatcaaagcggccgcggcgctcgcggggccgcaggcgtatggtcatggtgtccggaagcaccacggaacggttggtcaggctgtgcgggcagatgggggtgacgcacaccacgcgggacatgggccataccagcggccctccggcggaaagggagtacgccgtggagccggtgggggtggagaccagaacgccgtccgcatggtagcggttcagcagttctccatctatctcggcatccaggtccaccatcttgccggactgggcgcggatgagggagacttcattcagcgccagcttgcggggagggactgcgataccgtccacgcccatccggaccacctccagcatggagcgctcgtccgtcaggaaagaaccctcctggagcgcgtacgccagcagcggcagctcctgtacggaacaggtggtcatgaatcccaggcgccccaggttcacgcccgccaggggcacgtggtgcgcagccgccagagaggagacggtcagcatggtgccgtccccgccgaaggttaccagcatgctgcaccggacgatggcctgttccagggcatccggcgtctcaatgacgcaggaccccagcccgtggcgggaaagctcgcggcgcatgatgcgcagcgcttcccccagtcccggtttttccgccaacgcgaccaggccgattaccttggaaggattcatgcgggcaagcatactgcattttcccgcgccgctcaactggtaaaccacggcagggggaaagattccttccgggcatccctatccattaaatttcaattcctgtttcttttttgttatacaagattataaacatgtgttaaagataaaaagcgtgaattggtccctccccgtcctgctgctttttctgatgccgggctgctccactacggagaagtgcggccagaaaacggccccggccgtacaggcgacagaggcgcatgtaaaaaacgcgccctaccgggtgagggggaaaagatatactcccatgagcgtcgcagacgccctgcaatacagtgaaaccggctatgcctcctggtatggcgggaaaggacgcagcatgaagacatcctccggagagtacatcaatccccagcggtccatgacggcggcccacaaaaccctgccgatgccgtgcaaggtgaaagtcacctgcctggcaacgggcaaatcagccgtcgtcaggatcaacaaccgaggcccctttcacagcaaccgcctgatagacctgaccgcgtccgccgcaagccgcatcggcctgcacagccgcggcgtatccaaggtccgtctggaagtcatttcagtgggtgacggcccgtacgaggttttcgcccgttaatcccttttatcatttcccgtatctctactttctccatccatgattccgccccgcattctccttgccggcctggcatgcctgtgcccgttcaccctggctcagaagctcaaatcggatccccacaaaacgctgatcatcatttccaccagcgatatgcacggcaatctggaaaaattccccaaactggccacgctggtaaaacagtaccgcgccaagtacccgcacgtgctgctggtggattccggagattatttcatgggcaacccctatgtggacgactgggaaaaacggggcgaacccctgactgtcctgatgaacaagcttaagtacgacatcgtgaccatcgggaaccatgacctggattacgggcaggaagccctgcgggaccacattaaggggatgcccggcaccaagtttgtcgttaccaacgtcaatccctcccccacgctggaaaattgtttttccccgtatgccagcatccccatcaagggcacgccgatttccatagggttcatcggcctggtggacctgcagaccacggacgtccgcaggatgagcggcatttcatggaaactgccggatgaagaggattacaagggcatcacggacaggttccgcctgcaccataacaccatcaatgtcatcctcagccacctgggatacgaccacgatctgaaaatgatgaagtattctccgaatatcgacgtcattctgggtggccatactcatgtgatgcttccgcacggccatctcagaaccggaacgctgctcagccacacaggccacagactgagccatgcaggcgttacggaaatcaccttctccacggaaaaacccgcctccatcctttccaagtccacgaaggccgtttccctggacgaaaggattcccagcgacccggaagtagagaagattgtccagcagttcaccggaaacccgttcttcaaccagcaggtgggcgtcgccggggaggatatcacgcacgtcaccgtaggcacctttttctgcaaagccatccagcaggcctcccattcggacattgccatttacaaccgcggcggcgtacgggccagaagccatctctgcaagggccccatcaagatcaaggatatttatgaaatggagcccttccgggaaaaggtcgtcacctgctccatgagcaaggcggacattgaacaactgattctgtccaaattcatgtccccgtccgatgacgaaggaggcattctggaagtttactgctccggcttctcctaccagattatggacggcgttacgccaagcatcaccagcaccttgaaaaacggcgtcatttacactgtcgcgatgggcgactacctgtgcaacaatttcaaattccctcaaaagggaaacggcaaaccgacgggaataagcgtccgttcagccctgatcgaatatctgaaacaaatcaaggagcttttcaatccgccgccgcccaaactgcccatcatcaaagatacgacgttcgccctgtaagcggcacgggaaccgcatgccgcagggcggcgggatggattgaacaagctgggcggccatgctacattccttccagccatgcagccggaatcccatcacgcagcgccggaagaggaacggaacttcagcggtttccgcatccttccatccggagcgccggtgacggacacgccccccttcgaccgcctgtttgaagagggggccggaaacggattatatgccctcgcggtctccaactgggaaaccgcgcctgacccgggcgccttttttatcaagaacatggcgcgccaggcgctcacccgcatggcgcacgccgccgcggaaaggccggatgaggtggacaccgtcctggaccacctgctggcctccacggcggaaagagcggccctggcggaacagttccctcccgtgccgggggcggaatacgtcactccaggcgtcatcgccggatggcttgaggatttccggaggctggtgaaaaaggaagtcggcacccgcggcatcactcccgccgcgtggctgaacgggctgggtgccccctggaaccagattgggaaggtattcttccaccttgcggaaaaccgggatgacgccacgggctcccggccctttgccttcatggctacctttgcgcatcaaagcgcggcggacaaccaggtgcgccaccttcccctttccaccgccctgaaactccatgaagggaactacactgccctgctggccgtgctccagcccttgaaggaagcggcacgggaaagctccctgctgcagcgactgctggacaatggaaagatttacgccccgctggcctggagcgctgcggaagcccgggactttttacaggacacgccggcctatgaacatgcaggcatcatcgtgcgcatggtgaacctgtggagaaaatcccctcccaaattacaggtaaaagtcacggcggacgctcccggcagtgaaaaaacggctcattcctccgggctttccgtccacagcctgctgcggttttccgtagccgccacgctgggaggcagggacctggccccggaggaactggaggaactgctcagcaatggagacggcctgatacgcttcaagggggaatgggtgcgcgtggacgctcaaaaagtccgggacctgatggaccggtggaccaaggcggcgcgcatgatgagttctctaggcattcccctggttcaggggctgaggctgctggtcaacggcccttccgaccagcttgcgcagctcccggaaccggatgaagactgcgtggtggaaccgggccgggatctccggcaggccctggatatcctggcgggggaggttcccgtctccgtgccggagcttgcgccccggttgaacgcactgatgcgcccttaccagaaagagggcttttccttcctgtaccgggttacggaacggggcttcggcgcctgcctggcggacgacatggggctggggaaaacccttcaggccatcgcatggctggatgcgctgcggagggaaggccggctggaaggcctcccggccctgatcgtggccccggcgtccctcctgtccaactggaaggaggaagcggaacgcttcgcgccggagctcgtcctgcgcatcatgcacccctccgccccggattcatggcagccggaggaaatcccgcgccgggaaggctgccacgccgtcattactacctacggcatggccgcgcgcacgcctgcgctggccgggctgcatttcccggccatcattctggatgaagcccaggccattaaaaacgcaggttccgcacgttcccgcgccatccgctccctgcacggggagaggcgcgccgccctgtccggcacgccggtggaaaacaacctgaatgaattatggagcctgatggaattcctgaatccgggcctgcttggcggcagaaaaagctttgaagccttcacccgctccctggaacgaggctatgccccgctgcgccgcctggtgcgccctttcatcctgcgcaggatgaagacggatccagccctggtccccgacctgccggacaagacggaaatacccgcctactgccccctcacgccggaacaggccgccctgtaccagacgcagatagatacgctgcacgccatgctggacgaaccggacccggccgcccgcctcatgctgatcctgcccgtcctggcgcgcctcaagcaaatctgcaaccatccggcgcagttccagggcacggacgactacgccccggaacgctccggaaagttcctgcgtcttcaggaattgtgcgcctccatcgccgcccggcaggaaaaagccatcctcttcacgcagttccgttccatcattccccatctgcacgacttgctttccggggtcttcggccgttccgggcttaccctgcacggaggcacgcccattccggaacgccagggcatcgtcaccgccttccagaaggaatccgggcctcccttctgcatcctgtccctgaaggccgccgggaccggactgactctgacccaggcctcccacgtcatccatgtggaccgctggtggaaccccgccgtggagaaccaggcgacggaccgggcctaccgcatcggccagcaccggaacgtgctggtgcaccgcctgatctgccgcggcaccattgaggaccgcattgacgccatgctgacggaaaagcgccgcatggcggacgacctgttctccggcggcccggaacagtggctcatgaacatgagcgcagaagaacttaaggacgttctttgcaagagctgaaccaatttcatctcctgaaggaacggttgatgaaaatcaattcaacggggagatgagaaaggaaacagaaaaatgcattaacacgcattttttcctctctgatgagggaaagtcagaaaatccggttttcttgatgagacctgtttttggcatctggccgcccatgccggagaatttgccggaaatcataaaaacaggggcgtacaccatcacggcattccacctgtttgcggcagccttggaacaatcccatgacgaaatctttcaccgtgcattccgcgtccattgtgtctcacccatattagccatgcaaagttgcaccggggaaactgattcgcgagcttccaggaatgccttatctaacagtaaagcttataatttatttattatgaattagaaaaatatttttaccacccaattcctttacgatggaataacggcaaaacatctaccgggattatcaattttcattgacaatttatcatttcaatttcataggtgataatatgatgatggttccaaaaatattgtgctgtttttcgcttgttttgggcatcctcgttggagcggcacatgccaaacaagcaaaatgcggctatgagctcataaatatttcagagccgacagcagagctggttgaaccggttaagggaaaatcaatgaaattcaaggttcatgcgactgccatggcaacttacactcacaaggacggctccactgtttcagagatcgtgaatctggatcagggtgccactgttgtcgtggatgtctcggaagacctgccctggaatgagagagcaaaagaaaaggcgattcttcttttacaccaaaaagccctttccagaagaatggaattatgcagagacaacggatgcagcaaataatggcggtaacacaataaccatacatattaacaataacatagggcactgaagatgaaaatattattaaaaataaccattttgaccataggatgcagcgccatgctggccatcaatccatcatttggagcggacgaagcacaagaacaggccgccggggccgtccagtttcctgccggttcctataaaaatcccgccgtgcttgatcttaaaggggtcaaggattacagcatgctggaatcggcgcgagatgaatacctcagaaaacattacgacggctaccgtgttctgggtgaaggattcaccatgattggaggccgctacatccttaccgtcagcttgacgaatgatgaagacgaaaacaaggtaaacaatcttaagctggtctatttcgacatgactgatgcgtataagaaattaggcaaatcaaaagacaggcagacgcgcgagaaaataaaggaattgaagaataatcaccaacccatgagtgaaaaggaactcatggaaaaactggaacgggggacgacggaaaaaaccggaaaataagataaatgccatctggccccggttttcattttaatccctttctatttccatcgtgagggattttttactggaatgactccgcgcgctggcctgttaaatatagagcctgtattttctgataagccgtagttttgttttttcaggaatgcgactcgcaggcatcatttccatgatgcctgcgagtcaaaccctgtacatctgcttttccagcgtcttctgctattttccttctcaggaaaccacggccagcggcgcggtggttttccagtctccgcgggtaaagtccgggaactccacgggcatgccgccctgcgcgatggaatgagccgtcaacggcagcagggaagaccaggcggctccttcgtaaatattctggtccatcggctctccgttccggaggcattccacgatgcgggaaagcatcacgaagtccatgccgccgtggccgcccattttcgtagccagattcccgatgcgtttccagagcggatggtcgtatttctcgtaaatggcggccagcttctcccggccttcaatccattcgtgatagttgccgttgcccagcttttcacccgccacgcgggtcgggaagccggccagggtgccttcggttccctggatcaggttggcgcgggaatagggccggggggacgtttcatccagttggacgacaatagtgcgccccagttgcgtcttgacgatggccgtgttcatgtccccgcagatgaagggggtattgttccagcggtggtccgcgggaatgtgttttttggcgtaggcattgcgcccgagcgcaggggaggcgaacgcagccacccggctgaaatggtcttctccgcgcgccaggttcatgtactgcgccacgggccccagtccatgggtggggtacaggttgccgttgatccgggtatggtattcaggccgccaggccccttccccgcgcgtgtcccccaactgcgtcaccaggcagtggatatatgcggcctccccgtggagcagatcgccgatgaccccctgccggaccatgttcaggaacataagctcgtcccggccgtagttgacgttttccatcatcatgcagtgcttccgggtggcctcgctggtgtccaccagattccagagttcttccagggagacggccagcggaacttccacaaaggcgtgcgcgccgtgcttcatgctgtcgcaggcgattccagcatgggtactccagtccgtgctgatgatgacagcgtccggtttcagctccttcagcatggtcaggtattccgtgtccccgccggaataactcagcgggcttttccccatcttggaaagcacgcggtccacgccgcgcttggccaggtcttccttcaaatcacatacgcccacgatttccaccccgtccatcacgcacatttgagccagatgggaaaagccgcgaccgcccacgccgatgaaggcaagcctgatgcgggccagcccgggggccttgaagccccccatgtacatggagccggaaggccgcggagacgcctgggcgccggatttccagaggctgtccccggcagggatttccagggcctgcccggggagaacgtttccggcggcagccgctccggccgcgagccccagggatttgagaaattgtctgcgtgatgaaaaaatagacatgatttgaaagtatggcttcaaggaagattacgcctcccgtgccgcggatttatcatcattcccgtcccggaggaaaaaagctccggatggctgattttaaggtttgcaaaatccggcggaacttccactatgagataaacttctgcctctaaccaccttcaatttatgcgttaccttcttcttatcctgttgctcgccggcggctattacggctgggattattaccaaaccggcctcgtgcccaggcatgaagccatcaaagccatggagcaggagccttatccggagctggatgcggcccaggcccgttttgacgaggcggcggaacttcacgaacagcaggcggcacgcctccaggcggccatcgagagaaaggaagaggccatccgcaagtattgggatgcccagatggagaagatcgaccaggcaaacgccgggaaaaagtccgtgcccgccgtgaagggaaggcccaatgcccggagcgcggaagcccggatagccaatctcctggaacaatatgaccgccgcgtcgcggacgtggaggagctcaaaggcaagcgggacaccaccaggcagcagttggacaacgcccggaaccggctccaggaacaaatacgccaggtggaaacccggctggacatcaaccgcatccagcgcgcggaggcgtccaatacgaagagcaaggatttcaaggtgacggagagccgggcggacctgctcaagctccagtccagcctgccgcaggagctggaccgcatcacccgcaagggggaagccatgctgagtgaccagacggcggcctacgagaaggccaaaagggagctggccctgttccagaacaaggtggacagacagatcgccagtctccgggacgccatgaactcccccctggcggaagagtatgatgagacggaaatcctttcggaagaccccgagttccgcaccatgatcgccccttacgaccaggccgtcagccatgaggaaacgcttgtcatgcggacggaggcggacgtggaggagcaggccaaggtcctgcacgggctgcagcgcatcagggacgggaaaattgaaggggagcgcagccagctcaggcaggaggaagagattttcttcacggccgccgccgtcatcggcgtggttctgctgatctccattttgctctcctttaccagaaggagatgatgcctttgaaggttgacactgcaccgcaaacctagtttactgtctgggccgccgggaaccccgtggaggcacgactggcaaaccccgccaggaccgagaggtagcaacggtagcttgttcgtgtttgccgcgtccgttcccggcggtattttattgacgccccctcccataccgggattgaacgggagccttcccgtggtagaataccgcccatgaacgtgtccgccgcccttgactggcttttttccacccaattcttcgggatcaagctggggcttgacaataccgggaagctgctggcggcagccgatgcggaccggacggatgccacagtggtccacgtggctggcaccaacgggaaaggctccacctgcgccatgattgaggccctggccagggcacaggggtatgtgaccggcctgttcacctccccccatctggtggagttttccgaacgcatccgcgtgaacgggaatatgattcccccggaggcgctggcggaagaaatcttcttcctgaaacaactggcggaaggctgggaacagccgcccaccttttttgagctggcgcttgccgtcgccctgcgccacttccgcaaaagcggcgtgaacttcatcattctggaaacgggcctgggcggcaggctggacgccaccaacgccgtgcccaaggacatcgccgtgctgacccccatcggcctggaccaccagcagtacctgggagacaccctggaagagatcgccgcggaaaaggcggccatcatctcccccggcaaaccggccgtgaccgccttgcagagcccggaagccatggccgtcattgaacggacggcacgggaccgccgttccccccttacggtcgcccgggcggacggggaaacgccccggccatccctgcccggagcccatcagcgggaaaatgccgccctggcactggaaaccatgaggcagctccacgccctcccctccccttccgcagccgccgctgccctggcaaaggtgcagtggcccggaaggtttgaacgccttgaaaagccaccgctggtgctggacggcgcccataacgaacatgcgacgcgcgtgctcgcggccacatggaaggaggaattccccgggcggaaggcggctctggtttttgccgcatccgcagacaagcacatccgggagatgatccccgttttgcgggaaatcaccggagaatggcacctggttccctgcacttccccccgcatcatgccggcggaagaattggccgtcctgctggccggactggaaaccggccccgtctttatccattccacccttccggacgggctgcatgcggccctggcctccccgcttccggctctggcggcaggctccctgttccttctgggggatttgaaagcgctgctccgccatgcggaaaaacgcagcaccgcccagtaacccctccatcctttttgtttttccccgtgatttccgacgacatgaccctttcctccctccggcccggagacctgcgccccgaattgctggctcccgccggggacatggactgcgcccgcgccgccgtagccaatggcgcagacaccatttattttggcctggaccgtttcaacgcccgcttgcgcgcgaataattttacgctgaattccctgccggaactgatgcgcttcctccacgcgcacggcgtgagggggtacgtgacgatgaacacgctccttttcacctccgagctggcggacgccctcacctacctgggccatttgaatgccgccggcgtggacggcgtgatcgtgcaggatatcgggcttgcccgctgcctgacagagtggggaaggcaggatcccgccatgaagctggagctgcacgcctccacccagatgacgctttcctccccggacggcctggaattcgccgccggtttcctggacttgaagcaggccgtgctggcgcgggaattgagcctggaggaaatcgggcaatgcatacgccatacggatattcccctggaggtgtttgtgcacggggcgctctgcgtggcttactccggccagtgcctcacgtcggaaagcctgggccagcgcagcgccaaccgcggagaatgcgcgcaggcctgccgcctgccctacaccctggtcgtggacggcaaggccgttccgctgggagaaaggcgctatctgctcagcccgcaggatctgtgcgcccttgaccgcattccggacctggtccgcatgggcgtgaagagctacaagatagaggggcggctgaaaagcccggaatacgttgcggcggtaacggcggcctacagaaaggccctggacgccgcctgcgccggaatacccgtggatgaattggtgaccgcacgcgaccgttatgcactgcaaatggtattttcacgcggcttttccaccggctggctggacggcacggaccacccgcgcctgacccacggccgccacggcaagaagcgcggcgcctatgcaggcgccattgtggacagcggccagggctggctggacatcagaccggaaggggacgttccgctcgctcccggcgacggcttcgtcattgacgccggggaggaccgcaatgaagaacagggcggccgcatctggaaagtgcagagaaaccgccttttcttccacggaaaagcctccggcattgactggagcaaggtcaggccggggcagaagctctggaaaacggatgatccggccctgaacgccgagctgaaaaaaatgcgggagcacctgccggaggccgtccttcccctccatttggcatgcaccggatccgccggggagcctctgacggtttcctgcccggaatacgggtgttccgtgcagtccgcacagcccctgcaaacggcggaaaaacgcccgctgactcctgaagttctggaacagcagctcggcaggctgggaggaacggggttccgcctggcttcctgcgaatgccgcctgccggagggcctgatgctcccgctcagcatcctcaaccagacaaggcgcgccctcgtggaacaaattcaaacggtccggcaggagagggaagcctccgttcccacccgtcttccggaacctttcgtccttcccgcgcttccggcgggtgcggcaactccggacgcgccgccgcacctgtccgtgctgtgccgcaggccggaacagataccttccgttctggatgccggagcggacgccgtctatctggattttgaagacctccgggactatgcggcgggagtggaagcggtccggcggcacacgaaaagcatccccgtctttctggcgacgccccgcatccagaagccgtcggaaaccggttacttcaagctcatggaacgggcggagccggacggcgtcctcatccgcaacctgggcgcggcgcagtacttccgccattcccccctgcaccgcatcggggatttttccctgaatgtcgccaatccgtacagcgcggccatcctgaaggaacgggggaacctggattatctcaccatttcctatgacctgaacgccggacaggtggaggacctgctccgctccgcgccgccggaatggtttgaactgactctgcaccagcacatgcccatgttccacatggagcactgcgtgttctgcaccttcctgtcggacggctccagctataagaactgcggccgcccctgtgaacggtaccacgtgcagctgcgggaccgcgtggggcagctccatcccctgctggcggacgccgggtgccggaacaccctgttcaacggccgcgcgcagacgggagccggctttttccggagcttccgccatcagggcctttcccgcttccgcgtggaactgctggacgattctccggaaaaagcacgccttctggtatcccgctaccgggaattgctggacggctcctgcactgcggcccggctcatccgggaactggacgtcgcggaacagctcggcaccacggaaggcacgctccggcccagataacgcaagcccgggcctggcaaggagaaaggcggacaaagaatgcaccgcccgcgccttgaagcggcgcaaaaaccgccttatgatggcatcaatgggaatggaagactcctttcccggaacttccgcaagatgaataattcccttaaagaccgcctggtccgtcacatggaagacggacattacgaaccccagagcaaatcagaactggcccgcgccctgaacgtggattcccggcagaagcaggacttccgcgccattgtggaccagctggaggaggaaggcaggctcgtgcggctgcaaaaggggagatacgccctgaaacgggaacgccggaacctggtgcacggcatgatccgcatcctgcgctccggcaagattctttttctccccaaaaagggggatcccgccgcggcggacctggggtgggatctggagaccattccggagctggagctcaagcccaaccacctgggaaccgccctggacggggaccgcgtggccgtgcgcgtggaacgcaaggcggccaagggccggagaaacgtccgcagggaccgcttttcttctccggataccggcatgaaagcccgcgtggaggaagtgacggaacgcgcgcgctcccgctggctgggcgttttccgcgccggaaagaacaagctgggccgcgtgctcggggacggcgtaggctctccggaatacattgaactggtggaaaaacccgccatggaggtgcttcccggccaactggtttccgtggaacccgtgtcccgcggggaagaaaagaaggccccgcgcgggaaaatcgtggaggtgctcggctacccggacgatccccacgtggacatggaagccgtcatcagaaagtatgacctgcccgtggaattccccgcctccgtgcttcaggaggtggaatctttccggaaaaacccttcttccgcggaactgggccgccgggaggactggacggaccgcaccgtcatcaccattgacccggcaagcgccagggattttgacgacgccatctccatcacggccactccgtccggctggacgctggccgtccacatcgcggacgtctcccatttcgtgaagcccggcggcgcgctggacggggaagccctgcgccgcggcaactccacctacctgccggaccgcgtccttccgatgctgcctccccgcctttccgacgatttgtgcagcctgcggccggacgtcgtgcgcctgacgaaggtatgcgaaatgaagtttgataaaaaggggaagatgctccacgcccgctttgcggacgccttcatccgcagcaaggcgcgcctgacctaccaggaggccttcaccatgctgaaagggcatgacaagggggaagttccctccatggtccgtgaagcctggaagctggcctccatcctgcgccgcaaccgctacgccaagggagccctggacttggacttcccggaagtgcgcgccgtcatggacaaggacggacgcgtgacggaaatcatcacggaagagtacgatgagagccaccagctcattgaggagtgcatgctggccgccaacgaggccgtggccctgacgctgaaaaacaggaaccgccccaccatctaccgtgtccatgaagaaccggattccgccaagctctttgaattcggccagttgtgcaaactgtacgggcactccgtccacgacatcggccagcgccagtaccttaatgagctgatgaagtccatcaagggttccccggacgagcaattgctcaagctggcgctcctgaaaagcctgatgcgggccaggtacgacacggagcccctgggccattacggcctggccaccgccaattactgccacttcaccagccccatccgccgttacgcggacctggtggttcaccgctccctgaatcccctgctggccaatccccccaagggggccaaaggcgccggcagcgtaggcaggctggaggaggacgcggaacacatttcagagacggagcgcacttccgccagtgcggaaaaggacgccaaccggatgaagcttttcgaatggctggaaggccagtgctatgcggaccatccggaagtgcacgaggccctgattacggaaacgcgccacttcggcgtgctgctggaaatcccgcgcctccagatcaaggggctgatcaagccggacaagcttcccggcgcccgctgggtgtacgaggcattcgccaaccgctggaagagcgaccacggctccgtgctgtgcgcagggctgcgcattcccgtcattcccgtgaaagtggaccgggaacagcagtgggcggattttaccatcgcctcacgggaggaacagcggcagccggaaaagacagcctccccaggcagaaaggagaagcgcacgcccggccgcaggcggcggaaccgctgacggcacacgcccgcaggcgggaacggccacatgcgggcgttaaatccggttcttcttgcagcagaatcaaatctgtattttttcaccaaaattttcttgaagcaaattgtacttttcatgtataaaatggttgctgtttacttgtgaacccgaccccacgcctatgaactcaggacgttgaacccgtaagtaagcaccatatgaatgctgaatgccaaggtccgctcccgggtctggagcggacctttttcccggaagcctgtcatggcggaaacgggaaggggaaatgagtgtgtccaacctgcatgacagcaattcagcatatccccgaacgggtgcctttcaattacgctgacctgattgaataccgcgaagggcaaataaccagcctggcccttgtgcgttccaaaggcgtcaacatgaccatcctggcttttgacgacgagcagctcctccccacccaccagacgcccggtcccgccctggtgcagattctggacgggacggcgtatttcaccgtgggcaatgaagaggtcaaccttccgcagggcaagactctcctgattcccgccggagtgcctcattccgtcattgcgcaggaacggttcaagatgctggtcacctccatcctgccgctggactgagcggaacgctttttccacgtgcgcacgggaggaaaactcccggcttcttgttacagttccctgacggtaattgacgaacgctgctccaggttcagctccggatggcgcacggtaatgacgtgcgctcccggttccagcagcacggaggcctcttctccatactgcacgacggtcagggtgggggatgaccacaccgcccccgccggcaggttggagcgcagtttgagcctgcgtcccccgccgggcagttccggatccagcgccaggcgcgagccgtctgccggaaccaggatgcggggagcctccccggaccacgcccgcggaagcaggcagaaggtattccccaccgtgcaggaaggactggtaaaccactccgtataacggctgtccagatatgcccgtcccgcggcatcgtaatccgccggggaggccggctgcggcatcgtttccggggaagcccattcctcccggacatgggcttgcggcagatccagcccctccgccctctttccggtgcgggaatcaatgcggatgcgcaccatgccgggagggggaccggggaaggaaggggcaagattgcggtgagccagcctcatgaccccggcaaaaatgggggccgctccatccatgccccccacctgcttcatgggggaggcgtcaaaattgcccacccagacaccaaccgtgatttcacgggtgaagcccacgcaccagttgtcgcggaaatcggaggaagtgcccgtcttgcacgcataccggaagggaaggttcatcagctcccggtcatggaacgccgccatccgggcttcccggtccgccagaatgtccgccgccatgaagcaggcttccgcaggcagtacgggccgttccggaacggaagcgccctgctccagcttcagggggaggaagaagcctccgcgcgccaggcacgcataagccccggtcaaatcccgcaaggtcacctccgcattgccgatggcgagacccaggccgtaatgcgcggcgtctccctggatgccccggatacccaggttttccagcagtttcagtagccgtgacgggccgccgaaggtatccagaaccctcatggccgggatattctgggaacaggccagagcctgcctgacggaaacgggacccatgtaggccctgttgtaattctgcggcgcttccagcccgtgcgcgctccggtacgtggtgggaacgtccggaagaacggttcccggataggcccccaggacaaatgcctgggcgtacacgaaaggcttcagggcggaaccgggggagcgcggcagggaagtcccgtccatcagcccccccgccggatgcttccggtccgcggaaccgaccaggcaaagaatgttccccgtggcgttttccaccacaattacggaggcctgtgtcacatgatggcctttcaagcgttccagctccctcctcacgatttccagcgcgccgcgctgcagggaggcgtccagcgtcgtgcgcacctcccccgtccgtcctgcgtgcatcagggcggctgttacatggggagccgccggctgccgcccttcttccgttccggcgctgaacaggggttcctgcaaggccctgttcaccatgtccgccgggaacatgccttcctccttcagacgccgcagaacgcggttccgccgttccagcgcacgttccggatgccggagggggttcaggaaggacggcccctgcggcaaccccgccagcagggcgcattccgccagggacaggcgggacatctcccggccaaagtagaaacgcgccgccgcggcgggcccccggcgcagatttccgtaatccaggcggttgaaataggactccagaattttctccttgctcatgctcatctccatgcgccgggcctggaaaaactccctggccttggtccacaggttcctgcgtgcgggaggattggcattcttggcgagctgctgggtgatggtggacgccccggacacaacctccccgcctgcggcattcgccgctgcggcgcgggccagcgccaggaaatccgcccctccgtggctgaaaaagcgtttgtcttccgccgccagggtagccttaagaagcatgtccggaacctcccggagccggacaggctccgtgtggtaataatccggtcccggcaatgtggcgattctgccgccgtccctgtccaggaccacggcgccccgctcttccggatggagcagcccttccggcaggggaaccagccagggcacggcataccatgcaagcagccacgcggcggccagccctccggcaatccaaagaagggttttccgttgaaggagctttttgaaaaccgccctgttcataaatctgcgccgcatcatgaaaacactgcacttacttccccgcggagacggtcagtttctggggaatactcaatccgtaggtttccggcttgtacatcagctccgccttggcggacggggcgataacggagccggacttggtcacccgcgccaggtagcgcgccgtaaagcggcctcccgaccaggaatcggcgaaaaagcgcacccggtccttcaggaattcacggtgggagacccacccgctccagtagaaccagcggtttcctgcgtccgccgtctcgctctcccggcctcccggtatctgggaaagcagcgccggattgacggcttcaaaagcggagggcaggtaatcctccatcaccacatacgtcagcgggtcagcggacttgtccacgtgcagcgtaatcctcaccaggtcccccacggcaaactccgccgcaggcgtccaggttccttccggagaaagcctttcataaacacgggaaacggcaaagcccctgttgacggcggctccgtcctgctgcgttttgctgcgtccgcgggcctccgccatgccgtatacccgggttcccgcttccggaaggctgagcacggccttctccccaaccgcggtcaggaaccgggacggggaagacacggagcatatcccgtcaaacgtccggccgccgcggtccacgcggaaggcggcggaaaggggcgcctcctgcaatccttccaggtattcccccagcagaatcacatcccagccggaagtccaggtggaatagggggcccttcctccgaaagatccggacgtcctgtccacgatcaggcgttccagcctttcccggacagcccggtcaccgggggcctgcgccatctccgccagcgccagcagaagacggcagcggggctgtttcatttcctccccggaaacattcatcaggctccgggcctgctcctttgcctccgcacgggaagagagggccgccgccagggccaggtacaggcggtcttccgccctcaattcagcggcatggtccagcaggcggttgagcagggacgcgggcatgagccccgctctggccagcacccatgcccccaggagcccctcccgcgggcgggcggacagggaatgccccagataggcgtacagcttgttgaggccctgttccggaatgtaaaccccctgctcccgcgccagggtcagcaccagagcggcatacgcgcagtactcgctcacctccgtgccaccctgccagtaggacaggccgccggaagaaagctggtttttcatgattttgtaaacgccgctccggagggccctggaacggtcctccggcgattttcccttgaaaccggggagatatttggccaggagcggttcataaatccagggcagcgtggaggaggaaagctgttccaggcatccgtacggataacgcagcaggtaattcacgctgccgtccgcatacagcaggggggacgtgcccagcgtcacccggatgggggtgcctttcaggaagggagtcgccagcaaccccggcagatccagcgtccggccggaggaaagcgagaagcagcgcagctccctcagctccgggaagggaggcaccacctcaaacgtgtgctccacggaatccttcagcaaggaataaacgccggaggaataaggcgtgccgctgccgtctgcggcgcggatttcccaggtcagccgggcttcccccggctgcgtgaattttacgttgaacaccagcgttttcggctggttcccgttcaaagtcagcgtctggacgggctggggcacggaagccgcagcggtcccggatttcaacgtgaccacccacgggcccttcctgtcacccgtctggctgaccgtcaccggaatgtccagggaatcaccctccgttgcggtgaaggggggagcgggttccagcatcacgggcttgtttaccacataggcgctttccccggttccgaaatcggcagctcccgccagggcgaccgccatcacccggtagcgggtcagcgtatccggattcctgtactcggccttgaaacggccctccccgtccgtacggagggaggccagccacacggcgcacgggttgaaattcttccttaaatccaggttctccggcgctttgcgggagccgtccgaggaatctccgccgccgatgaaaactcctttgttgtccgtggagcggccaccccagtcttcatccagaatttgttccagcgtcgtccacgtgcccacggacagggggcggtccgcatagaagtaccggatgggacggggagtctggtacccgatgacctgtaaggtgccttcatcctccgcaaacaggcatacctccgcattccgaaccggcctgccggaataatccgtcaccacgccgctgaccacggcgggggaaccgggccgggacatcccggcggggggaaacacctttacattcagggtatgctggacaggctgaaccttcagcgcggcatatcccagcttcaactggggattgcggaccttgcggctgctcaggtccgcccccttcaccaggaaaacggaaacatagacattcggcgcgtccgcctcttccagaggcacctcaatcacgggattgtccagcgtcagctttctggcaaaactccggagcaccttttcccgctccaccgtcaccatcacctccccctcaatgggcgtctggatcaagagacgggccgtctctcccggcttgtacaactgcttgtcagggatgatcttcaccttcaggccgtcatggtactcccacggggaaacgtcgctgccgtaaacccagtactttacggcagtgcggaattcccgtccttccgcgtccctgccggaaaaagccacctcgtaaataccgtcctgcggggtgggaacggagacggcttttcctcccgtacggacatccgcggaatccgccggggcaagcgtcagggccttttccagcaccgtgctccttacctcgtcattgcgcacggtggtggcatctccgctctcgtagcgcgcgggacggaaagcggtgcgcgtcacggtcatgttgagatcaaggccgctgcccgcatagggcatgccgtccagccccagggcaatcaggcgcaaatccaggggcgttccctggcggcagatggaagaactgttcttcacgcccacaaacacggaagccggattccagacggcgcctcgggaaaccttgaccaactgctcattcccgtttaccacggaagcctggagggacagcctcctgacccgcgggaaggactgcccgtccagggagaactccacggtattcctaccttccccgtccagcacggaggactgctgcttcatgtgggaggaggaacggctgctggaataaccgtaataggcctcccagtagcccccatcgtcatcacggtaatccccgaaacggtaatccttgtatccggcaggataaaagttggagggagtactgcgcagggaccagttcaccttgccgcctgaaacaggcgtgccggtaaaattcgtggccttcacatccgccttcaggagatgagcgccgggcttcaattcatgaatcttctcctccacttcaaactcgttccgcttgaactcggctacttccacctcataccggaactcccggttattcttgtcaaactccttccggtaatacttcttgtaatcgtattcgtcggaggaatcatcctctgccccttctttttcctcttccgcggaatcccctttcagccgcaggctggcaaggacgctgtaagttcccgtctcttccccgggaaacgtgaaatccaggtcaaaggttcccacatcggacaacttcacctgcttgacggctacttcccggtcccgtccgtccctgaccgtcagcttgacctcctccacgggagcgaggcccagcctgttgtccagcagggagcgcacgattcccttcaaatgcatggtctccgccgggcggtacaggttcctgtccgaaaacatgaacaccctcgtttccgcggtagtggcgggattcagccccagggcttcccattcgtagggcagcgtcttcacgccaaaggaccacatcctcacctgccccggccaatcctccagggggctcaggtaactgtccaccccggacaggacgcgaacataggcggcctttccgttcatcccggccatgggcaaaatcacggaaccgtgctccacgggaacggaagccagaacggagccgttcgcatccagcaattggacctgcgctttttccaccgcttttccggtggaaagggaatacacgtaagcaaacatggtatccgccgtctttttatgcagaacgcccaaatccgtcacctgcacgacggcctgcgcggcgtaggatgcctcctttctatcgaacttccttctgcctccgttttccgacggcacgccaaacagcctgtacgcctccagcaccggatcactgacacggccttccacctcaatgaaatacatgcctggctccacggctccgccaaacaggccgtccaggctgatggccgcttccgttttgccgcgcacgtccagtgtcagcgcgcccgtcttatccgccgcaagaagctccgcaggcagaaaatgcctttggtcgcggtccgtcacggtacgggaaaggggcgcggactggtcccgttcataaatcttccggtaggccgccagcgtctggtgccggtggccggccctgatccggtagccgcgcaccgtcaaatccttcaaattgctcacggaggctttcaacttgcgggctccggcgtacatgacgccgttgttgcccgcatccagatacaggcacggatcctccggctccacttccacggaaccttccgcattctttcgcgccaattcctggccatccacggaccggacgcctttcagcctccattgcagtttaaaaacggcctcgtctgcgctcaccagaaaaggcagggacgtataccacaggggccgggcatgcttcatctccgccagccgttccctgtccaggcggattgctattttcccggccgtctccgcatcctctccgtcaagggatgtggtaaagcctccctcctgatcaccgtaagccatcggcttcccgccgccctccacgaaaaactccacatggtcccggcagaaccgttccaaatcctcaatcaggacagggagagtccattccagagtaaaccggcctccgttcccggaaaacgcatggtaataaccggaggcggaaaaacggggcacggcccccagtttgatttcttcccatccggttttctgccctcctccccgggaggacaggaaggaagcgtccaaactgaccaggcaataattcctgccataccggaacattccttccggctgaatgacatacacgccgggaacaaccatgccgtccggacggcctctgaaccttccctcccctgcaatatttctcacacggtaggatttggcgtctctcacctccttcaacgtcgcaggccttagccggaaccccgcatcgtaccccgcggctcccgccttgagctgcttcataaaatctgcggacctcaactgctcttcatccgaaacgccggcaaaacggagattcttttccaatgcctccttccatgagcaataaccgggaagcatcaggaaccccttgccgtcgcgatacaagccattcgcaggattgcccctgtccggaactgcgtcgggaaccaccaggaaaaaactttcccacgggtaaacttcactgccctgccagcccctgtccatggaagacaggaagaaattccaggtcatgcgtcccgtcaggcgcagcggaacggacggcaccggagaaccgtccagaaaacggacattctccgccggtttccatagataggtggaccggaagggaacctcctccagcggaacacactccagcacgttgggagtaatccatttggaagaaaacttcaaggaagggggaacgaacatcagcttcgcgccttccggcatggccgtccctgcgctgttgcccagcgccagttccaccggtttctcctccggggaaaaggacatcagttccgggtccgccggttttcccacctcggaagcgggcaccacggccttgtcaaacaccagttgaaacggcttccctttttccagatgggacggaaaggaaggcggatagcgcaccgtagtgtcggcaatggatggaaaaataccgcaaattcctaagaagcagccaatagcaaaagaacaggttttcatgggaggagggtaattctatgtacccatcttctcctctttttgagtcttcaacacaagcagaaaatccgcaagcggcaaaaaatagagataaaagtcgttaccacttgatgaagttttttttgtaccttgaataatgttctataaaaactcctttcttatgctcactaggatggtagtgcggtcatgaatccaaccggtaatttttaaatgcaataactccagtggaacgcgggaaacttggttcatcagagaaaaatctcctttaccttttgctagtatttctcttcctgcacgctgtcttttaccctggcaatgggtaaattttgaaaatatggcaaagaaatacgtgccaccggagaagaatcccctcccttttcccacgttgccatccgcctcaaaaactcaccaaatatcataacgttcccgacgtgtttacgttgttagtttttgattcatggtagtcacaaccattgaacaaacatcatttcattaccatgaacaacactttcaacatcggcgccatggacaccgtctaccccttcattcccatgtaccccaacggacagccccagggcaacttcctggtcaacggtctcaccgctcccgttctcattcccaaacgcgctgcttcctcccccacccgtcacgaatggttcggatacctcaaggtcatggctcctgccacctgttttctccaccttcacgcccgctcctccatctccctttccattcccgccaaggaactggaactctccacggagccgggctcttccgcccctctctgccgccagatccagttcgaccagggatactattggtgccacattgtccatcaataccagccttccttggggtcggaagaggagttctgcattgccctgatatgcggcaaggaaggagaacccgacctggattattacctgctggcggaaaacactcccgccgacaaggagggagaaaccgtgctgacgctggtcaacctgtaccaggagatggaagaaggggattcgtcgagcagttcggcggggggaggagattcgtttgagtttgaccccaagtccagcagcagttccagctcctcctcgtcaagcagttcttcttccagcagctcttcgtcttcatccagtttccagccgagttcttcggctcccgagcctccggattcctccagcagcgcgccgccttcttcttccagttcgtcgtcctccagcagttcgagttcttcctcgtccagttcctcgagcagctggtcgtcttccagtttccacagcagttccttgccgccccaggagccggattcctccagcagcgctccgtcttccagctcttcctcgtcaagcagttcttcctggtcctcgtcaagttcatcgagttcttccagctccagctcatcttccagcagcagttccagttccctctcttcttcctccagcgagccggaggaaggaggctgtccatgtccctgttcctgtgattgcgacgaagacatcgaacagtccgattgcagcaagaacacctcccatttcttcggcggctatccggacggggccgacgactgcgaaggattgcttgaagtaggaaccggagactcaggagggggaaataattcccccgttccccgcacccttgccgaaccttccgccctctcttccatcaccctacgctacaagcatcccctcgaatggagcgcctcctgcaatcccggaacaggacagatctccgtcaaacgacccacgggcagttccatctccttccaaagttcaaacggcggttccggagcctccgtctccggaagttcgcgcaagttgaactacaaggttcggaagctgaatgccgacaagtctccctgcaccagcggctctcccgcctatctggacatggtccagagcaatgggcgcaccctgcgcttctcggcagccaccggaaaggtcgtctccatggtctccgcctccggcgtggaaaccacggcggaagattattcccgtcagatgaaggtgaaccgccatccctccacgggagccattcaaagcatctggtccaagtcccggggactgctccaggcggttggggaaggcaacaagctcactctggaatggtacgctcccggccaggtgagcaagaatgcgcgcggctttgccggcaccggaactccctacaagacggccgtctatgaactgagctccgaccagggcgtgcaggtgatggatatcgccgaacagagggaagggatgcctgtcttccgaacgcagcgaaggacggagggcaacaaggtgacgaccatccagggagagggagacgagcgcaccgtgcacacggtggagaaaaatgccctccccggaggcaaatgggaaatgattgagagcttgcgcggcatcgacgaggaaacgccttcttcctgtacccgcacggtgaagaagtacaccgacgggggctggctgactatcagccggacggaggggtacaagacctctctggcccagactacgctttacacctacaacgaccagttccgggtgtccctggagatcaagcccgacggcgggtacacgcgctacgagtacgatgaccagggcagaaccgtgctttccgctgctccctgggccggaggcggtgaaaaggggacacgcacgacttacgccgacctgcgcttcaacgacttcaggcccgctacggaaaccgaggtggtcattgccgaggatggaacggaaacggaacttctcaagcgcacttacacctacgaagacagcccgcaggccagccgcaccacggtgaaggaaaccgctctgggttccgaccaggtccatacgagcatttcggaaacctatggtgaaggagccgaatacccctacgcccggggcaggcggaagatgagccagggcgtcaatggcgtccagacggtctattcctatgaagcaaccgcggaatacggggccgtccacaaggtgacggagaccgtgcaggccaacggaagcatcgttcccggacaaagtacccggaacgtagagtacatcgctgaaaacggcgccaccaccaggaaagaacaatacgttcacaccggagaaggatggtcgctgattgcctcggaggactacgagtacgatgacgaacagaggctcgtcaagacgacgaagggcaacgggcgcaccagcacgacggaatggatgtgctgtggcccgttgagggaaactgacgaagacggcatcaccaccagctacggttacaactcggccaagcagctggaggaaaccatccgctcggcgacagaaaccacgccagaaacgattacctcctacacaagggatgcagcgggaaggacgatggccacgcgccgcgacgtagggcccatgaccacggtggaaaggacggagtatgatactctgggacgggccgtttcctccaccgatgtgctgggacgggtcaccaggaaggaatacagcgaggatggactcaccaccaccgtcaccactccggcgggagccacgctggttaccaaaacctattatgatggcaccgtcgttctggagggaggaaccggacagcaggaaagagaaactcaacttgagttaacgcaggaaggcatcctcactacgaccttgtccaagggagtagtcctgtcgcgtatattagaaaatggcttcggccagaccgtcagagaagaaactcccaatacctcaaaggaattcatctccaccagaaatatttacaatgacaaaggactgctcgtccgctcccagacggaggaccttgctcccaccctcacggactacaatgaactgggggatatcgtgaggcaaactgtgcttctagatgaagcgcaccctcacgccccttccggcaaccgggtttcggaatattcctcccgctaccggctccgggaagacggcgtctgccaggtgcagacttccaccacctacaatgccgacggtctcccccttactcaaatcacggagaatatggtttccctgctcgatcccctcctggaaagcaagaccatttccacggacgtctacggacagcagagcgtcgagtggacggagtacaccgctcctaccaggcgcacccggttcagccgcattcccacttcaaacatggtagccgagtctcttgtcgtggacggctttaccgtaagccagaccgaccactccggaatccattcctcacaaacccgctcctacgcctccacgggcatggttctcaagcagacggactccagaggcaatgccgcgacgactgaaaccgaccttgcgggacgttctgtcaaaactaccgattctgcaggcaaggtgactaccaccagctactcgccctgctgtgaccatcccgcctgcatcaccgacgccctggggggaacagtttgctattcctacgacatgcgcggcagaaagacggccgagtacggcaccgtcattcagccggcctgcttcgcctacgacgaagccgatcacatggtggcgttgactaccttccggtcgaacgaaggcgacatcaccactgatccttccggccgtaccgacggggacaccaccgcgtggctctatgacgaggctacggggcttgaactcaagaagacctatgcagacggctcccgcatctccaaaacctacgacgctctcaaccgtctggagacattgaccaaggccagagggatcaccaccacctacgcctatgctcctctcaccggggaacttgtctctgtctcccacagtgacggtacgccaggatgggagttctcctgcaaccacctcggacaaatgacctacgtccgggacgcctccggcatcagggaatttttcctacgattcctatggccgcatgatccaggacacttcctttggaaccgtagaaagctccattcaggaacaatatgatgtcttgggacgttccaacggataccgcctgatggtcggcacacgcacggtgcagcactcccatcttgactacgattccaaaggcggcatgattgggatgaatctggaaggcatcgcttctccctttacctggcagtacgatccaaccagcggcttcctcaaccatctcacctaccccaacgacatggtccgcagcaatacttaccatcccaagctcaacctcgtaaccgctatcggttacaggaagggagcggatggcgaattggcggccggccacgaatacgactacgacgcgctgatgcgtcctactcaacgacgggacttatgggatgctgccactcccgcgacgataagagattttacctacaacagccgcagtgaactgctggaagaccgcatcagccggggaggaagctttgcgtactgctatgacaacatcggcaaccgcaagaccgcccgggaactggaggaagaaatagcttatgaatccaaccggctcaaccagtacgcggagattgccggggggaaagaagattttacccccgtttatgacgccgacggcaaccagacccgcatcaggacctcaacgggcatctgggaagtctcctacgacgccaacgaccgccccgtcgtcttcaccagccaggatggcaaaacgtccattacctgcggctacgactaccggggaaggcgcttcgagaagaaggtcaccgtcaatggggcagtatccagccactcccggttcctgtaccgggattatctgcagatagcccaactggatttgacgcatcccgaacccttgctggtaaagagctacctgtgggatccaacggacccgacggcaacgcgcatcctgatgatgacatgctggcaggagaacggaatgaaagtaaaagagcatctctacttcatgcacgatgtcttgaagaacgtcacttccatcttcgacggtcagcagaaacaacaagcccgctacgagtatgctcccttcggaagacctatcacggaagaaggggatatggctcaagagaacaagttcaggttttcctgcgagttctcggatgacgaactgggacttgtctactataattatcggcacctcaatccagcagacggcaggtggattaacagagatcccattcaggaacagagtgagtggaatttgtatgggtttgtaaaaaacgtgccctcatatttcatagaccttttaggtaatagctcttatcaaggatgggcattaaatggattacaattacacccaagtgcttatgaaacagtagaatatgagattagtataacctaccatgccttatgtcaaaatgctacttggtgggatagaagaattaacgatctattagcaaacaaaacaacaaaatcgccatctgattttaatcctaactctgaatgtctgtcatgtcaatgtattaaaaaattgactgttattatgcatgggagttctagtggttcttatcctagagtttttgcttattggggtgatagaagactccaagaaagtaaaaaatcaactttaatatctaatatgtttaaaaatattaaattttgctcagaatgtactctcgaattgagaagttgccatctgggagaatctcctattctaaaagcacgtttagaagctaatacaaaatgtaaagttcttctttacacaggaaaagttaatgcattttttccattttaatttttatgaaaaaaataataaaatacgtatccctcattatcttatctatttttacaatatatatcattaattttatctatattttttttcatataaagcatggattgaataatttagaaagcgaaacatatattaaaaatctggaaatcatttcatataaaccaagcaatggaattgatgataatttttatatttatgaaaaggaaagcctcattccaacatttattccgcaagatattatcctcatcaaaagaaaaggtggtaaggtccaaatatggtatggggggcgtttgtccaaattccccgaatggtttcaaataaatattgatgcagcatatgaagagaaaaaatgtcatccatccacggacattagttcatatatagaaaacacattgtcccgagagggatttcttaaattaaattaaaacaatgaattttcatatttattaagggaactagcttaagctacttgatgctaagaaaaaccattgggaacctaaaattatcgacagtgataattaccccatgccccccttgccatgaatccgatcaaattcctccttattcccgtggccctgtttttatggctgggatgtttcattgtggccgaagataccgcactacctgataagtggacaacctttggtgaaggcgaagaacgggaacgtttttctaactgctttgtcattagttacccagacagctttatcattgatcctgccagtggaatttcgtttagtcccactatagggagagatgctcctattccggaagaaaacttgcatacccttatattacacaatgaaaaaaaatcattagaagtcagggcttcaacctacgggtttttaactaaggagttttatgtcccgcgtggttttgagtctccaagggaagtcatactgactgactttttcaggaatgcattgactaccaaaattatcagaacacagtattacgatttgttctacagtgaaacagacaaggaagtattcgcactttacctgaatcgaattaaaggctggaatgcaaattaccaaacacttctgtttttgtttaaaaatggtaccacatttaaagatcatgcgaaaatggtggagaaaattatgaaaaaatttatcccaaacttcgcagtcaagattagctcgtatgatattgaaaagttatttgtcttataaataaaaaaaagaagagtaaatggatccttacgttcttcgaatttcttaactaacattttgatttttaaatgataaaagcaaatgtatgtctccttcggaggactgctcactgctgaaggagatatggctcaagaaaatatatcccacttctcctgcgagtccacagacgacgaacccagacttgtctactataattactgtcacttcaatccactgacggtaggtggatcgccatcttattcaggaacagggggatgggatttgtgtgggtttataaaaaatcatattcggacaaatattaattttttaggaatggtgagttcctctcctttagatccagcttttatttctcctcccataccagatagagttggccagagcagaggcatcaaactttcgtattttgcttgtaaaagaaagttagataaattaggagataaagctattaaggcacttttagcaggaaaagttacacatgttccttcagattttaaaccgaattcagaatgtgaagaatcctgccaatgcctccgtagtttaattattattatgcatggagaagaaccctggattagaaaaatgatataaatgtaagagcgcattggggggggggggaggttcttaactgaaaatacaaataatacaaaaatatccaacatgtttaaaaaaattaatttttgttcatcttgcaaacttgaaatacgagcatgttatttggactcatcaccgtatttaaaaaaccggcttgaacagaatacagaatgtgaaggactttatacgaaggtaaagttaaagcatttttcccattactttaatttaaattcaaaaaaatgaaaaaattaataagattttttattttcatcatcgctgggttaattattcttacttgtactaattatggatacacggtatggagtatccatcattggaaaaatgtactggaacaatcaaactttgagcaattaaaaaatgaatatgcaaaatactattaccaagttgaagggccacctgcagaacagttgatcatctaccaacaaaaacaattgctccccaatatttttcatcatgatctagttatcatgaaaagcagcctctccggcataaaaatatataccggctctagacttaaatctacttcacgtggcaccatgaaggaaaaattaaaactctaccaggaagacggatttaaagaaggagaaaatgtttcttccgttggtgaagtattctcctccagccttaaactagcaggatttaaagaagacggacattaaaaccatttgataaactttttacttttgtgtttataaaaaacagaaactatataatttatcagcatttcgcctgccatctgacctacttcgtcttgtagagcttttaggtgacagtgtccgaggattcaatgagcacgtggcattgtgacaatatatgcatatgcttcccttatcagagaactcgtctctgtctcccacaatgacgatacgacggcatgggagtttacctacaaccatctggggcagatgacctccgtcagggacgctttggtatcagggaattctccaatgatgcttacggtaacatggcccaggaagcttcctttgggctgagccgtagcaatacttcccatcccaggctcaacctcgtaaccgccatcggttacagaaagggggcggacggcgaactggcggcctgccatgaataccaatacgacgccctgatgcgtcccatccagcagcgggattcctgggatacgggggcacctgtcacagtaagggattttacctacaacagccgcagcgagctggttgaagacaggatcagcctgggaggaagcttcagctaccgatacgacaacatcggcaaccgcaaaaccgcccgggagctggaggaagccttctcctacgaactcaaccagtacgcagatattgccggaggaggagattttatccccgtctacgatgccgacggcaaccagacccgcatcaggacctcaacaggcatctgggaagtaagctacgacgctaatgaccgccccgtcgttttcaccagccaggatggccggactgctatcacttgtggctacgactaccagggatggcgcttcgagaagaaggtcaccgtcaatggggcagtatccggccattgctggtacctgtaccgggactatttacaggtagctgagctggatttgatacatcctgaacctgtgctggtaaagagctatttgtgggatccgacggaatcgggagcaacacgtatcctgacgatgacatgctggcaggaaaacggaatgaaagtaaaagagcatctctgcttcatacacgatgccttgaagaatgtcacttccatcttcgacgagcagcagaagcaaaaaatacgctacgggtatgctcccttcggaagtctcatcacggaagatggggctttatcacgtcttcaccgtcagaaaatttcaaaagaatttgatattaaaggaagtatggaaatagaatattgttgaaaaaaggtgattcatcagataatataatttataaaattaaactaatatccaagaaaaagaaatgaaagtaatactcgttcctctgctagctatgagcacgtttacaactgcatgcaaagaacataccataaattcaaaagaaaaattggaagaacctgctaagcatattagggaaacagtgactatattaagctctcatccagagcttcatcatttcccagcttcctccaaaatttggattgataaagaattaacatccttggaggaaagcaatataagttcaagacggctaggatattccatacggactaagcatcctgaaatcaaagaaaaggtgaaaggagtttttgcacattctattgatcgcatcttgccatccaagaaaaatattgaattgaatacaattcaaaaaaatcatcatcttacagagaatatcagccatatcttaaaaagaattaattccgtatataactctctgaattatccagttattaatccggaagatatagaagcctggtggcaggatacagattggaaagaaaaagaaggacttccctatgatcattattacatcaccgccctcattctgaagaacggccatacattgtttatttttgatcggcgtcctgtactgactgaagatgaaattcgttattggtaatcttgaaaaatcccatagagacaatctaaatagataaattattttttgaaattattacgccaaatgctacaaatattttcaaagatctaagtacttcatcttcaaggaagcatattcaaggcatacataatcgcacaatttgatttttctttcctccaagcccttaatcctattaacaataccttgattttattctacatcttcttaatggaattatagcaattaatatgcttggagaaaataatatgttaaaaaaattacacaacagggaaaatcgaatctctgaaaaatcaaaaaaatctcccattcaacatcgggtgcaataaaaacaattccaaatgaataatattaagagttagttcatatttttcaaacggaattatttcctttagtcttgtggaaatcgctctctttgttttactttttccgaattcttgatgaacagcgccagcctttcattgttgccatccaaattccctcgatgactgataaaaacggccttacaagattaccctatatagttccgtttcagaataaaagggggggcccggcataaggctgttcaaaaatggaataagcctccatagtctctcaaagcagaaatcatgatgaggcattatttttgaccttctttcttttcttccgcatccagcgtttcaaagcgggccagaacccagcaaagatcggaaaggcggttcaggaagagggccgtgttcacgttgctcaaggcattgtccagcctcagcgccaccacccggcgttccgcgcggcggcagacggaccgggccaggtccagataggcggaacccagtgacccctccttgccggggcgtgcccaccccttgaagcggatgtcgcattccttctccagcagatgggcctgttcctccaaccatgctacgtcctccgccgtaatgcgggcataacccttggcgtcatacttgggcaaatcctcctccagcgtagccagttcccccatggcccccaccaggcgcgcctgaacgccgtccagcatttccaccgtccgggggcttactccggaatggcgcactacgccaatcagggaattcaattcatccaccgttccataagcttcaatgcgcggggccgtcttggggctccgtttgccgaacatcaggtccgtttctccgctgtctccacgcttggtgatcacgctcataccccgtaccttaccatgcctgcgcggccctgcacacaaaaaagaaggcatcccacctcgccaacggcgcaaattcgatgttccggacagccgtccatccgctggccctgttcccagtacccgaccacccgggtattttgtccattgcggttaaaatatcttgtgccattcctttccagggagggaactgcgccatgacacgtcaaccgtttgaaacttttcccgatggctgtacaacccctgcatgacccggaccagagatgaattggcggcggaaaccgcaccgcccgtcaaagtgcctctctggacgcgagactacgtcctggcctgttgcgccaacctgatgatggggctggccttcttcgaactggtgcccgttctcccgctgtacctgacggggcagttgcaggtttcctccggctggctgggctggatcatgtccatttacgtgctggccgccatcatttcccgcccctggttcgcgcaccgggtggataccggggaccgcaagaagatttacatcacggtttacatcctgctggccctgtccttttcagggtatgccgtggccgccaccgccctggcgtttttcctgacgcgcttcgtgcagggcctgatctggggcggcatgaccacctccggtccgacgatggccgtggatatcatccccccttcccgccgcggggagggcctgggctttttcggcatgacgatgacgctgggcatgtgcctgggacccgtcatcggcctccaggtataccagcagtacggtttttacgtgattacgtggagctccctggtcctgtgcctggctggggcgggcatcgcctccctcatccgcgcccccaggcgccccgttcaggagtccgtgcaggaaacgcccaaaaaggtgctggaccgcctggtgctgcgcgtgggcattccgctggcggtgaatgtgatgatcgcctctttctcctacggcgttgtggccgtgtattccgccctgtacgggaaaatgtacggtttcaagtatgccgggctgttttatgcgctgatggggctgggcatgctggtctcccggttcatggtgggccggcagatcgaccgcgggcgcgtggcggaactttccgtcatctcgctgggcatcctgactgtcagcttcggcgcgctggcgtttgcgccgctggaatgggtctattatacctccgccatcctcatcggcttcggcttcggcatcttcatccccaccttccagaccatgaagctgaacatggcggaccgcggccaccggggcgccgtcaattccacgtttttcaccgcctttgacatcggggtgggcacaggcatgtttttcgggggcaagatttacgcttacctgaacctgaactgggccttcggcgcaggcgcgctgctgaatctgctggcgatcgtgtacttctaccgcatttccctggaccactaccggaagaacaagcttggcgtggattcggattgatttcccttccgctattcccgttccagagcggaaaaaacgtcaatcacgcgccgggcggaaggcctcacgcgcagcaggcggggattccaggccaaggaaatactgcgggacagcctgtccagcgcaggatgggtgaccttgacgaatcccccgcccagctccgcctccgccatgcaggggaggaccgccatgaatgccccgcttttcagcatgcgcgccgcaaacgggaaggactgcgtttcacactgcacccgcagcctgatgccgaattccgcgcaattccgtttcagcgaggcatggaagccggaaccgctccccagcgtagccagggggaacatgcccagcaggcgtgaaaaatcctcctcccttccccgcaccttttttccggccagggccgcgggcacgtacagcgcataatccatggagcagatggcccggctttccagcccttccgccgccagcgcgctggtgcgcacgatgccgaagtccacatccatgttctgaagcttgaggggaatttcactgttgcggaggttctccagcgcgaacagccacggcaggccgcgctgctggatgtccgcaagcacgggagcaaccacccacgcgtgcaggctgtctccggcgccgatggtgaaccggtagggcaggttccggctccggcttttgaaatcgtccagcaggcacaggctttcgctggccaggcgcaccagttcccatccggacctggtaagcgccagcactttcccgcggcgggccgccagctccacgccgaagaattcctccagttccttgatctggcgggaatacaggctttgccgtgcgctgtccccgcgcgcggcggcggcaatgctccccgccttggccacttctatcagggttttcaggcggtccagggacaacccccgctctgcgaaaaggtgctcaaacataactttaaagtcatattatatgaatacttgcataatgcaagagtcagtaaatgcgctatggtaacggagtcacagggcgcagcgccgctttccgcggcccccgcccttcaaccaaaagaaaataaaaccatgatcaccatcgacggaaaatacacggaagcccgcgtgttcacggatgaactggaagacctggcccgcacccagatcagggacgtctgcaatcaccccgcctttgaaggaagccgggtgcgcatcatgccggacgtgcatgccggagccggctgcgtcatcggcttcaccgctgaactgaaaacggacaaggtgattcccaacctgatcggcgtggacatcggctgcggagtgctcacagccagactgcccggaatgccggatttctcccggtttgacgaacgcctgcgcgaacgcgtcccgttcggctggaacacccgttccgccgtccaccaggccctgctggatgatccggaactggatgatgaaatctcccgcatctgcgtggacgtgctgagaacggagaaagacaggcaccgccgttccgtggggtccctgggcggcggcaaccacttcattgaaatagcgcagggaacggaagacgccttcctgtgcatccactccggttcccgcaacttcggcctgaagattgcggagcgctaccagaagattgccgtagccacttgcccggacgcctatctcaaggaacgcaagaaaggcctctgctacctgcagggagaagatacgctgaactacatgcgggacatgaaggtggcccagcgcttcgccgccctgaaccgccgcgtgatgctgcatgagctgctggacgatgccgcggacctggaaatcttcgacaccgtgcacaactacattgcggaagacaacgtcatccgcaagggggccgtccgggccgaacttggagaaaagctcatcgttcccctgaacatgcgggacggctccgtcatctgcaccggcaggggtaatgaggaattcaattcctcctccccgcacggcgcaggccgcagcatgtcccgcaaaaaggcaaaagccaacctttccctggaggaattcgaggcttccatgcagggcattttctccacctgcgtctcccgcgctacgctggatgaagcgccgatggcctacaaggatggagaaagcgtgctgggcaacatccatgaaacggcggaaatcgtggaacgcatcaggcccgtgtacaacttcaaggcgcccgaataacaggacgccccaacgcccggcccctcccggaatagatttcccgggaggggtctttcctaattttcggaaccaagtcaggagcgcgtggcggaataaatcagcttatagggttccgcagtctgaatcggaatggcgtacaccttggaggtatcattccattccacgccggaaacgtcaaacttctggcggtcataataacccaccacctttccgttggtcactacgcagaaagcggccgcattctccccattccgcacgataatcatgctgtcctttttggaggcgctcacggacgggctgagcttcgcgttctgcttgtatttggtccaatgcccgttgagctgggaaccatgcaggttctgtccccacaaattgaccgttttcccatgctggtgcaggaaggcgatgcggaatttcggcttgggataccgcctggcggcgatccgggccttggaggcgcgggccatttcctccgtcatcttgaagctgtattccccatactggttccctttgtggtcaatcggaacgaaccaattgaaaatttcaaagtcatcagtaaaatccgtcctgctgacattgcagatgcgttcatacagggccagatgggcctcggaaacctcatacgcctgcctggaaagcggcttgcggcgcaatgattcaaacagcgcaggataaaattccggattgatgcccagcttatggaaatacaggtagaaggaatattgggcaaaaccccacttggcccagccgttcagatcatggaacggcagcccctttaccgcctctgacagcaggtacttgcacgggttttccatgtcggaggccagttcattgccgttaatggggttggtcacctggtccaggatcaactgggcgaagaagttattggagctttcagacatgctgcgccagttgaacggatgctggtagcagtggccgacttcatgcccgaatccccagaggcggttcccctgaagaacgccgggggcgagcacttcatttttcagcgtatttccctgatccccgacgctgtagccgcagtaataccaggtggcgaacatatgggctccgccttctacggaaactccaagctgccggttgttatgcggctggggatatttgtcaaagcccatgattttccacatggccctgacgctctcatcccacaccctgacggatttcgtgatggaatccgggctgtaagccttcagatattccgtgtgaaggatcatcatggaataccgccccacgatgtcgaacatgctgtgaggggccttgccgatcatccgcttccagtccttgtccgtgtgcctcgtcacgtcaaaatatccgttcaccgtcccgctgcccacggggatgtgcaccttcacaggcttcttgggcgtgctgatatcggtgtggtacatcacataaagcaatcccgaacggttgattttgattttgtttactccttcattcaggggataggtggaagattcgattcccgccggggaaacggaagccagcccaatatcctctccatgagtgggacccacgaatacaaggatttcatctcctttctccgcagcaattccggtgggattgtcaaatttgttcagggcgttgatatttctcaccttggcggcaaactccggatggctgtaagccttgtaggacgcaatgcggaattccttgtcttcataggctccggatttcactttccgcgcaatgagctgcaaaaactccggcagcgccttgaggtctgccagggtgcacctgggattgatggaggaacagctcgtgtctctgaacactttcagcaattgccggttgagcgtggattccgcctttttgtaaaaactgatctcccgtacggtaaacgccggggaagctccttcagggtaatcaacctccaccttgattttttgaactttctgaagagggtttttaaacctgatcattttggagccgcctatatcaaactttccaaggttcttccacgacgagccggacatggcggacacggaaacttcattgaaattggctccggaaaaggtgatgtaatgaatggtgtccggcacttcaaatacaaattccccctccacatgccgcgctccgggaacatgccagttggcggattccagagaaccgtccacagcctgctttacggaatggcctcctgagtagggggactgaggggaagaagcctcccttacttgaagagggatgtcctccggaacgtccagtgaaggatatttttccgcaagggacaaattcgcggcaaacattaaaaaaatgaaaaataaaaaaaacggagataaaatcagctctcttttcataaatggtactggaccctgatgatactatacatgatttccagcgtgcgtttttcatgttatccctgtgatggcgcaaaatcccctgatgcaaggacgggatttttcctctgctccacggtccaattctttcatggacccccacggaacattatgccatgttatccttcatgaacggaagacggtcccgtcatcaatcaggaaacaagccgggcaaatggattgccgtcctggccgttcccctctttctactgggcacgggactgttctcctttttgtggaacgttccgctgaatacgctgagagccgctcattccgccacagcgcctcccgcaattcttatcaggaaagcttcttccccggaaaatcatcccatggccctggactcctccttcctggccggcatccagcccttcctggaacattatgcggggtccgtcagcaatgccgggcgccttgacttcaccacccatgacccgcaggaagtggaaatacggatggacgggctctccatcggcctgagcccttccctggcggttttcaatttccacaccaggtacgggttcagcatgcagacgagcagaaaaccggacgctgccgaccgggcggtttaccagtggctgaaaaacatgatgcaaccggaagagccggaggaatcggggggacgttgacacaggcatcgaacggaacaggctcggcgttgtctaatccttcatcttcccggaaaagctgtggaacggcaggttcttcagccaagggagcaactgcacccgcaccggaagacgaccccatacagcgtttatgaaacgtatttaccacggaccatggaccctggccggactggcatgcgccattctggccgcagtagccatgctttccctgttctcctgcggagaaaacggacaggcaggcaacaaaaacagacatcatatggacaacaaggatttaaaaacgatttatctggcaggaggctgtttctggggagtggaaaagtacttctccctgattcacggagtcaaggaaacggaagtggggtatgccaacggttccactgcctcccccacgtatgaggaagtctgcagcggacgcacgggccacgcggaaacggtaaaagtggtatttgatccggaagaactcagcctcccgttcctgctggaacaatactattccatcattgatcccgtttccgtcaacaagcagggaaacgacaggggagttcaataccgcacgggcatttattatacggatgagaaggacaagccgattatagaagcctccctgaaacggctccagcagcacttcaagcagcccgtggcgattgaagttcaacccctgggtcaattttcacgggcggaaaaataccaccagcgctatctggacaacaaccccggcggctactgccatattccgcccggcaagttccaggaggcggcccaggccagggaagccgctcccgtctaccggaaaaaaccggatgacgagctgcgccgcagcctgacgcccgagcaatttgcagttacgcggaacaatgcgacggaacctcccttccgcaacgaatatttcaataacgacaagcccggcatttatgtggacgttacgacgggggaacccctgtttctttccacggacaagtttgattccggctgcggctggcccagcttctcccggcccatcaaggaagaactgattcaggaaaaacaggatctttcccacggcatgcgccgtacggaagtccgcagcaaaacgggggacgcccatctggggcatgtcttcacggacggcccgaaggaccgcggcggcctgcgctactgcatcaacagcgcttccctgaaattcattcctgaacaggatatggaagcgcaggggtatggaaaatacctgccccagcttcgccgggaggcagcggacagaaaatccgcggaaaagtagcttatggaaaaaacggaaggtgaacctcacctatccatcaatccgttaaaaatccggaggacgaagtgtggccggataaagaaccggctctcggctccatgcaagattccatgcgcacttatgccgtaagacgggagacaggaaacaaagatgctgaatgcggcgtcccatgcataagagattccggaaagggataaaagtagtcctccggaagaagattcatgagggctccttcccgggccgcaggcagtcaatcaattccggtacgcctgcgtttgaaaaaaacgccctccatccatgccgctgccgatgaatggagagtgggcaatcggcagcaggccatggaggatttgggttgttggggcaatacgacttgcagcaaatgccgtttatcttcatgccgttcattgaaatagcgacggccaggcgcgttttgtgttaaaaaaatgagttttttattttcaacgctttcatccatctattgaaatcgtcccgattctttgaccatgaacatatcataaaaataaaaaccattttctgccagcgccggattcccctcacctgccacaagagggaggcaaggagctcttctccgccaacggtatccgccttctcctccgcgtcactgcacgatcgtgacgggagtacctactttaacggtcttgaaaagcggcacacaggaggagcgggtcatgcggatgcatccatgtgactggggcgtctggaaaacgggtcccacgtgcatgccaatgccgctgtccgtcagacgcatgaaatagggcatggaggcatcatataagttggagacgtggtgcaccgccttttccgtaatgcggaaatggcccacgggcgtgcggtgggaagcggtccccagacagacgggaaaatccatggctacttcatcccccaccatcagctggcccctctggcttccgcggctgatcaccacccgcgtattgccaggagtggcttttttcataatgtcctggttcatccactcgtcatgcacctccgtataatccaccccggccaccaccactctcgtattcggcccgtaagaagtcatgggcatggtcgtaggcacggtcaggggcaccatgcgcaaattctcttcctgcggccctgaacaggctgccagcgccagcgctcccgctgccgctcctgcaataattgataaggtttttttcgcgttcatcatctttaaccctttcagagggttggacaatgccgcaaacttattttcaatgtttcatgacgcactctatcaaaattccggcatgcacgcaaaaggcggaaaccggaaaaaagcggccgtcacgacagcggaatattgcgcgccacggtaaacagggcaagtacggccacgccggcggtcagcaccctcaggaatacggtcttgtccctgatgaaaaacagcgttcccagccagatgagcgtgggaaccagcagcacgttgtaccgcagggaatcaagccaatggccatgaagcagggcatgcagggccctggtggaaccgcagccgtagcaaagataacccgtggttttatagaaaaggcactccggcagccagccggaccgggaagggtcatccaccagcaggagcaccgcgcatgccgcagccagcagcgccagatacaggaaaaacagtttcattccatgaaaaaggcctgcggatcttcggttctccgcaagccttggattcacgagcctggtgaagccttttatcagttgcgccaggcagtccagccgccgaccagcatcaggacgatgctgagaatcacggcaataaggctcatcgtcttgccgttgctcttgtcgggatatttgttgaggcctatgatgcccagaatgaggcctacgaggctgcataaaacggcaaagacgagggcacaaatggcaagcgtattgtttggtctttctaactcagacatattctttaatccagtttgatttttattggggtgcgcatagcaggatgccagacgcaaatccttgccatctaaacaaaatgccgtgcttctacaagtttttcctggttctgttgtcagttcctgcgcgtcttacaggcaaaaacgccggaaaaaaccggcagcccgcgtgcagaaaggaatttccacgcttgcgggagaggaggaaaaatcctccccccgtcacacagagtccttgccttatcatatttggcctgtatagtacccgcgactgccaggagggcagccgcctgtttacagttaaccctctattccgcatcatgaccaagattgccaagagcacgttcaccacgggaaccggaaccccgggacagttttattcactgccagccctgtcggaaaacggctatccccgcctgaaccgtcttcccgtttccatccggatcgttctggaatccctgctccgcaattgcgacggcctgaaggtaacggaaaaggatgtggacaacctggcctcctggaacgccaaaaatcccggttcctatgaaatcccgtttacggtggcccgcatcgtcctccaggacctgacgggcgttccgctgctggtggacctggccgccatgcgctccgccgtggccggactgggaaaagacgcttccgtcattgaaccgctggttcccgtggacctggtggtggaccactccgtccaggtggactgggcaggccgcacggacgccctggaaaagaacctggacatcgagttccagcgcaatgcggaacgctacgaattcctcaaatggggccagcaggctttccagaccttttccgtagtgcccccttccgtgggcattgtccaccaggtgaatctggaatacctggcgcagggcgtcatggaaaaggacggcgtttatttcccggacaccctggtagggacggattcccacaccacgatgatcaacggcatcggcgtcgtgggctggggcgtgggcggcattgaggcggaagccggcatgctcggccagccggtcaccttcctggtgccggaagtagtgggcgtccacatgacgggggaactccgtgaaggagtgaccgccacggacctggcgctccatgtcacccagatgctgcgcagccacggcgtggtaggcaaatttgtggaattcttcggggaaggagcggcggccctcccgctggcggaccgcgccaccgtagcgaacatggccccggaatacggcgccaccatgggcttcttccccatggacgaacgctgctccgactacctacgccagacaggcaggagcgaggaagccatcgccacgtacgaaaactatttcaaggcccaggacctgtggggaatgccccgcaatggagaactggactacacggttcagctggaactggacctgtccaccgtggaacccgccgtttccggacccaggcgcccgcaggaccacatccgcctggcctccatcaaggacagcttccgcaagctcgccggcatgcccgcggcggaaggcggttacggcaaaaaggaatccccggcggtcaaggtcaccatgcactctccggctggcgttcccgttccggtggaaggcttcagccaggaggcggaattgaaagacggcagcatcctcatcgccgccatcacctcctgcaccaacacctccaatccgggcctgatgctcgccgccgggctgctcgccaaaaaagcggtcgcgctgggcctgcaagtgccgccgcacgtaaaaacgtccattgcgccgggctcccgcatcgcttcagactactttgcggccaaccagctccaggaatccctggacgccctgggctttgaaaccgtcggctacggctgcaccacctgcatcggcaactccggaccgctgaatccggaactggaacaggcggtcaggaacaatgacatcgtggccgcctccgtcctctccggcaaccgcaactttgaagcgcgcatccatccttccatcaaaaccaacttcctgatgtcccctccgctggtcgtcgccttcgcgctggccggacgcgtggacatcgacttccagacggaaccgctgggcacggaccgcagcgggaagcccgtcttcctgaaagacctctggcccagctccggggaaatcgcggaagccgtcgccaaatcccgcaatccggaagcgtaccgggaactatacaccatcacgccggacaaaaatcctcgctgggccgccgtgtatgcgccggagggctccgtcttccagtggaatgaaaactccacctacatccaggacccgcccttcttctgcggcttcaacggccagccccgcacgctggcggacatccgggacgcccgccccctgggcatctttggcgactccgtgactacggaccatatctcccccgccggagccatccgggaaacgggccccgccgggctgtacctgcaaggcatgggggtggacagaaaagacttcaactccttcggctcccgccgcggcaacgaccgcgtgatgacccgcggcaccttcgccaacgtccgcatcaaaaacctaatggtggacggcacggaaggcggctatacgctgtacttcggcaaccgctccattcccgccccggacaagaaaataacccctgccgccggaacccccgccttcatctatgatgcagccatggcctacgcgcaggacggtgttccgctcatcgtcatcggcggagaagactacggcatgggctcctcccgcgactgggcggccaagggcacgaacctgctgggcgtcaaggccgtcatcaccaagagctttgaacgcatccaccgttccaacctcatcggcatgggcgtgctgcccctcaacttcgccgacaaggcggactacgaccgcatcgccccgttgaaggacgccaccttctccatcctggggctggacaacggcatcgccccgcgccagcaggtcacgctgcgcgtgcagcccgcagacgcggaggcgtttgacgtgcccgtcatcgtccgcattgatacgcccattgaaaaggaatactacctggcgggcggcatcctgcaatacgtcctcactcaaatcctcaaataacgcggcttggccgggcttttccggcgccgcatcctttccagacgggccgcccttcccccgaagacgcggcccgtctggcgccttcctctccgggcgcacccgcagctccatgacacggcttgattagttcacttgaactaattccaaattctgcttgcaatccttccgggctgtttctagaacaaacacatggaatatagatctgtctggacgggctttcttgccgtattcgccgccctggcgttctgcagctgctcgcagaacgataaaatgagaccgccggccgtctccttcaaaattcaaaaagccccggtagtcccccgcacgtccaaccagatgggccgtgaggtgggcatccgcgtctcctacatgcccaaaagcacgtatgcccgcaggcatgcggcctccatgcgcccccgcttcatcaccatccacagcaccgccaaccccaagggagacgccaacgcccattcccgctacctgaacagcggcaaatcccgcagcctgaactggcacttcacggtggaccagttcggcgcgtaccagcacattcccacgacggaaacgggccaccacgcggaccactccggcccgggcgaccaatactccgtagccattgaaatgtgcgaatgcaccacgcacaatcccgtcgtcatctacaacaagacagccaagctggcggccctgctgatgatgcgctacaacgtccccctgcgcaacgtggtgccccacaactactggtccggcaagaactgccccgccccgctgatgaccaacggccgccccggctataaatggagctggttcatctcccgcgtggactattactaccgctgcctccaggccgggaaataatccctccccctttctgccgcgcatgccgcactcatgacaaggcgttctctttaccgtttccggcggagggtgcttcatgaagtgtatgaaaatcatcacttcccccggagatacgcagcggctgagcaacggcctccccattcccggcatcggttacggaacctacctggccccggacgacacgtcgggaacccggagcattcttgacgcgctggaagcaggctaccgcctcattgacaccgccagcgtatacggcaatgaaaaaacggtggggcgcgccgtcagggaaagctccattccgcgggaggaaatcttcatcaccagcaaagtctggaacacggaccagggttatgaaagcaccctgagcgcttttgacgcctccctgaaccgcctcggaacggattatctggacctgtacctgatccactggcccatccccgccggatatgagaaggactacagagagctgaacagggaaacctggaaagccatggagcgcctttacaaggagggccaggcaagggccatcggcgtcagcaacttccttccccgccatttggaagccctgatggaacaagccgataccatccccatggtgaaccagctggaaatcaatcccaggtaccaccagacggaagcggtcgccttctgccgggaacacggcattctggtggaatcatggggccccctggcccgcggaggcgtcctggaggaacccgtcctgcgccgcatcgcggacaagcataaaaaatccgtagcccagatatgcctccgctgggaactccagcgcggcatcgtgcccctccccaaatccatgcatgcggacagaatcaaagccaacctggacgttttcggcttctccctggacggagaagacatggcccttattgacacgctggacgcccccgggcactactccattcacccggaccatctttccgaggagtaatctttccagaaaagattcaaggacggactattccctccgcttcctggcggattccaccaggcgttggcgagcctcctgcctggcacggaatgcctgttcgcgttttctttcctccgccagcgccgctttcttttcggaatcacggagtttcccgtaaagcagcggattcatggcggcctcgtcctccgggccttcatggtggtacacgggcagcccgtccgcggccagcgccacatggtagtaacggccgtcctccctggagtcccggccttttttgtccaggcgggaaagaatcacggcataccccagtcccggagcgttcaccagcttccgctggtcgtcaaacagggcggcaacgcgcatgttgtcgtagtccagcttcatgatgccgcagaccattttgccctccgtattccagtacatcaccagcttcttttttcccagggaattgggcttgcacgtttcataggctcccttgacggggcggctttccatggacagggagtagtccgcattgctgtaggattttgtctcccttgcggcgagtcgttcgcccggaggaagcagggaggaaacgggagcgcgcatttccgtccgttcctcaggcatgtacttggagggaatgagcaggccttttccggtatcgtaataggcgtaaaggcttccttggtccagaaccatgtcaaagtttttctgccccctcccgctttccgggcgcgcctgcgggcggcagtattcctggattcggaacggagggcccttgatggcggaaagggaggtggtacagaccagcccgtccaccttcctggttcccgtcaaggttctggtggggtttttccgggccgcttcattatagcggggagtgatgtctttttccaccggcgtccacgttgctttttccagttccttcatcaggaacggccagagcatcgcggccagcttcaggtcccggcgcgccgccgaccccgtcagggaagccgccagcgccgcgtcttcctcatccaggcggttcagcggaatttccacacgtttccgccccgttttaagcgccaatctggaacccgtgcaggattgaaaactgccttttaccacgtctccgagcttggatatccattcccgttcgcccggaaaggcatattcatcagccggcgcacaaaccgcgccgcaccataccagcacagcaagcagaaggagtttcatcgtcagggacacagggttgcaactgcaaccctaacaacagggccggccggataaaagcttttaattgaccgccgctgcatcgggaacccggaacaagaaaggggaaaacggcctcatcacatgtcatccggagggcatgcagggtcgataagggccggaaggccctttttcccgggcgggagaccgtgacaaaccggggggaattggaagaagcaggggaaactgaatttggcttgcccgggagtgaggggctcccgcccctcatcattccctccaatcagcggcctcatgccaccctgaccgcgcatccggagaaaatcctcagaccgcagttattgcttcttcccttttttaggagccgcctctgccgttttagcgcttcttcccgcgcctttcccggcagttttggacgtcctggccgttttggaagccgaagctttttccttgtcttccgacttggccgcagcttttttagccggatatttcttttcccggggcgggaattcaaagccaatcttgcccgtcttcgcattgaagaccagataagcgtcaaacggacgcttggtgcgctgggagatgaagcccttcatcaggtcggactttccttccgccagaatcttcaacacctggtccagcggaatttcacggcccaggatggtgcgggaaacggagacggcggcattttcctttccaatggccagggaagggactttccaggccttggccgtttccatcacatcgtgttcccccatgtccgggatggtgacggaggccactttcacggcttcctccgtcccggcggcttcatcctcctcccgcgccgggaagtagagcgtggcgcggaacttgtcgttgagctccagccccgcttcaaagggtttgccgaaccgggaggtgaatccgtggaggattcccgtcttgccgtccacaatgagggttttcagctcttcatccgtcatgtcgcggccggagatgaccttgcggatgctgaacttgcaggaacggcaggaaacggcgtccagcgtgtttttcaagccgtgggcatggcaggacgggcagtccagttccatttccggcagttccacctgctgctgggcttcccggaagtctttcactctctttacaatttccccggtcagagtcttgatgccttccatgaaggaatccctcggcagggcggcctgctccatctgcttgagcttgtattcccattccccggtgaggctgggggaggtaagcgttttcagcccgatgcgttccagcagggcgatcagttcaatcccgcggcgcgtcgccagaagctcgcggccgtcacggacaatgtattcctgggaaatcaggccttcaatgatggaggcgcgggtggcgggggtgcccaggccgcgttcgctcatggcggcggccagctcttcgtcatgcaccagctttccggcgccttccatggcggccagcagcgtggcttcattgtaccgtgcgggcggcttggtcatggcgttgcggatttcaatttcacgcacggcagcctgttccccgtcatggacgggcaccagttcttccttggaggaactgcccgccttgcgtccgtagacggcctgccagcccggttccaccagcacgcgccccgtggtgaggaaggcgtccgtcacgccgccctggtgggcaatgagcgtggttctgcgcgtgtcctcaaacacggcgggggggaaaaagacagccaggaagcgggccatgaccatttcaaagagtttctgcgcgtctccggtaagcttttccatcttgccggtcgggatgatggcaaagtggtcgcttacctttttcgtgtcaaacacgcgccggttgggcttgatgcgcttgttgtccaggatgtccttcgcaaaagtggcgaattccgggtcctgctccgccaccgtgcccacgatgccgtagaccttgcccagatagtcctccggcaggtagcgggagtccgtacggggataggtgagcaccttgtgcttttcatagcactcctgggccagctgcagcgtgcgcttggcggaaaagccgtagcggttggcggcttccctctggagggaggtcaggtcatacaacagcggggcgatggttgtgacgggtttcttttcctccgtcaccgtgccggatttgccgcgacagcggtcgcggatgacggtcgcctgttccgggtcccagatgcgttccgcgcgggactgcgggttgtcgtcctttttccagtcccggtcaatccagcggccggagtaggagccggactgcacgccgaattccgcccacacttccgaatagggcaccggttcaaacgcctggatttccagttccctctgcgtcagaatggccagcgtgggagtctgcacgcgtccggcgggggtgacgttgaagcctccgcgggattgcaggatggtaagggcgcgggtgctgttcaggcccaccagccagtctgattcggaacggcacacggcggcgttcgtcaggggctgcatgtcggcctcgctccgcatgctgtgccacgcattcaggatggcttcatccgtcatggactgcatccacaggcggcgcgcaggcttggtccattttccgtaacgcaccaggttgtggaaaatgagctctccttcgcgcccggcatcgcatgcgttgacgatttccgtcacatccttgcttttggcgagctggagaacctttttcaggcggtcttccgactgcttgatgggttccagttcaaacgtcctggggatgacgggcagatagtcgaacttccatggcagggacttgccgccctccgtcatgggcttcttctgttccagcaggtggcccacggcggacgtgatgatggcccggtcattctggtaaaacgcgccggatttgtcccgggtgaatttcccaagctccttgccgaggactctcgccagatcagtggcgacgctcggcttttctgctataattaacgttttggacatatcggcggctcggaaaaatagaagtggtaaacagtggcggcaacctttcccgcatctgcggcgcgttgcatttggaggtgaattcctactcccctaccccccatgcttgtcaataaccaattatgtatttacgggaaaagcgagcttttatgtcagaataacggattttcccgcctccattttccggaaaagccgcgctggcaccttgccagccatcttacgccatgctatttgtgggatgatgaaaacgagccttcctttcgtcctgcttcccgcctgcctcgcgctgctgggggcctgttcccccacgccgtccgaccgcatcgcgaagaatatgcaggcctatgaacagcttccgaaggagcagcaggccaaagtggcgcgcggagagctggaaaagggcatgtcccccatggcggtcctgctggcatggggggaacctgaacagaagatggcaggccggatgaacgggaagaatacggaacggtggatttacacgcggagcggcacgggctggtccgtgggcctgggcggaggcggattccgcagcagggattccggggtaggcaccgggataggcgtcacgatgcccctgggcagccgtccgcccgtttcctataatgtcctgtttgaaaatggaaaggtcatcggctgggaagccgtcaatggcttttaaacggcatttccccggataacgcttttccatccgttccgccccggcatctcccgcggggcgcaccgtttttcctatttgccggcggccttgacgatggcctccaccaggccgttgatgtcgtgcgttttcgcggtaatcgagggtgcgcgccccagctccttgagggttgccgtggtcacgggcccgatgctggcggccttgcagccgtccggccacggaagccccagcttgaaaaagttttctgccgtggaggagctggtgaacgtcacgatatccgccccccgctcccggaaagccgcctgggctcccgccacgtcctccgtttccgcttccgtcttgtaggcgatgcattcgtccacaatagcccccagggcggtcaggccgtcgtaaatcacgcgccgcgcttcctccccgcgcacccacaggaacgtgctgtgctcaatggttccgatttcctcgcgggcgtccttgaaggccttgacgagtccttccgccacgaattttttaggcatgatatccacggccagcccgtattcccggagcttcgcctccgttccgggcccgatggccgcaatcctggcgcctccgatgctccggatgtcctggtacacggcaaaaaacgcctggaagaagcgttccactccgttggggctggagaacaccagccagtcataggtatgggcgtgcaccacgccttccgcaaattcccgcttgttggaggggggtgccatgcggatggtgggcatttccagcacttccgcacccagacggcgcaggcgcacgctcaattccccggcctgggcgcgggtgcgcgtcaccacgatgcgcttgccgaacaggggcagtttttcaaaccagtccaggctgtcgcgttccttcaccacatccccgatcacgactaccgcaggggcgcccagcccggccttttgaaccttggcgggcagcgtcctgacagtgcccgtgaccgtgcgctgaatgcccgtggtggcccactgaatggcggcggccggcgtggacggctcctgcccgtatccggtcagggcttcgcagacgtccgccagcttctgcatgcccatcagcatgattttcgtgccctgcgctccggcgattcctttcaggtccagggaagattccttcttgttcacgtcttcatggcccgtgaagacggtaaattgcgtgcagtacttgcggtgcgtcaccggaatgcccgcataggccggccccgcaatggcggaggtaatgcccggaatgacttcaaacggcacgcccgcttcatgcagggcgtccgcttcctcccccccgcgcccgaagacgtagggatcgccgcctttcaggcgcaccactattttcccggcgcgtcccagcttgaccagcagggcattgatttcctcctgcggcagggcgtggcgggaagcccgcttgcccacaaaaatcctttcacatgcggcaggagcccagttcagcagttccgccgagctcagcgcatcatataccagcacttccgccgcttccaccagttcccgcccgcggacggtcatcagaccgggatcccccggacccgctccaagcaaataaacaataccctgttgcatgctgtcattcaactccatcacccgctttttggcgacaataaaccccgccatgcccggattcattccattgatggcagaattgtcacaagacatccacaaaagattcttgttttttgaataaatacaattatcacgtatttatgaatatttcacgtatacttacgaccactctcgctgccgcattcacccttccggctttggcggatattccggcctcccgagttcccgcccccgtgaaggaacaggtgcagaagcagtatccgaacgccggcgccatcgaatgggatttcgacaacgacgaagacgtttacgaggcggaattccacctcaacggcctggaatacgacgtcaagctttatccggacggcaccgtctgcctgattaaggcggacatgcgccttcaggatctgcccgcccccgttacggcggccatcgcccgcgatttcccggggtacgctccccgccgcgccaagcagatcaccgccaggggagccctgaagtaccgggtggactgccggtcagaaaccgccgccgtccgcaaactggagctttactatgccccggacggcaaacttctttcccagaaggcggacgattgaatgcgccgttcttccgcatgtttccgtatgacagaagccgggggaacctcccccggcggctgacacggcgccctctggattcaacaaagccttatgatataaggtcaaacttgcaatgattgaattattcaataccgacttcctttcctacacggcccaggcggcggaaaccgccccgcagcattcctataccatttactggatgattctgctgggctccatgcttctgagctggctggtcagcgcgcgcatgaagagccgtttcagcgaatattcccagattcccattccggtgacggggcgggaagtggcggaacagatgctgaaggacaaccacatcacggacgtgaaggtgatttccacccccggccacctgacggaccattacaatccggcggacaagaccgtcaacctgagcgagtccgtttacaactccaacagcattgccgccgcagccgtggcggcccatgaagtggggcatgccgtacagcacgcccaggcctatcactggctgggcctgcggtccgcgctggttcccatcgtccagttctcctccaatctggtgagcatcgtgctgatcatcggcattatcctgctggccatgggcggttccccgtgggtgctggggctgggcatcggcctgtttgccatgaccaccatcttcgccttcatcacgcttccggtggagtttgacgcttccgccagagccctgaaatggctggaccgttcccacctgatgaattacttcgaccacggaaaggccaagagcgccctgttctgggcggccatgacctacgtggtgggcgcgctttcctccctggccatgctgctgtattacgtgttcatcttcctgaacgcgcgcggcagggaataatcccaagcacgggcgcagcggcatacggggttccagcccatgcggataacgaggcttttcaggccctccctccgcaggaaaacctctttcagcctttttcccgaaagacggggagcacggaaacgtgctcccattttttaacgcatcaggcgcgggcagcggtcccatgcagggttccgtcttcccgcgccttccgcggcaggggctattccaggcgtttccgttccagcctcgtgccctatgcttcttccgggtgttcctgtttcctctttccggctgtcaggcggaagaagaggggaaccaggaagatcgccagcagggtggccgtaatgatgccgcccagcacccccgtgcctacggcgcgctgcgcgcccgccgccgccccgtgggcgaaggccagcggaaccaccccggcgccgaacgccagggaagtcatcaggatgggcctcaggcgcagtttggcggcggcaacggtagcttccatcacatccatgccttcccggtagaattccttggccacttccacaatcaggatggcattcttggcggaaaggccgatggtcgtaatcaggcccaccttgaagtagatgtcgttgggcatgtcgcgcaggaagacggccagcagggctccgagcaggcccaggggcaccaccaggatgaccgccagcggaatggaccagctttcatacagggccgccagcaccaggaagacgatcaggatggacaggccgaagagcagcgtggcctgggacccggcaagcttttcttcataggactgtcccgtccattcaaatcccacgccctgcggcagggtggcggtaatctgctccagggcgttcatggcgtccccgctgctcttgcccggcgcggaggagccgttgatggtgaaggaggggtagttgttgtagcgcgtgagctgcggggggccggccgtccaatccagccggacgaaggaggagaggggcagaagcttcccctggtcattgcggacatgcaggtcttcaatgtcattgccgttcaggcggctttttccgtccgcctgcacaatgatgcggcgcacctggctgtcatgcatgaagtcccccacatagctggacccgaacatgaccgccagcgaattgctgatttccgtaatgggcactcccatggagaaggctttttcccggtcaatggagacgtgcagccgcggcgtgtccgcctgtccggagaagtagacgcccgtcaggttggggtccgcattggcgcgggccaggagttcgtcccgggcttccaccatgcgggcatatcccaggccgcccttgtcctggagccggaagtcgaagccggacgtgctgcccagttccggcagggacggcatgttcagggccatgaccatcatctggcggtccccgccaaaacgggcgttgacccggtcaatgatcgcctgggcagagttgtcctctccggaacgctcgtcccagtttttcaggccgacaaacagcatcgccatgttggtgccggtgcccatgaagctgaagccgcccacggagtaggcgtattccaccggttcatgctgcatcaggtagtcctccacctcccgcagccgggtgctggtttcctcctgcaaggtcccggcaggcagggcaaccatcgccatgaagttgccctggtcttcttccggaaggaaggaggtgggaagcgtgaggtacaggtagccggcccccgcaatgatgagcacatacaggaacagggagcgtacggggcggcggatgattccggatacggcattgccgtaccggtccgtggaccggtggatggtcctgttgaaccatccgaagaatcctttcttttcctgatgctccacggaggaggctttaagcatggcggcgcacagagccggagtcagggaaagggccagaaacgcggagaaggagatggatacaatgagggtcacggcaaattgccggtagatgttccccaccgctccgctgaaaaaggccatgggcacgaacacggccacgagcacggcggtgatgcccacgatggcgcctccgatctgcttcatggcttttaccgtagcgcgccgggcgtccagcccctcctccatcatgatgcgttccacgttttccaccaccacaatggcgtcgtccaccagaatgccgatgctgagcaccatggcgaacatggtgagcatgttgatggagaacccggagagccacatcaccgcaaaggtgcccagcagggccacggggacgacgagcgtgggaatcagggtggcccggaagttctgcaggaacaggaacatgaccaggaacaccagcagaatggcttccagcagggttgaaatgactttctggatggagatttccacgaaatgggtggtttcatacggaatctggtaggtgacgccgggcgggaagtccctggccagctcatccatcttggccttgagcaggcccatggtttccacggcgttggagccgggagccatcttgatagccatgccggtggcggtctgcccgttgcagcgggagaagaacgcgtagctgttggagcccagctccacccgcgccacgtcccccagcttgacggaggaaccgtctgaaagcgttctcagcgcaatggaggagaattcctccggcgtgcggaaggcttcctccgccaccacgctggcgttgatgggggcggatttggaaacggccgcccccccgatgtcaccgatgatgatgcgctcgctctgggcggccacggcattcacgatgtccgtgggcgtcagtcccagcgcttccagcttttccggatcgggccagatgcgcatggacgtttccgcgccgaagagctccacgcgcccgacgcctttcacgcgcttcaattcagggatgatgcgcgcggaagcccattcccccagttccgtatcattcaggttccccgtggaggaaagggagatcatcgcctgaatgttgttggaggatttttccacgaacaccccttccttccggacagattccggcaggcgggattccacgattttcagcctgttctgcacttccacggcggcaatgtccgggtccgtgccctgcgtgaacgtggcggcgatttccaccgcgccgtcggaactgctggtggcggacatgtacatcaggccgggagctccgttgatttccttttcaatcacggcggtgacggcttcctccgtatcctgggcggaggcccccggatacgtagtgcgcagggtgatgaccggcggagcgatgtccgggtactgggcaataggcaggctgggaatggccagcagcccgatcagggaaatcaggagggcgactacccaggcaaaaatggggcggcgtataaagaaatcaggcataacggattattgctgggcgttggattgcggctggggcgcggcgctgcggaccttcatgccgggccggagggacatgatatggctgacggccaccttgtccccgtccttgaggccttccgaaaccagccattcccggccgttcagcgtatccgccttcacggggcgcatttccagcacgccttccgggcccacgacaaagacggaagccccctgcgcggtgcggatgacggcgtcccggggaatggcgaacacgttgtcccgcaccgccttctcaaataccacgcgcacataggcgccgggcagaagctcataatccggattggggaactgggcccgcatttcaatggtgtccgtattcgggtccaccgccatgtcggaaaagatgatcttgccggaatgggggtattcctccccattggagagcagcaggcgcaccttgatttcacccagcggcactcccttccacaggccggacaccacggcgcggcgcaggctgctgtactgggaggccggctggcagaagcggacatagatggggtctatctgctcaatggtggtcaggtgcgtgaattcgttctggttggcaaacgccccttccgtcaccagcgcgcggcgcacgcggccggagatgggcgcttccaccctggtgtattccagattcaggcgggcctgctccagagacgcggcggcggcggcatattccgccctggcccggtcttcctccgccatggcctgcttgtgctcccgcacgctgacggcgcccttggccaccagggaggaatagcgggcggccttgtcctccgcatccgccaacacggccttggcgcgcgctaccgtggccttgcattcgtccagcacggcctggagcggagccggatctatcttgaagagaaggtcgcccgggcggaccgtctgcccttcctggtagcagcgttcctgaatgattcccgtcacgcgggcgcgcacttccgcctgaaggtatgcctccatgcggccgggaaggttggcggttacgggaacctgggtgccgtgcaccgtgagaacggccacttccggcacgatttctccgggagaaccggcggccggactttcatccccctgccggcaggaggagagagctgccaaaaggatggtgcagaaaagaaggagactagttgttttcatcagtaatcatgctttataagacctcaagaaaccccggaaccacgcttccgacaagaccggggatttttcaattgccataagatgtaaagtatcccataatgggagagtcaagaggcaatgaaaagattaagtggagcggctttttatcatttgttgtaagctgctggcaacaagaatcaaatgaatgacgcgacgatttcgtcttcaggaagatttctcttgcatgcagcagccgtttccgccgggcgcgcctccggcgggaaaaaatcagtttccacgccaaccgcaatacaggatggacaagcagaatttactaaccataggcaatctgtccaaacagaccggcgtacatattaaatcactccggtattacgagcagctggggattctgcgcccggcccatacggacccggatacaggctaccgttattacaccctctcccagattcccgtggtggacgccatccgcgcctgcaccttcctggacattcccctgaaggagttcacctcctttctgaccgaggaccagcagagaatccattacaagaagctgatttcccacggcaccatgctggcgcaccagaaaatcagggacattcaggagaaactgcacctgctggaaaaattccagaagcagatggaccggatggaaggcctccggcgccatgaggggcagaccgtccacgccctgccggaaaaatattgctggacggccccttatgccggaaaacagcacagcacggattacaatgtactcatcaccaacatgtttgatgacattaaccgcaatgagctgaggctgggcgcggaagccggactcctttccttccaccggagctccggaacggaaaggttcctgtatgtggaggtggaagcgaccaaaagggacgcccggcagttaaaggaaatcgtgcgcctgcctgccgcctccttcctatgctccatcaggaaggaaagcgatatcgggaaggcccccctggtctttcccgaactttttgcgcaggagtatgataaaatcatcatggaaacggaattgttttccggagactacgatgtggtgcatcccaaattcgaactgagatgctcccttccgccggaagggaagtgaaccgggggattttttccggaacaggcaatgggtgaagaggatgtaaaaaacgcctttcgggaaccggagttccccgtccgcgcccctgccgccctgcggtgcagccggaacgtccgttcaggcccgcaggcatgaagtctccggaagtttcatgaaatggcattgcatttccccatgcagcatataaaataatggggtggcacattgcgacactacacaaccggacttgaaggaaagcgccgtcaaggcttacaaggccatgttgctggcgcgggcctttgacaccaaaatttccagcctgtataaagcgggcaaaatcacgggcggcgtttacctgggccgcgggcatgaagcgattgccgcctgcggcggcgttttcctgaccgccgggtatgacgtgatcgccccgttcatccgggaacaggcggcgcgcatcacctggggggaaccgatcattgaagcggcccgctcctacctgggctctgccctgggctacatgaagggacgggacgggaacgtccaccgcggactgccggcggaaggctacatggcgcccatcagccatctgggcagcacggtagccttcgtcatcggctgcctttttgccaagcggctggacggcaagcttcccggccccgtaggcgtggccttctgcggagacggcaccacgtccacaggtgcctttcacgaagccgccaacatggcgaacgtggaacaactgccgctggtgctcgtggtgaccaacaatcaattcgcctattccactcccaatgtccgtgaattcggggaagcctccctggcggacaggggccgcggctacggcttcaccgtgcatgaaacggacggcacggacttcatggctacgctggaaaccttccgcaccgccgtcaacaacgcgagggaaggcaggggcccccagtgggtgctggccaagaccctgcgcatgtgcggccacggggaacatgacgacgcctcctacatccccagggaattgaaggatgagtacgacaaaaaagaccccgtcaccgtcgcggaacggcaactgctggaagccggctggctgacgccggaagaagtggcggacctgaaaaagcagtatgccgatgaagtccagctggccgtggctaccgcgcagcgggaaccggagccggaccccttccgggaggactggaacgccacggtatggagaccttattaagcctgcaaacggaatattcccatgagcgtaacatacattgatgccattcacgacgcccagaaagacctgcttacggaagacaaggacgtcttcctgtacggacaggacataggcgttttcggcggcgctttcaaagcgaccaagggcctcaaggagctgttcccggaccgcgtgattgacgcccccatcagtgaggacgccatggccggcatggtcaccggagccgccgtcatgggcaaaaagcccatcatggaagtccagtttgccgacttcagcaccatcgctttcaaccagatcgtcaacatggcggccacccattactaccgcacgggcattcccgccaacatcacggtgcggctgccctgcgggggaacgcccggcacgggccccttccacagccagagcctggaagccctgttcgcccactatccgggcctgcacgtcatgaccccggccaccgtggcggacgcctactggatgctgcgccaggccgtggaagtgcccgatcccgtcatcttcctggagcacaagttcctgtaccgctggctgaaggcggaggacaactaccgggaagccccggtgattcccttcggcatggcccggatcgcccgcaccggaaagcacgccaccgtagtggcgtacagcgccatggtgccggaagccgtgcgcgcggcggacctgctggcgaaggagagcggttatgaagtggaagtagtggacctccgcacggtgcgcccgctggacatggacaccgtcatcgcctccgtagcgcgcaccggccgcgtcctggtcgtcggggaagactttccgtgggggggcgtcacgtcggaagtcgtttcccgcatcgtggcggaaggcttccatctgctggacgctccgccccagcggctcaacgccagggacacccccatcccccagcatcccaacctgtggaaggcgcaccgccccacgctggaatccatcgccgcctccatccgccatcttttatccatctgattcaacccagtttccaccatgcctaaagtacccattctgatgccccagctcggggattccattgcggaagccaccgtgctgcgcctgctggcggccccgggcgacaccgtagaagccgaccaggaaatctttgaggtagagaccaacaaggccaccatgggcgtcaccaccatgtgcggcggcgtcctgagcgacgtgtttatcaaggaaggggaatccatcgtggtcggcgcctgcatggccatgattgacgccacggaagaagaaattgagcgttccggggccaccccggccggtgactccacccagccttcccttccggccagcccggaatccgtgccccagcgcgtcccggacgcttccgcccgggaggaaaagcccgccggggtccactttggcctgacgggggaatcctaccaggaaaacggcacggacctgaaagtccagcccagcgtgcgcggcctgccggtgcccgccggcatgaaaggcgcgcactacatgtccccccggatgaaggcgcgcatggatgaactgggcatgagcgcctcggacatcgctttcatctccggctccggagccggaggacgggtcaccattgacgacctggaggaattcctggaatacgtgagccagtggccgcaccgcaaggcctcctccatgcggctggccgtggcggacgccatgcgccggagctggacgcgccccctggcctccgccgggcgccccgtgttcatggaccccctcatcaagcacaggcagcattccccgctgcggcccggcatcaccctgtactttgcccgcgccctggccctggccctggcggaaagcccggaatgcgccggctacctggtgggggaaaacatcctttcccccaagaccattgacatcggcatcgccgcccaggtggcggacggagtgatggttcccgtgctgcgccgcgtgaacgaacggacgatggaagaactgctggaagactacaacaggctgatcgcccaggcgcgccgccgcaggctggccccggaagacagcacgggcggcatcgccacagtcaccaacttcggcggcttcgggctcacctttgccgcccccatgcccatgcccagcgaatccatcatcctgggggtgggcgccgtcaccaagaccccggtctggagcgacgaggtggaggccttcattcccatctccaaagccaacatcgtggctacgggggaccaccgcgtggtggacggcgcggacatcggccgcctgctcaagcgcgtggcggaactgctccagcgcccggaatacctgtaacccgctccgttcccgcacgctttacgccgcatgacgacagacccacccgtactaggcctggtagccggagacggcgtctacccggaatacatcgtccggggggcgcgccgccggacgccggagctgcgcatcgtggccgtgggcttcaagggggagaccaatcccgccgtcattcccctgtgcgacgcttaccaggaattcagcgtgggccagatcagcaagccgttctccttcctgaaaaagcacggcgtgcggaacgtcattatggcgggaggcatcaacccgaagaacattctctccctccgtccggacctccgcgccctttccgtgctgatgcgcatgccggagaaaaacgcggactccctgctgggggccgtcatcacggaggcggaaaaagaaggcttcaccatcctccccgccttcacctacatggaagagcacatgccgcagccgggccacatcgccggaccgcgtccctcgaccgaacaatgggaggacgccgttttcggcatgcagatggccaaggaaatcagccgccttcacatcgggcagtccgtcgtcgtgcacggaggcaccgtagttgccgtggaagccattgaaggcaccaacaactgcatacgccgcagcggcgagctgggcaacggcaaacccgccacactggcaaaagtggcgcgcctggggcatgacatgcgcttcgacattcctacgatcggtcccgtcaccattgagacgtgcgcggaatgcggcgtcaggcaaatcgccctggaagcgggcaaaaccattctgctggagcgtgaccgggtggcggaactgtgcaaaaggcacaaaatcagcctgcatgccatggacgcttccggggagggcttccctcaaccggaaaatcccgcccaataaaaatcccctcgtccggaaacccggacaaggggaaatcatgccgcatacgggatgcagaatagaaaacggcttattcaaccgccagaattaagcgtttttgtccttgtccatcatggacttggccttgtcacttacgccggaagccatatccttgacgccttccttgctcttttcgtaggcgtctttcattgccttcttgccttcttccatcttgccggaagcggcatctttcgagcatccacagccttcatgcatatggttcatatgatctttggagtcacacataataaataaatggtttgtattttaatcgtttgagttaaccgtttttcgcagcgtcgccaatggcttcggccttatcggcagccctgtccgccgcatggtccacggcttccttgctgtcctggtaagtatccttgacggcttccttgctcttttcgtaggcgtccttcgccgcttgcttgccttccttcattttttcggaagcggcgtccttggcggctttggcgccctttttcatgtgttccttggcttcagccatgtccttgtcacccttggtgcaggaaccgctgttgcaggcgctctgcgccagggccactaccggaactgcaacggctaccgctgctatagcatatatcaattttttcatgacgttgttctatttggattcattccaatagactctttcttcatgaaaatctatgaatacagtcgtgtcattctgcgttcactcctgcaaatcaaaagccataaacgccgcggaggcaacgcagtcccggcacggaacgcagccttcttttttcagctccctgcaatgggaataacccagcttctccacaaaccgccgcttcagctcctcccttgactgcacgggcgtgcacaggagcgctccatacaaggcgccgcataccccgtcaggcgctcttcccgtgccgcacgcggagacggcttccagcaaatcctcccttcccagggccgcgcaaacggcctgggcgcaattgtggcgccagggttccgtgcggaaggtggacagcgccttttcttcaacgttcatgcccccactgtaggcccggcccccttccgggtcaagagccccgtcccgccttaccacctgcaaactccgccgccgcattccgggtgaggaaaacataagccctccggaaaaccgccggcagcggcgtttacttcccggcaagccggcggctggtctccaggcgcgcggccagctcctcaaaggggacggtcccgtccaggcaaaggctcacccagcttttcttattcatgtggtaggccggaaaacggctgtgatggtccacaaggccctcgagctccccagggcggacccgcagattcagcacctccaccctttccctggaactgccgcccagtttcaaccgcggcacagccagaaaaacggcataccatttttccgtgtccttccgccgcacgacagcgcttcccggcgacttcctccacaggaattccaattcatccccgtaagcctcccggacatgcgcgacgaggctccgggcaggatcgcccttgaagaaatcaggttcaaagcagcactccgccacatgccacagctcttcctcatattccctgcggagcgccctctcccgcaacctgtccgcctctccctgagcaagatgagggatactcttcccgtccgcatcacgcaccgttacgctgacggagccctccgcatgtatttcaaattccatacagagctgcccgttcagcagctttgtccggtacagaaaaccattttccccgcgaacgcagccgaagggaggcaatttttcctcacacaacctcctgtccctgaaaacgcgttccacggctttttcataccagcttttccggggaatgcggcgaaagaacatgaggaaaagaagttaaaggagatggaaggatggaaaacgccagctgcacccctgcgggcgtgcagaacccggccaagccatgataaatccgcacgggaacggtacaaggccaaaataacctgcgccccatgtccggggcgcccgcatcgggaaaagagtttttacctccccgtcagcacataccacacgaacaggctgttatgcttcacgtaccgcttgagcagcctgcccggctcccggtaaatgcggtacagccattccaggccgtttttctgcatccaccggggcgcgcgcttcaccgttccggcatggaaggcgaaggccgctcccacgcccacataaaccgcgggaggcagcagctccttctgctccgccatccaccgctcctgcttcgggcagcccaggcccacccacaccacattggccccgcttgaggcaaccgcctcccgcatctccctccggtcttcctccgtccaggaacggaatggcggggaatgcacgccggccagatgaaaagccgggtacttctccttcaatgcggacgccagggtctccagcgtcccttcatctccgcccagcaaaaaatggcgcagacccggatactccgcattcgcccgcaccagggcttccatcaggtccggcccgctcacgcgttcggcgctcctttcccctgcgggaaggcccctgttcagcttccacaccacaggcattccgtccgggcaaaccacgtccatccgttccagcacgaccccataaccccggtcatgaacgccgagggttatcacgtgcacgtccgcggcggccaccaggcacggggcctgcgcttccagggcacgttccgccagggcagagctcatttcctccacggagctgacggccacggaaaagccgaacacctttctggtctcgcacggcatccgcgcgccgggctggtcagggttgtttgcagcagtcatggcctgatggaaatgaagggtgaaaatcacggcagggacagcctcagcccgtcgtaggcaggcatgacgttctccggcagcttgccggaaagaatcccgtaatccatgtcgtgggacatgtgggtcagcacggcgcgcccgggccggatggcggcaatggcggccagggattcctccaggcacaggtgcgtggggtgcagatgatagcgcaagccgtcaataatcagcaggtcaacccctttcatggcctccagggaggcctccggaatgcttttcacatccggcatgtacgccagccgctgcccttccgcctccagcacataggcataagtctccaccccggcatgcattacggaaagaggcgtcaccagcacattccctacacggaacggttccctcacttcgtgaggttccggcctgacgtagccgctccggcccggtttcggttcaaacgcccagccgtacatggtccgcagggcttccatcgtctgcggtgaggcgtacaggggcaggccgccggacctgcgccagcagaaggcgcgcagatcgtcaaagccgcccacgtggtccacatgggcgtgcgtgtacagcacggcgtccacgtccgtgatattttcccgcagggcctgctgacgcagatccggggaggaatccagcagaatgcgggtgcccgcggcctccacgtaaactgaagaacgcaaccgcttgtttctggggtccggggacgtgcagaccgcacaggagcaacctatctgcggaactccggtggacgttccggtgcccagaaagagaatgttcatcacagaggtcatgattgcgtttagagcaaatgatgccataatgcattcaaaatccaaagcccgaatgcttacattgctgaaaattagaaacctggccctcgtggaccagctgctctgggaacccagctccggtttcatctgcatcacgggggaaacgggggcgggcaaatccgtcatcatcggcgccatacggctggcgctgggggaacgcgcggacaaaacgctcatccggtccggagaacagcaatgcagcgtggaagccgtgttccatctgccggaatcctcccccgtgcacggcattctgaacgaacacggcgtgccgccctgcgaagacggcaacctgattatcaagcgcattatttcctccacggccaaccgccagttcctgaatgacagcccgtgcaccctgaacctgctgcgggaggcgggcgcctgcctggtggacatgcacggccccagcgaccaccgctccctgatctcccaggagaggcagctttccctgctggacgcctttggggagcacgcccccctgctgcacgcctacgcggacgcgtggcggcaatggcaggacgcgcgccgggcctatgacgacctggagcatgcggaagcggccaccgcgcgggaaatagagctgctgcgccaccaggtggatgagatagacgccgccgcctttacgccggaggaagtgctcacgctggaagaacgctggcagcgcgcccgcaacggcaccaggcttcaggaacaggtttccagaatgcttgccatgctggaggaaacggacgtgcccggcctgggttcccagttgagggaactgacccgggcggcgcacgaactggaacgcatggacgcctccacagccgcgtggctggccccgctggcggaagtgaatctggagcttaaggaaattgaaggacgcctggcggattattcctccgagctggattgtgatccccgggagctcttccaactggaggagcgcatcaacctgctggaatccctgaaaatgaaatacggcccttcctttgaagacgtctgcgcccggagggaggaggcggcccaccgcctggaccgcatcgagcaccgcacggaacgcctggaagagctgcgggcctccatggccgtcctgcgcaagcaggtggacgccgccggacaggccctgaccaaagcgcggcaggcatccgcgcccaaactggcttcctccatcgtcaggcattcccgggaactgggcttccgccaggccgtctttgaagtagggctctcccccctccaggaacccggctcccagggaatggaaacggtggaattcctgttcggccccaatccgggcgaaccctccaagcctctccggctgattgcctccagcggggagctggcgcgcatcatgctggcgattaaaagcgccctggcgcacaaagactccacccccctgctggtatttgacgaaatagacgccaacgtgggcggggaagtggcgcgggccgtcggcttcaagatgcagcagctcgggaacaggcaccaggtcatctccatcacgcactttccgcaggtggcggccctggcctcccatcactacctggtccagaaggcttccgcgggcaaccgcaccatctcctgcctgcgggaggtgagccatgaagaccggatagacgagctggtccgcatgctgggcggcggcggggaccacgcccgcacgctggcccaggccctgctgcagccctcctgaacggaggacgccaaaaaggaagaggccgccttatttttccagacggggcttgaagccgcgcagccgcagggaattgaacaccacgcacagggagcttaaactcatggccccggcggcaatcatgggattcagcgtaaggccgaaggccggatacaggcacccggcggccagcggaatgccgatgatgttgtaaaagaaggcccagaagaggttctgcctgatgatgtgcagggtggtgcggcccagttgaagggcttccgccacgcccacgggattgctcttcatcagcacgatgtcggaggactccatcgccagctccgttccggacttcatggagatgcccacccgggcgcaggccagcgccggggcgtcgttcacgccgtcccccaccatcgccaccttgtccccgcgttcctccatcttcatcacatgggaggccttctcatccggaagcacgtcggaaatcacttcatcaatatgcagttccccggccatgtgccgcgccgtggcggcattgtcccccgtcagcatgaccacgcgcaggttcatccgcttcagataatccaccgccgcccggctgtccggtttcagggaatccgccaccatgatcactcccgcaggacggtctcccctccctacatacagcggggacgcgccctgccgcatgaactcccggaggcggccttcctcctccttccaggagatgcccttgtcctgcatgaagccgggattgcccaccgcatagggcacgccgtccactacgccggaaatgccgcggcccggcacaacggataaatccgccacggcgcggatggggagttccagcagcctggcgtgttcataaacggctttccctaccggatgttccgatccctgctccaaagccgccgccatttccaccagttcatccccattcatgcccggctccggcagaacggccaccacacggggctccccttccgtcagggtgcccgtcttgtcaaaaacgacggtatccacgcggctcaaagcctccaaagctccggcggacttgcacaggatgcccagccgcgcgcccctgcccgtccctaccatgatggcgatgggtgtggcaagccccagaacgcaggggcaggaaatcaccagcaccgcaatcgccctggcaagagcgaaggaaaatccctccccggcagccagccacgcaaccaacgacaccagggcaatggcaatcaccgcagggacaaagaaataacacacccggtccgccagccgtgcaatcggagccttggactggctggcctcctccaccaggcggatcatgcgggccagcgtggagtccctgcccacgcgttccgcacgtaccttgagatacccggcccggttgaacgtgccgctgatcacccggtctcccgccgtcttgtccaccggcatgctttcccccgtcaggtccgattcatccagcgcggcctgcccttcttcaatgacgccgtccaccggaatcctctgcccggttttcaccaccaccaggtccccggaatgaagttcatccagcgggacggcgcgctccgcgccgtcatgccaaaccagggcctcctggggaaccagcttcaccagccctttcacggcggcgttcgtcttgcggtaggaacggcgttcaagatatttccccagggaaatcagggtgacgatcatggccgcggattcaaaatacagttccattccgtccacgttggcgccctgccacagcgccgcaatcaacagatacagcccgtacaggaaggcggaaccggagccgatggcgatcagggaatccatattgggagacagcgcggcaagctggcgcacgccgttgattaaataatgccggttcagccacagaatcgcggccgccagaatgcattgcgcccacaaattcatccagagcccccagccccctcccggaacgggccagtgccacatgggccccatggacagatacatcagaggcgccagcagcagaacggaccaaacgaggcgggagcctcccgtttcctcctgcccctggctttcctccccatccgcaccggaaaacggttcctcccgccagtccgccaggtggaagccggctttctccactacggacgcaatgcgccccctggcgggcgaatctggcttttcaaacagaacggtcatccgccccgtcagcaaattcagctctacgcgctccaccccctccaatccctccacggcgcgctccaccttggcagcacaaccggcgcaatgcatgccggaaacaagatagttcttttcttccattgtcgttaaaacggagtgtttgattttccgggaccaaagaaggctcccatgttgttaggtgaaactaatcccatcaatcccgtttctcaagccgctttcgcggcttcacccttttccaataaaaaatgacaaaaaaacgcccgcggccccgtaacagtaacaaacaccttcatcccttcataatgaccgctcccaccctgttccgagtcctggcctgcacggccctgttgtccgcccccctccatgcccagctttacaccctgcacggggacggcgtcaaaaaaaccgagagggtggtggaaaaagcggattattccgattacgaactcatctggcacgacgagttcgacaaggacggccgcccggaccccgccaagtggaattacgaacacggattcgtccgcaacaaggaggaacagtggtaccagccggaaaacgcccggtgcgaggacggcatgctgattattgaaggcaaaaaggaaaaacacgccaatccccattatgacccggcgggaaagaattggcagacgacgcgcaaggaagcggattacacctccgcctccctgaccacgcgcggcaagttttcctggctgtacgggcggtttgaaatccgggccagattcagcccgcgggagggcatgtggcccgccttctggaccatgggcgtcaaggaaggatggcccatgtgcggggaaatagacatcatggagtactaccagtccacctacctggccaacctctgctgggcctcccccaaaaaacacgtgggcaaatggagcactacctacacgccgctcaaatggctccaggaaaggcatgcggactgggcggacagcttccatgtcttccgcatggactgggatgaaaaggaagtgcgcctgtatgcggacgacatcctgctgaacaggacgcccctggacaacaccgtcaacgccgtttacaaggaagtcgccaatcccttccgtcagccccatttcatcatcctgaacctggccatgggcgccacaggaggcgatttgaataaactgcccctgccccagaagtatgaaatagattacgtccgcatataccagaagaaggattccccccacaagggcaccattccctaccgggcagagaagaaaaaggatgctcccgtggaactgtcccgccttcagaaagcgctagacgaatagggaaacgtgaacggccaggggcgcatggaacggatagagcaaaaagggaattccggcttcgccgtatccgtaaggtccatccagtttctttaaccccttccaattcatataaaagtccctgccttcgggaacggggggcggcctgttactcggcggccttccccttgagcaccaggagaatgtgttccgccatgagggcgtgcccttccgcattggggtgcacgccgtccaccagcaggccgcccttgtccttcatcaccttgttgaggtcgatcaccctggatttggtgctcttggccacctgccggatgagcggaatgatttccttttcaatgcattccctgctgatccctccttcccgggcctcctgggagggaatgggcagcaggcagtataccttcagtttgggattctgcttgcggaattctgtaatgatctccttgtaattgtttacaaaatcatccttgtggctccaattcacttttttgctgtcattggtgcccaggcctatcaacagcatgtcaggcttgaacgccagcgcgtcctgataagccttctcccgcgtgatggggcggtcccccttgaacagcaggcagcgcgccgatacgccgaagtttcctacttccgccttcctgtccagggtcttcgcaatccgggatacccagcagtcttcctttttaacccccatcccggcggtgatgctgtcccccagacaggccagcttcactgcggcggcacaatccgccggcagaaaagcggccagcagccctatccacaacaagacaataaactttttcatggagtaaaatattacaatgaaaatggcttactggacgcggcttcaaatgtaaagcccgtactccggcccgtcttctggtctttttccgcgccgtcccctcatgaaaaagccccggccggataaaacccggacgggactcttcaaataacaggaaaagggaacgtttaattcacgcggcccaggtaggagccgtcttccgtctttacggaaatcttttcgccgggcttgatgaaaaggggcacctgcaccaccaggccggtggtcatcgtggcggacttgtaaacgttgttcgcgctgtcgcccttgacgccttccggagcttccgccacttccatggtgatggcggcggggagttccacggaaacaaccgtctcatccgtgaaaagcagaatgtagatgttgccttccatcaggtaatccttgacgggttccacgatgtccggagacacggtaatgtcttcgtacgtatcggggttcatgaagtggtagcccatgccgtcaatgtagctgaactcatattcctcacgggcgaggttcacgccttccagggattcattggaagtcaggcgaaggttatataccttcttggtggaaatgctgcggatgctcatttgcacgtaggaggccatgcggggggggcacttgtgctccatgctgaccacgacgcaaacgtcattgttatgattaaccgcgtgtcccttgcgaagattgattacgggtacttttgccatgcggcccgtaccataccatgttttcccctcccgtcaagccgaaaaaacgcgccaaacccttgatgcgcttggagaaaacgcctttgctcgggtgaccggaaaggccggaaaaaccatcgttcctaccggctgagatcctgctggaacaggaccttgatgccgctggaattcagcacggtgcgcccgaagttgaggtcatccacatggagggcgaccagggagccccgcgccatgcagggcatcagggggtacaggaagttgacgttcatttccgcggcatacagcacatccaggcacttcttgaggtccgcggggccatggcggagaaccgccaccagaacctcggactccgtgtagcagatgcccttttccagaaagatttccgacgttcgttccggatcgctgacaatcaggcgcgcaatggtcgcctcatggcagtcgtgcatgctgaaccccaggcagaagatgccgtgcatgtccagcaggccgaggagggcggacagcgcccccacccggttctggagcatgatggaatattgccttatcgtactgccgggggctttgatggcttcttccttcatgacaataaagcaaacggggttgagttctatttaacgtatgtcttaagcacgcgcctgatgatggcaagcgcctgctggacttcctcttcactcacgttcagcggaggcagcaggcggacggtttccggcccggcgggaacggaaagcaggccctcctgccgcagggcctccaccaccacggcggcaaccgtcttgccttccggcgcgtccaccatctccggattgaggccgatgcccagcaacaggcccaggccgcgcacgccctggatcacgggcaggttccaggattctatttccgcgcggatttccgcgcccaggcgccgcgcccgttccgggagcccctgggagacgatttcccgcagcacggccaagccgaccgtggtgccgagcggattgccgccatacgtggagccatgggagccgggatccatgatggaggcaagctccgtgccctggtcgtcaatggcgcggtcggaaatccagaagccgccgatgggaaaaccgccgccaagagccttggcccaggaaacgccgtccggctccacgtccggagccacggcgcgccatcccatgatgtcgccgcaacggccaaagccgcactgcacttcatccatcagcaggagaagatcgtgctccttgcacaattgtgccaggccgcgcaggaattccggagtcacgcagttgacgccgccttccccctggatggtttccagcatgaaggctactgtttccggcctgatggcttcgcgggccgtttccaggtcattgaaaggcagatggcggaatcccggcagcatggggtcaaagcctatcttgattttatcctgccccgtggcggacatgctgcccagcgttcttccatggaaggatttgttgaacgtaagcacttcataacggggtttgccgtccgcctggggcttccggtggccgtagcggcgcgccaccttgatcaagccgtcattggattccgcgccgctgttggagaaaaagaccttccccggacgctccacgcatttggtcacgatgaattccgccagatccgcctgctggggaatctggtacaggttggagcagtgcaccagcgtggccgcctgcttttgcagggcctgcgttaccacgggatggcaatgccccagcgcgcaggtggcaatgccggcacagaagtccagatagcacttccccgtgctgtcccacagtcgggagccttccccgcggacggcagccatgggataacggccataggaatggagtacgtaccggttgagtttttcttctgtgttcataagctaaggtaatacgcgtgtagtttgcgcttctggccccgtctgtaaatgatttttttgggagccacgtcatgattctcacattttatcccggcgggtagtcatatctctgttcggcggcatttcatttttcttttcttttatccttttgccgccagaataaatctacaaccagcagcaatccatcatggcacattttttcaatcccaaaggttttctggaggaattcaaggcattcgcccttaaaggaaacgtcattgacctggcggtggcggtcgtcatcggcggcgcgttcaacaaaatcgtttccgtcttcgtctccagcatcattacccccatcatcggctacctcacctccggcgtgaacctggcgtacctgaccctgaaactgggggacgtggaattgaaatacggggaattgcttcaggcgaccatcgacttcatcatcatcgccttctccatcttcgtggccatcaagctcatcggctcactgaggcgcaagagcgaagaaacgccagcagcccccgcgcccaagccggatgacgtcgttctgctggaacagatccgggacatcctgcaaaaacaggcggacgtcaaataaggccgccaacagcatttgtgccggtttcccgctgaaccggcacatttttcctctttacttgttccgccgcgggcgggaaagtggcagcatgaattccctcctgcgctcccttgcctgttccctgttgcttgcgccgtccctgcttccggcggcggagacccagcgcttcgttctggaacgcccctaccaggtggcggaaattccggagcctgaccggaaactccctgccaccaacgtcatcctgatgattggggacggcatgggcatccatcacctttccgcggcctgggcggccaaccgcgggcgcctgttcattgaaaactgcccggtgacgggcatctccaaaacctggtgcgcggacaagctggtaacggactccgccgccgcaggcaccgccatggcgacgggaaccaagacgctctacaagagggtggccgtgtgccccaggggcaacaagctggactccctggtggacaaggcggcggacatgggcaaatccaccggcgtgatcgccacctgcgagctgaacgacgccaccccggccgccttctgcgccaataatgaaaaaaggtcggattcctacggcatcatcggggattacccccgttcccgcgccgacttcattttcggcggcggcggcaagtatttcacgcaaaggccggacgggagggacattttcaaggagatgcaggcgcagggctaccggatcgcccgcagctgggaggaagccgccgcactgccgcccggaaaaacgctggccgtcaccgctccggggaatcttcccccgccctccaggcggggagacgttctgcgccgggccacgctgaaggcgctggataccctatcccgtaatcccgagggatttttcctgatggtggaaggctccaacatcgacaaggccgcacacagcaacaagctggaggaaatgatggaggagctcctggattttgaccggacagccggggccgtgctggactgggcttcaaaacaccccggcaccctggtcgtcatcacggcggaccataacacgggcgcgttcgcactcacaggcggcaaccgggagaaaggggaaataaacgcccagttcggctccggcaatcacgacggcatggccgttccggtgtacgccttcggcgcgggaagcggcgcgttcaccggcatttacgaaaatacggacatcttccacaagatcatggaggccttcaaaaaagggacgttcaaacccgcacccgggcgttagaacttctgtcaggctccgttccgcccctgctcatccatgtgccgcgccaccagcccggccccggcggtagccagaccgcctatcaggaacaccgcctgcggaccgcccgtattcatccagatcacgccgcccagcacgccgtaagtaatggaagccacatggttgatggccagcccggtgtaaatgctcggcgtgatgtcctccggcttctcgcagatgcgggccacgtaagtgctgcgggccatgcccagggcgaacagcaggttgtccagcacgaagcaggcggtcaccacgcccacggcccagtgcagggggagcagctccggggcgaaggcatacgccaggcacaggagggacagcgcaatgctgtcgaaaatcgttaccttccgttccccgtaccgcttgatgctccagccgatgaggggctgcgtgaccagcccgatgacgccggcaatgagcagggtttttccgatgtatccgggcggctggcccagcgtgctgaccatcagccagaagccgaaggtcagataaagctgcttgcggatgccgtgcaggatttccagcccgtaataaacggcatacctgcgcttgaagacgaagcactgccgccagccgcgccgctgcggaaagacgggcgttttcacccggctcaggaacaggaacgccagcaggcatacgccgcccgtaacgaaaaagtctacggcaaaagactggttgaatttccacttgatccatacgcacagcgcgcccagcagcgcggccgccgtccccagcgccttcatctggccgagccgcaggctgcggttctccggcctcgccgtatggatgacgatggtgtcaatcatgcccatcagaatgtgctgccccaggctcaccgtcagaatccacgcagacagcgcccacaggctggttccggcgccgcagaaggccagcgcgtacatgccgccgaacatcagcaggcacgccaccccggccatgcgcacctcattgaacatgaaaagcaggctgaccacaaaaagggacaggatgccgggcagttccctggggagttcaatgaacccgcgcatctccacgtccagatgctgggcgtcacgcaggaagttgctgaaaatgagatcatacacgccgcttccgaactggcccagaaagagagccagcagcacaaaaaccatcgtcttcctgatgcggggggaagcggctttactcatagggcggggatactctcacaggcgcacaggcggagcaaccgctatttttatccgccggcctttcccggcatttgaaaaaaacaatcgccggaacagaattttttcgggaaataccacgtagttacgctatgatttccagacaccttttccctgccatggctttcagcttatcctccctctgctggggcgccccgtccgctccggttcccgggacgccccacatcattccccagcccgccgccatgcgcgtcaaaaccggagaagccggattttccctgaaagacggcgtccggctcccggaaggaaatcccctttccaaacaggcggaacggattttccgcgacaacgggatcaaaacggcgctggttgaaaccggagcggacctcatctttacggaagacgcgtccctgggcagggaaggctaccgccttgccgtaacgccggattccatttccattgcctccggttccgtgaacggcgctttgtacgcccttcaatccctcgtgcaaagcgtcgcggccgacgggaacggagctccggccctgccccggctggacgtgaaggaccagccccgcttttcatggcgcggcctgatgatggacagttgccgccacatgatgcccgtgcgggatatcaaaaagatcctggacctgatggagaggtacaaattcaataccctgcactggcacctgacggacgaccaggggtggaggctccccatcgccaagtaccccaggctgacggctgtgggaggtacccgggcgcagtcccccgtcatcggcagccgcaacaaggcggacggcaccccgtactccggccattacactgcggatgaaatccgggaagtggtccagtacgccaaagaccgcggcatcaccgtcattccggaggtggaactgccgggccacgcctccgccgccatcgccgcgtatccggaactgggcaacacggacattccgggcttcgcgcccaaggtgcaggaaacctggggcgtgcttccctacaccttcgctcccacggaaaaaaccttccgttttctggaagacgttattgatgaagtgtgcgccctgttcccggacagcccctatatccacatcggcggggatgaggctcccaaggaccagtggaagcagtccgccgcggcgcagcaggtcatgaaggacaacggcctcgccaacgagaacgaactccagagctactttatccggcgcgtggaaaaaatgatcaacagccacggcaagaggctcatcggctgggatgaaatccaggaagggggcctctcccccaccgccaccatgatggtctggcggagctggatgccgaacagcgcgcggcatgccctggaacagggcaacgacgtggtgatgacgcccaacagccacctgtacttcgactatgaccagggccccggcaaaccctccgccccggagtatgaaaccatcaacgacgacaacctgacctggcagcgcgtctatgggctggagcccgtcccgcagggaacgccccgggaacgggaaaaacaggtgctgggctgccaggcgaacatctggacggagtacattcccaacctgccgaaatgggaataccatgccttcccccgcgccctggcgctggcggaagtagcctggacccccaaggagctgaaaaacgagaaagacttccgcaagcgcctcgaccgccagcttcccttcctggacgcccatggcgtcaactacaagaggccggacaacggggcccccgcgcagccggacgccgccattacccgggaacgccggtaaatacgaagggaaggcccccgcgcagcctccttccggaggccgcattatgggctagccaaccttcacgaaaaccattacattggcggcattatgaatttggaactgcttcgtcaggtttgcgtgactccgggcgctccggggtttgaagacaaaatccgtgatttcatcattcaggaagtggcccctctggtggacgccgtgcgggtggacaacctgggcagcgtgattgccatcgtggaaggcaaggatacggaaaagaccatgatggccgccgcccacatggacgaaatcggcttcatggtccgtcacattgacgacaaagggttcatcaaattcctccccctgggcggctttgacgccaagacgctgacggcccagcgcgtcatcgtccacggcaaaaaagacctcatcggcgtcatgggcgtgaagcccatccacgtgatgtccccggcggaacgcgccaagctgccggaagtgaccgatttcttcatcgacctgggcatgagcaaggaggaagtggaaaaatacgtctccgtgggcgactccgtcacccgtgaacgcgacttggtggaaatgggggactgcgtgaacgtgaagtccctggacaaccgcgccgggtgctacgtgctgattgaagccctccgcgccatcaaggcttccaaaaagaagccctcctgcaacttcgtggccgccttcaccgttcaggaggaagtggggctgaggggggcgcaggccggcacgctggacatccagccggacttctccatcgccctggacgtcaccatcgcctgcgacattcccggcaccccggcgcacgaccaggtctcccacctgggcgcaggtgccgccatcaagctgtatgacggctccgtcattgcggaccgccgcatggtgaagttcatgaaggccatggcggacgccaacaagatcaaatggcaggtggaaatgctgccggcaggcggcacggacgccggagccatgcagaagtttgttccgggcggctccattgccggggccatctccgttcccacccgcaacgttcaccaggtcattgaaatggcgcacaaggatgacctggacgcttccgtagcgctcctgaccgcctgcgccatgaacgtggacaaatgggactggtcctggaactccgtcaacgaatgcccggcagaaaaacccgccaaggcatccaaaacggcatccaagccggccaaagccgccgccaggaagaaaaaggccaaataaaagccccggcgccaaccgatcactcacctgcaggccgccccggaaacggaggcggcctgcctgtttccggacgtcttcaagcgttccgcgcaatacgcccatggcgttgctccgtccagtcaagaaacgccgcagccccttgcgccagtcaaacctgaaattgagaggcagtgaactctgttccctgaagcagggcatcctgtcggacgcatgcgtttcagctgccgcagaggcctgaggcacgccacggaggcttttcaggacggcctccccataaaaaatcctccggcacccagagatgccggaggaggatcaatcctgaaaaagaaagttacttggcggcgggagcgggagcttccttcggagcgggagcgggggccggaacggcttccacttccacttcttcctccacttcaacgccttcttcgggaccggaagctccggtctgcttcatggcgtccttcagggcctggcttccgaagaagtcagcctgctgcaagcgctgcatgtcggtcatcatgcccatgaaaatgggcaggagttcggcctggcgcgcctgcatggcggcatccatttcagcctggaccttctgggcgctcttggaaagggcttcgcccttttcattgatcttcgccatcttttcagcagccgcgtctgcggtggccttgtccttcaccgtgctgagcgtggcggacatttccttcatcaaagccagcatctggtcagcggcttccttcgcttccttggaaacttcagcggccggcgcggtgggcgcggcaggggtttcagcggccggggcgggtgccggagccggggcatcctgggcggaagccatacctgcaaatgccagggcacatgccgaactaattgttacaatgctcttcataacgtttccgttgtacaggctcgccatgcatgcgtcaatgaatcattgtgtaacggctccccgtgatgccgcagaaaggggaatttgcgttttttcttcccttggaggattttttcagttgcatctttttagaattattataaattcattcccgatgactaaaaccatagaaaacctgaaagccgccattacgggcgaaagcaccgcctccgccacttacgcagcctatgccgccaaagccgcccaggaagggcagcccctcattcagaaattgtttgaagccgcctccaaggcggaatccgtccacgccgccaaccacaacaaggttctggaaaagctgggcgcaacgatggaccccatcgatatccagattcatgtaggaaccaccgcggaaaacctgaaagccgccatcgccggggaaacccacgaattcgaaagcatgtatccggaattcatcgccgtggcggaagaggaaggccagaaagccgccgtccgctccttcacgtgggccacggaagcggaaaaggaacacgccgatttttatgccgccgccctcaaggccctggaaaacggagacaccagcgccctgcccaggcaatactgggtatgcctggtgtgcggggacaccttcaaatctctggaaggtgtggacgcctgccccctctgcggcaccaaggctgaaaaattcctcgtcatcgggtaaactccgtctgagcaccggaggccatccatggcacacaaaacccgcccggaacattccgggcgggtttttacaggccggaaaccgctgccatctggggaagcggtcagagaagaagcatcgccggcttttcccttccggtcattccgcaagcgccgttccagaaccgtgttccagcccttttccggacttcaagacttttctccacttccgactgtccgggtggccctggtcctctcctcccacgtgcatccggccccggaccttttttgaatgcccggattgatggacttgttcatttaaaacattaaatacatgcattccgttccggctacggcgcaggcgagcaccccgattaaaatcatgatgatgccgaatgcgacggattttctgcacaaggcgacaacggcgcaggcaacggaaaccacccccagcaaaatcccggctgtgcccagcacggttccgggaacaagccccaggccggaagccgctgcgacccagggcaatgacacggcccccacgacacaaatacaggcggctcctttcacagcttggggacattgcagcacaacgggctgattttccataagcttccctataccctcccaaaaccgggcctgtcaactacaaccggaaagtcccctctttccgtcaaccccgcatgccggacgggctgcccccacaaccaattgcctgcgccgccatccgcaccaagccccaagcgcaaaaaatggcggatgctatcggcaccgccgtttcaacggcggttcccttttcctgcccgggcccttccatgaaaaggcgttccgccacattctgcttgagcatcaccgtgaaacccttacaatggctcaccccttcaagcaggaagaatactttatcctttctttgcgatgacccctccccatgcatccacccgttccgcagaacggtacgcgggccggccaggcgctctttccgccgtcttccaggctcttcgcgccgcgttctttccgcgccgcatgcgttgcctgtgggcagccggactcgcggcggctctggtggtcaatccttatgtgctcaatgacggccagagcgtgctgatgagctgtatgggcatcgcctgttccgcctccctgctctgcggcaccatccttctctgcctgaaataccgctttaccgcctacgtcatccttccggccatcatcctgttcaacgcgggcctgtacatgatgcagatgcggtacgggctgaccctgaacctctccgtcctttccagcatggcggagaccaacttccgggaagcctgcgccttctgcaccgccgcctccgccactggagccctgctgctggcggccttcatttacctggccatttactggagccgccgttccctgcgccagaaggccacgtggggcgcgctggcgtgcatctggagcctgtacggaatctttctgctgctgggcattccggccacctcctacagctcggaacccctttacctttactacacctctgacaaggccaagggctggcccctcgtggacttcgtgatggcgtacaagctggcggacgaatacgtcacccaggacgcaagccgtttcaatgaactccggaacctgccgtcctgcgcggaacccctctccggatgcgacgctccggacgacctggccgtggtcttccacatgggcgagagcgtgcgcgcggaccacctttccctcaacggctaccaccggaacacgatgcccctgctttcccgggaacccaacgtcgtttccttcccccacgccacctccttcggcatcgtgaccaggatttccgccatcggcatgtttacggatgcggaactgtcccgccgccgccccgcccattcctccttcattgacctgttcaacaagcacggtttccgcaccgtccggatcatggacctgtgcggagactccatccatgactattccctgggcatcctgacccggaactgccgggaacggaagcagacgccgcccatgcacgaaacgcccggaatgatgcaggaacgcacctccctggtcatggaggaatccctgaaacggcacggccgggaaaaacagctttacgtcatttacaacaacggcagccacatggcgttcagctaccccgcacaggcggaacgctttaccccggcgtcctgcaacatggacgaccccaaggcccgtctggaagaaaccgtcaatgcgtatgacaattccatcgtggacctggacgcctccgtccaccgcatgattgcactgttgaaggacaggccggccatttatttttactgctccgaccatggcgtggcgctgggcgaggaaggaaaaatgttccaggggcatgttctgccgcctgtttaccgtcccgccatgttcgtgtggtattcggacgccttcgcctcacgctatccggacatggtgcgcgcgctgaaggccaaccgcctgaaagccgtctcccacgaccacattttccacacccttctttccctggcctccatccgctcggaaatcgtcaggaacggactgaacctgtcttctccggacgtccgggaaaccccggcccccatccagccggaggtgctggcggaatggctggccgctcccgcaccgccgcagccgcttccgtaaaaaagatggaagctgccgtcatcctctgcgggaaacggcaggataggacgaactctaccgtacccggactcgcaggggatgcctgacgcactcccggacgcggcgcgcctcctcctcccaggcggcagaggatttgaacggagaagccttgtcccaaaccgcccccatgtaccactcaaagggctttccgttcgccgcctccctgatccagtaggtacagccttccgagtccactgccccgccttccggatcccagggaactatcacggcggttcccaggcatccgtcattcttccggggcctgctccatgccgtcatcaagccgccgtcctcccggtccttcgtgaccgtttcataatcattcctgccctttccggtctccattcccacgccggccttcaccgtttccgccccccggatagtcaaggtgctgcggactttggaaaaacggcttcctgcgtccagagccaccctccgcgtttccgccacgcgtacgccgccgcccacgtcccacggcgcataaactacctcaaaagcggtctggaccggaccgttgtacaatgcccgcgcgctggcccagtttccggatacatgcggtttcccatccctgaacacggcaatgccgccgcagccccgtcccggccctacgttgtacatgtccagtcccctgccatgatcccggtggtaatccccccgcttgtagaattcattgatgacgggagcacccgcgcgcttgctccatacatccgttccgctggaaaccaggccctccccctcaggggccggcctggcaacggccggaccgtaaatccggtgcgccgtaagatcgttctcccacgcgaaatcatccaggcgttccgggactaggcggctgaaacagacgtccgcggaaggagccgccttcagggaggaatcgttcagaatccagaaatcacgggccgttccgggccggaaattgctctggaacagaagagtatccgtccttccgtctccatccgtatccgccagttggtgcgggatgacgcgcccgtggcggacgtcaaacacgcgaagggcggcggcattcccggaagttccggacggccatggcaccgacacggtttcagcaggacggaacttggccagtgggttcgtgacggttacggtctttctctgcggatggtcccggccaatgacgtatttgcgcagttcggtgccggccatcaggtaggcgcccgcgccgtatgcttccgtatcctccccggaataatggcccggcttgtcggcaatgggttgtacccagcccagcgcgccttccgcgctgacggaatcacaggcggccttccacgccctgcggatgacgggaagatattcatccgcatccagatacccctggttcaccccccacagcatcccgtacatgataaagagggtgccgctcatctccttcaaggggggctcttccgggtccagcaggctggcgtgccaggaaccgtcgggcgactggcattttttcagggatgccgccatacgcttgagcagatcctcataaaaggggcgggaaggccagtccgcgggcatgtcctgaagaataagcggcagtccggcaatcacccagccgttgccccggctccagaacatctttttcccattagccgccggaatggtgaagtaacgggaatcacggaaaaacagcccttccttccggtcaaaaagatagtcgcaggtgagcttgtattccctgtccatgaattccagataccggcggtctccggtataggccgccagcttcacgaacacgggaggggacatgaacagggcgtccgaccagctccagcggtcctggcagccgggagtcccgaactggagggaagcggaggagggccggttcatcaccccgtccagcacggcgcgtattttctccgccgcggcggtatttccgtcttccatcgccatctccatccaggcgtggcccacggcgtgatcgtccgcatggtaatgccgtttcagggttctccattcctgttcccctcctgttttcctcagcagcggcaatcccggcccttccgggacggccaggccatactgcactaggccggaataaaaggcgccgtaggtccagtgcagcggcgagcgttttctgggatgctccgcctgccatttcgccaccaggcggagattatcccggatggtcttttcattccagtccgcgggagcgccggaagcggggctccccgcagaaagcgcgggaagaaccagcagcaggaaggatttacgccatccgttttttgaaaaggaaaagaaattcatttgactggtacggaaaaagccgcgctgaaatttctccgtgaggaatgaatcttcccttttcggcctgtcccgttttcccccggttcccggaaaggggaggcaagggcatatatggtgccatgacggaaaggaatgccgcgttatcaatcattcggcatccggaacatacaatatgatgtatactaacaaatatttaatacattatttatacattttccttgcgggggctctctttctgtggttcattgcgtttcagcgcaggtaacggaagacggtgaaaatccgtcgcggacgcgccgctgtaaccggtagacgatggaccggacactgactgccagcagtcgggaagtccccatcacatgtcgcaccggaagccagaagacgacctgatgcccccgtatcccatcccgcggacaggatgaacatacgcacaggtcctcatcgtgccccttgttacaaatgcacgcatgcggcggcccctgcctatgatttttccaggcttttgcccaggctcgcggatgagcggtcatcatcccttccaagcgagacacccaccatggcaacaagcatcatcaagcgttccggaaaaaaggaacaataccagggctacaaaattgaggaagccgtcaagaacgcgttccacagctccggcaccgcctacaaccgttccatttacgaagaagtggaggccaagctgagccatcaggactgcgcgcatgtggaagaaatccaggacatgatagaacgcgccctgttccgctgcggatactttgacacggccaagaccttcatcacctaccgcttcctgcacaaaatgcagcgcgaacagctcgggggcctctattccggcaacacgtacgtggactgcaagcagacggtggaggaatacatcggccagagcgactggcgcatcgccgccaactccaacaccacgtattccaacgccggcctcatcaacaacacggcgggcaaagtgattgccaactactggctggaccaggtttattccgcacgggagggggccgcccaccgggaaggggactaccacattcatgacctggactgcctgaccgggtactgcgccgggtggagcctccgcaacctgctcaacgaaggattcaacggcgtgcgcagccgcgtgaacagcaggccgccgcgccacttccgggaagcactgggccagatggccaactttctgggcattctgcaaagcgaatgggccggagcccaggccttcagctcctttgacaccttcctggcgccttacgccttcaaggaccaggcggatttcacgcgcatcaagaaggacatccgcagcttcgtctacaacctgaacgtgccctcccgctgggggcagtcccccttcaccaacgtcacgatcgactggaccgtgccgcgggacctgcgggaccaggcccccttcagcggcggggagcacctctttgaaggggtggaggacccgggcctgctctccctggcgcgggaacgcggcgtgaacaagctgacagagctgacctacaagcatttccagaaggaaatgaacctgatcaacaaggccttttacgaggtgctcacggaaggggacagcaccgggcagcccttcaccttccccatccccaccgtcaacatcacggaagactttgactgggaaggggaaaacgtgccgctcctgtttgaaaacgccgccaagatcggctcctcctacttccagaacttcatcggcagccagtacaccgtgaatgaaaacggggaacgcgtgccggacgaacgggcctacaagccggacgccgtgcgctccatgtgctgccgcctccagctggacctgcgggagctgctcaagcgcggcggcggcctcttcggctccgcggaaatgaccggctccatcggcgtggtgaccatcaacctggcccggctgggctacctgttcaagcagaaccgggaagcactgttcgcccggctgggggaactgctggacctggccaaatcctgcctggaaaagaaaagggccttcgtccaggaaatgtacgaccgcggcctgtacccctacaccaggcgctacctgcccaccttccgcaaccacttctccaccatcggggtcaacggcatgaacgaactgctgcgcaacttctccaacgactcgatggacatcacctccgaggaaggcaggacctttgcggaggaaatcctggaattcatccgcctgcgcatgcaggagtaccaggaggaaaccggcaacctgtacaacctggaagccacccctgcggaaggcaccacccaccgctttgcccgggaggaccagaagcgctatccggacatcctccaggccgggcccgtggggcagcgttactacacgaacagctcccagcttcccgtggaccatacgagcgacctgttccgggcgctccagctccaggacgaactccagtgctgctacacggggggaaccgtcttccacatgtacatgaatgaagccatcagctccccggaagcctgccgggacatcgtccgcaaggtgctgacccgcttccgcatgccgtacctgaccgtcaccccgctcttctccgtctgcgacaagcacggctacctgcgcggggagcaccagtactgccccttctgtgatgaggagctgctccacctccacaggcatgaataacccttttcaaccgaacgcctcgtttcaaaacccagccatcaatacgacaatgaccaaacaggaaatattaagcaaatacgcacaggaccgtacccgctgcaccgtttacacgcgcgtcatgggctatcaccgccctgtggaaacctttaacgccggcaaacagggcgagttccatgaccgcgtccactttgtggaaccggaccgtccctgctcctgctccgcccaaacggaacagccgcggtaattttcccaataacatatgcgaagtcaatgggaacgggccggggcatagcggacatcacgccgctcaccttgctggattttccaaacaaggtggcctgcatcttctggctgagaggctgtaacttgttttgtcagtactgttacaacgtctccctggtcagaggaacgggctctcctgccggagaccggacggactaccttgatttcctcagagatcgggtgggatttctggacggggtagtcctgtccggcggcgaatgcacgctgtgtcctgaccttatccccatctgccgcaagatacggcagctaggcttcgcgattaaaatagacaccaacggcacgaggcccggcgtggtgaaagcgctggtggaagaggggctttgcgactacatcgccctggactacaaggcaccccccgaacaatacggcgccgtcaccggcaggcccgaccttttcccctccttttccgcaactctggactacctgatcgcctcccaaaccgcctttgaagtcagaaccaccgtccatcccgatttattgacggaagatcacgtcaacaacatcatacgcgacttgacaaagcgcgggtatgggggcaactacttcgtgcaaaatttctacctgacccaacaaacactcaactctctccccgcgccaagccgattgtttgaccggacccggctggaggccgcctccatccccgtccgtttccgcaactttgagttcgccccgggagaagactgacccagccgaccatgttcgacatcctgctcaatcacaacaccctggttctcttcggaatcatcttcttcggcatcgccctcggcagcattaaaatatacggcctgaacctcggcctctccggcgttctcttcgtagcgctggccgctggccactaccgcctggccatccccaacggcgtgggccagctgggcctggcgctctttgtgtactgcgtgggcctcagtgcgggcaaccgcttcttctccgccatcgccaagcaggggagcaagctcgcggtcatgtccgccgtgattgtaggcgtttcagccctcttcacctgcctcttcggcatctggttcaatgtccccgcgggaatctcctccggcatcttcgccggcgcgtgcaccagcaccccggccctggcggcagccacggaaagcctgccgggagcctccggcagcggcgtcagcatcggctacggcattgcctacccgttcggcgtggtgggcgtggtcctcttcgtccagcttctgccgcgcctgctgcactttgacctgaacaaggaggccaaagccatgcactccaggcaggaggccagcatcatttcccgccttgtccgcgtcacgcagcccaacctggtcggccagaacattgcggactgcaagctgctggacggcctgcactgcatggtcacccgcgtggtgcgcaatgacaggctcatgcccctgacgccggaagacacgttccaaaaaggaacggaagtcctcatcgtgggcaacagcgacacgatgccgcacgacatcgccttcctgggggaaatatgtgaaaacccttaccccatggactcccagaaggagcgccgcaagctgatcctgacgaacaagagctacgccgggcgcaagctccgcgaactgaaaaccctgcgaacggacggcgtcatcatctcccgcgtctcccgcctgggcttcaccttcgtccccaccggggacaccacgctggaacgaaacgacgtgctgaccgtggtgggctctccggaaaacctcaccaaatacggagacaagattggccaccgcagccaggacatgaaccagacggacctgctttccctgggcttcggcctctccatgggcatcatcctggggctggtcaacttcagcttcggcaacggcctgggcatctccctggggattgccggcggccccctcatcgtggccctgctgctcggccacttcggccgcctgggccccatcgtgggatacatcccgcgccccacccgccttcttttgcaggacctgggcctggtcttcttcctggctgacgccggcatcaagggcggcgcggacctggtcaccaccgtggcgacgcatggcgcggccgtcttcatcatgggcgtcatcgtcacctgctccggcatgttcgccgggtacttcgtgggcatgaaggtcttcaagatgaacatcctggaatgcctgggcggcatctgcggcggcatgacctccaccccggccctgggcgccatcgccagcaagacggactcccaggcccccgtggtcagctacgccaccgcctaccccgtggccctcatcctgatgaccatcatcgcgaaagtcatcatccagaccatcgggggcgtggtgggcgtttagcccaaggcgcaaacttcaccacccggaaagaccgcgtctccggcggttctctccgggcgccatgcttcacggaaaaaggaatatcgattgcggatcagcgccgtttacctccttgccaccagccggaagtttaagaccccgtttccgtcacttccatgcagacggactggaaggcatttttccagttgatgcggattccggcgttcatcagaaaatcgccgcccagcacccgttcatggacgttggccagggggccgttttcatccaggttgatctccctgaccaggtatctggcggcaggattcaagcctttcaggcgcaggggcggcggggaatccgccagccatttgtccatcagccaggcgaaaacgacggcccgtttctcatgaacgtacatcagggcggccacccggctttcatacggggaggacaggcggtacaggtccccgaactggaccacggggcggatgcgcttgtattccgccagtgcccgtttggaaaattctacttcctccttcgtcatgtcacggggctgaagctcgaatcccagacggcccgacatggcgacgtcaaaacggaatttgagcggcgtggcgcgccctgtctgatgattgggggaggccgtcacatgggcggccatggagatggccgggaacaaatggcctatgccccactgcatgaacacgcgttcacaggcgtccgtattgtcggacgtccagaattcatgatgcctccgcatggtcccgtagtcggcgcggcctccgccggaggagcaggcttggaacgtcacgcccgggaattcagccgccagcgcatcaagaatggcttcatagccgcgcacgtagtcaatggacaggttcccctgatggctggcgtccagccagggggagccgggatcggaaatcttgcggttgcagtcccatttcacgtaggaaatgcccggatgttctcccaacagtttccgcatgacttcaagaatgtatgcgcgcacggccgggttgctcaaatccagcaggtactggctgcgttccagcctgttttcccggtgcggaaggccgatgacccattccggatgcttctgataaagttccgagcaggggttcaccatttccggctccacccagatgccgaagcgcatccccagcttttccgcctggcggattaggccttccagcccatggggcagtttagcacggtttacccgccagtcccccagaccggcccgggcgtcattgcgcgggaattgtccgccaaaccagccgtcatccagcacgaaaagctctattcccaagtccgccgcacgtttcatcatgccgtgcagcactttttccgtgaaggtaaagtacactccctcccatgagttcagcaaggtcagccgctccgtgccgccgccgcgcaggccgtagcggcgcgcccagcggtggatgcgccgggaggcttcccccttgccgtttccactgtgcgccagaatgaggggaggcgtttcaaacactccgccgccgtccagcagatagggagcgggggccacgtccagccccgctcccgcaaagaggtagtgatacgggctgtggcggaaccatatccggtagttgccgggccacgccagcgctcccagcaccacttccccggagtcctcccgcgccggaccatccagggagatgacgaagccggggcttccctcctgggcggcgcgggttccggtgccggaaaccagggcaagttcatgcccccgcgccacttcctcctcgctcatcagggattccccgccccatgtgccgcggaagctggtgacaaagtaacgttccgctcgcaaattcagttgcgcggacgccgcgcggtgcaggcggatgccttccctcccctcgttccgtatcaccgcccattgaaggaaggcgtccgattcccggtgggagcgaacatgaatttccacccgcacggggtaggaagggtctttcccatagaagacggcttcttcccggtcgtcatccagttccagcacttcccatccctggcattccaggcgcagggaaagagttccgtccgcctgggtcgcgcaaatgcagtattcatccgacgcattgggaagccccgtcacggagtccgccagggcggaatacagaagaggcgcatccgcggcgttttccagggcatcctccggttcacgcagccgcggtccgtaataggcgcggcgcacgcggccctgttcatccctgaacagggtcatctgggaggaacgggtcagcaaatgaacggaatccggagtcatggtcggcaaatggggaaagggtaggtcattttttccgggcaggcgcacggccgcccctgccttgtccattaaggcctgccccggacagggaagtcaatggcaaaatggcaggagagcccgggcgtttctcctactttttccacaaacgggaggaaggccggaatttcatggtgcttgattcatgcacaaacagtttgttgccgttttccggatggcgtaccacgcgggcacgccgccgcttgatgctgaacgaaccaaagccgcggaatttgaccagtgagcgcctcaggaccgaccgggcaatcgtgtccagcaccgcgtccagcgcacgttccgcctgcctgggggtaacgccgtcccccagctcccgctgaagttccctgacgaattgtgttttattcataggccgcccagcatgatatgccccgttctcccggtaaagcggagaaggggcgcaggcattcctgccaccagccccatacggggatgcccttccgttccgggctgcaagtttcatccttgcccccctccggcggacccattaaggttcagggaagatgccttcccccgccgccggtgctccattcccggaacaagctttcaacgtgaccgcgttgaaatggaatacctgcgcctggcttctgctgcccgtcctggtgttcatggcctggtggatgcactggtatgtctctatccccctcgcggccctgatggccgcgggactggctcccggaaggcgcaaggaactaccggaaagggaatccctcccctcttttcccctgttcaaccggtcctcgtttcttatcctgggcgcattcatcgccctgatggtcctgtccggatggggggaatgggtcaatcagcacccggaccacatcgtcaggaacgcctgccttcgtgaattggtcgccagcccgtggcccgtcgtttttccggacggagacgtcttgatctacaacacagggttctggctggttccggccctggcaggcaaagtggctgggctgggagttgcccgggcatttgtcgtgctatggggtgcatggggcctgtttcttgcctggctgtggctctgcgttttctccggccgccgttccctgctgctcgccctgctgatggtgatgttcggctcccttctgaatttccaatgctggctggggctggatctgttccgcctgcattacttcggcacggcggaacaggtcatgtgcagcgcaaacgcctccatccctgtcatgctttttttcatcttcctggcttcgggacgcatgcccccgcactggatgccccttttattcgcggccacggccttttattctcccctcgcggccctgggggggctgcccctggcggtctgccagtggctccggcaatggaaaggcagccgctccccccggcgcagcccgcttcatccctcctttccggcagccgtcatgctgggggcgtgcttccttctttattatgcggcggtaaacgcgccgtcctcccatatgggctggcggcctttttatacgcggccgggggattttctgctggcagggacctccttcctgctgtacgccctgttctgctggcgggatttccggcgggattccctctttatctgtacgctggcaaccggactgctgctgcccttcttttacgtcaatggagacgtcaacgacctactctgcaaggggagcattccggcgatggcctgcctgctcgcctttctggcctccacctgggcgcggcatccccgtctccggatatggatatggcttctgctggcgcttggattggcgccccggttcaatgttccctattactgctgttcttccagcgccctccaggcatttctgacgccttgcgcctcatgcgcggagccttcctcctttccctgccgggaatggcggcagctcacctatgcgccgcaggcacgccaccaggatgaatggggccgcaccatgcaccaccccggacaccggtggcatccctattattccggcacgccgcgtccatggctgcgcttcatttaccgtttttgacgtaaagaaaacagttgcgggaaaaacgcccgggaaatgaacattccggattcgctcctttcttcatgggaggggtccgaatgctcaggcggtcttttgaccttccttctggaagtttttccagcattcctcaataaccgcgggcagggacttgccttccttgtccatatccccctggctcaccattttcttaatcatttttccggaaacggggtccaggatgatgacggcgggaggcccgaaaacgacatagggggccttggagcctatgcatcccactactttgcccgcttcctccggaacgaactggaaggtaaatgaacccggtgtccttcccggggcctgcctggtatccaccatccagaagatgaattttttgccggaggccctcttgaaagttcgctccttgatatgcttgtccgtaaaaatgttgcaatacacgcaccaggaagaccccgtcaggtagatgaccaggggaaccttcttggcgatggcctcattgcgcagcttgtcaaaggcgggactgcccgattcattcacggctggaacgggagcctgctgcgccagggcggaagcgggagccagcatgcctgccacggcggcggcgcaaagcacggaaacagcaaacttgatcatattacagtaaccataagtctccctgcgcagaagtcaaacttcaagattccgccattgccatcatttgccgttcaaggtatatacattcgccatgcgccattccaacccctataaccgcaggcacccctcacggaataaatggcgctttgttttctggctgttcatggcgttcctgctcctgggcgcagccctggtttatttccaccctgcggaagattggaaaactgcggaccgcagcagcagcagcctggcccctctacccgctgaagaaccggaagccgtcgtccaggtttattcggcacgcgccttcggctggcgcaggtatttcgccgtgcacacctggatagccgtgaaggagaagaatgccggcttttacaccgtgtaccaagtcatgggctaccagcttccctcccggggaaccagcgtttccatcgcgcgggacattccggaccgcaaatggttcggcgcggagccggaattgattcaggaattgcgcggagcagcggcggaaaaggccattcccgtcatcagccgcacggcgcaggattacccctatgccgatacctactggatcattcccggccccaacagcaacacgttcaccgccgcgctgatgaggaaagtgccggaactgacggtggagcttccgccccatgcggtggggaaggattatctgcccggcggcattgccggacggacggaaagcggcacgggcatccgcatcaatttatggggtctcgccgggttcagcctggggctggcggaaggggcggaagtcagcctgctgggcctgaacgcaggctttgacctgttgcgccccgcccttaaacttccgatgatcgggcgcatagggctgccggacgctcctgtgggctgggactggtggagcgtcacgctgcttctttccgccggagggttcatcttcttccgcatgctccgccacatgcgcaggaagcggaggcaggcgcaccgcatcccccacttccgccatccgcggacaaaaacgagcgagcgcatttgagccgcatggtacggaagcctttttcccttattccgttccccgtacacgggaagaaggggaataaagcggaaattcgattgccaagcgcggatgaagctgtaagaatccgcgccatgaaaaagctcctgatccgctcctgtctgattgccgggctggcctggaccgcttcctgctcctccaacaaggaaacggcgcctcaggaacccgctcccgccccagccgttcagccggaacaaatcaccgcggcggaccgccccgccccctgggccccggccccggtgaaaccggccattcttccggaggatgagaacgaggagtccgtgccgggaccagccgtattgcctggcgacttccgccccgggctgcgcaccccccggctgccggaaaccctgctgtatgatctggacggcaaactgatcaccccctccgcgccgtaacccttttcttttccttcaccatgactgctgccattcccaagggcttccacccggaacctttttcctaccaccaggagcttgaactggacattgacgccctttccaatgcgggcgacggcatcggccacgtggacggctgggtggttttcgtccccttcgccctgccgggagaccgcgtgaaggcccgcgtgtggcgcaacgacaagaattattcctccgcagacctggtggaagtgcttcaccccagcccggaccgcgtggagcccggctgccgcctgttcggcacctgcggcggctgccagtaccagcatttttcctacgaccgccagcttctctggaaaacccggcaggtggcggacctgctccgcttgcaggcagggctggaactgcccgtcaatccgaccattgcctccccccgccaatacaactaccgttccaagattacgccccattttgacaagcccagggaaggaggcaagccggccatcggcttcctgaaggcaggctccagaagggaagtggtggacgtgccgcagtgcccgattgccatggagtgcatcaacgaggccctgcctctggcccgcaagagcgtttaccaggcagcggcccgtttcaagcggggcgccaccatcctgctccgcgcctcggaagggaccgtcatcaccaataacaacgccgtggcctgcgagcgcgtgggcggtctggaattccacttcctggcgggagactttttccagaacaatcctttcattcttccgctgtttacggactacgtggcccagcaggcgagcatggacggggaggagttcctggtggacgcctattgcggttccggcctgtttgccttgagcctggcgaataagttcaggaaggtgctgggcgtggaggtcagcgagacttccgcggactgggcgcgcagcaatgcccgcagcaacgggattgaacatgcggaattcctggcggcggacgccggagccattttcgcccaggtggatttccccgcggaaaaaaccgccgtggtaatcgacccgccccgcaagggatgcagcatggagttcctgacccagttgttcgccttcggccccggaaaagtggtgtacgtttcctgcaatcccgctacgcagataagggacctggcggagtttgacaaagccgggtacgccgtcaccgccgtccagccctttgacctgtttccccagaccaagcacctggaatgcgtggtcaccctgaaaaagaacatctgattttccccatgcccaagctttacatcaaaacctacggctgccagatgaacgagcgggactccgagcaggtggcccgcatgttcgtgcagaaaggctataccatgacggaccgcgaggatgaggcggacgtgatcctgttcaattcctgttccatccgggaacaggcggaacagaaggcgctggggaagatgggccttctggccaagcagcagcggcaccgtccgcacgtggtgtacggcatgatgggctgcatggcccagagcaggaaggatgaattattcaaggaactgccgcgcctggacctggtgataggcacccagaagtaccaccgcgtatttgagcatgtggacggcattctgcgcgcgcgccaggaacgccgcatggatgaattgcagaccgtcttttccggcactcacgtgtgcgacgtggcggaagaggaggattcccagaaccgcatccgggaccacctgaatcccggcgcgcgctccacggcgtatgtctccatcatgcaggggtgtgaaatgaagtgcgcctactgcatcgtcccctacacccggggcacggaacgcagccgccccatccgggacgtggtggacgaggtgaagatgctggtggacgccggcgtgaaggaagtcaccctgctgggccagatcgtcaaccggtacggcaggcagatggaaacggcggacggcaagggcggctttgtccaattgctggaagccgtgcatgaggtggaaggcctccggcgcatccgcttcgtttccccccatcccatcggcttccggcaggatctggtgcaggcattcacctacctgcccaagctgtgcagccacatccatttcccgatgcagagcggcagtgaccgcatcctgaaaatgatgcgcaggccgtacaggaatgaaacctacctggacctttgcgcccggatgaagcaggcgcgcccggatttgtccatcaccacggacatcatcgtaggcttccccggagaaacggaggaagactacctgctgacccggcaggccgtggaacgggtccagtttgacaacgccttcattttccgctactccccgcgccgcggcactcccgccgccgccatggaggaacaaattccggaggaagtgaaggaagcgcgcaaccaggacctgctggccgtggtcaatgaaatagccatccggaaaaaccgggaactggtcggcaccgttcaggaagtccttctggaagggccgtccaaaacgaatgaagcgcgcctctccggacgcacctcccagaacaagcccgtgatggtggatgccgccccggacctggcgggagagcttctgcccatccgcattgaagaaagcacggggttcaccctgtacggcgtcccatgcccttccaggggatgatttgaacgccttcctcttccacccgcaaatagatggctccggtttccgggagacggtacacggccgttccctccggcacggggcattcatgctccgtggtgaaaatgaccgcgcgggcgtccgtggccctgatccacgcggcgctgtccaccggatcgcgcggatggtgcccgatgaccagcacatcagcccgcggcgtcattgccgcccgcgccagggaggaaaacccggcattccctatcatcaggacgaaccgcctgcggcatttccacgacagcacccggctccggtcctgatggattcccgtggacaacggcacgggaaaatcttccagaacaagttcatttccagggcgaaaccgccatttccgaacggaacattccgcatccgctgcgccccagttccggattccgggatattccttcgccagcgcttccactccggcgcgctccgccctgccgttcccggaagccagcacgccggaaggccggataccacgcgccttcaacacgggaagaagggtgtaccggaccgcattttccgttcctgcggccacgaccagcgcgggattggagatgaccgcggaccaggcgtccttctgcaacggaacgatgaccgcttcattttccccggcaggaggtgcggaagaaagatagctgcacggcagggaagccactcccccggctaccgccagcatgacggaggccatccaggaagccgccgtattgcagacgcataaaatccacgggcaccacgcgaacaccagcccgaacagggagacgcccatgagcggaaaaacgagcacgctcaagcacaaattggtcaggggagcgtacaggttccaggtgccgaagtgccatgccgtcaggggaatagacatcagccacgcccccacggagatgagcagcgcgccgcggaacgctttttccaggcgtacaaggcctttttcccgcgcattgtaaatccgggaaggaaggaacgggtccggagcccacaggggcctttcccggatgctccatcctgccaggcagacaatcacggcgaagacgcagaaggagagctggaaccccggctggaaaacctggagcgggtccatcaggcaaaggaggatgaaagccagcgccagaatattggccggatgccccttccggcgcagcacggacgccaacagccagaccgccgccatgatgaaggcccgcagggcggaggcggacatcccggtcacaaacacgtacaccgccagcaacggaatgcaggccagccgcgccgcacgggggcgcacgtacaacagcctcagcattcccagaaccagcatggccgccacccccacatgcatgccgctgacggcgaacacgtgcatgcagccgctttccagaaacttcgccatcgtttccggcttcgcgtccgtcttgtcccccagcacggcggaaaccatcacctgccgggcctcgtcatccgccggcgcgccttccctcagcaggcctgcggccccctcccggagccgcagggaaaacgcccggaggcggctgcgccagtcgcccggccccacccggcaggcgccatccagccgaatcccggcaataacgccgtgcaggtatccccaccgctcccgatcaaagatgccggggccgcacggggcctggagcggatatgtctctccctcaatccggtaccgttcccctactgccagggggcattccccgccacgggaggaaaccgcgtacagccaccgggcaccgtccgggcggaacagcacggactttccggaaacggcgttaacggaaccctccatggcgacagtccttcccgcctctacgggaacattcccgtattcccggtcatacgccagcagatgcatggccgcccacaccgccagggcaatggccagcaggctcatggaaggagcccggaacaggcagggcaatagcgcccagcagaggcagaggccccagaaccagggggaaacgtccaccgccgcgcatgcgcacagcatggcgagagcgggagccagcaggggagccgcggccatggtccgttccggccacggccgccgcaggtggcgctcctgttccatccggggaaaagcttactgcatggcgtccgcgccgtcccgttccaggggaagaacggaaggcagcggaagaacgacgttggcaggcaggggggccttgcgctggagcaccttgggagccagcgcctcgctcgtctcataggcgccgcggaacatctccagcttggcgtccagattgtcaatgtaatgcagggccaccgcctccggggtcttggggaacacgggggagccgaaggccagttccccgtggtgggaggcgatcaggtgcagcaggtgcatgcgcacgtccggggaggcgggatccagcgtcttccaggattccgcttccggaagggccatgatgcgcttccacagattgttgaccagttcaatgcccagcggaatgtggcccagcagttccccggcttccgaatagggcatcgtgaaatcctccttcgggtagcagttttcccacagcttcccgcagtcgtgaaacaggcatccggccagcaggagatcgcggttcagctccggattcgcctggcagacggcagaggccgtgcgcatcattcccgccacatgctccaccagtccgccgcgccgggcgtgatggtaagtgcgggcggcggcggcgcgctggaggcgttccccgaactgttcgatgaattcaatgcacagggcgcgaatgcgcggatcattcatgcccttgatgagcacgcaaatctccttcaggtccgcctcctgcttcttcttcaaggttccggacccggccaggaagctttccttctcctgttcgtccagggagcgcacttccagatcggccgcttccatgccgaagccccccttggtccactggccgcgcaggctcacgaaactgcggagaggcagggaggccagcgtgcggaaccagggcttgtcctcccacaccttcagtcccatcgtcccttccgcatcggcaaaagacacgtccagatacggcttgttgctcttggtcatcttctgcgcgcactgggcgatctgggcaaaaacttccgcttccacctggccctccgcggccagcttgcccaactccatgagactgacttgttccatgcgggccatcttgccccgcttccctccatccgtcaagaaaacgccggaggactacgatgataaaaaaaggaaaccgcttatttttccaatactcccaactcggcaacggcaacatggctgccttccactacccgcttgcctacaaaacgcaggtaacgggctttcacgggcgtctccaggtcaatccgctgcggaacgggattggcgcggatattggaaaactctccctccgcggcgggagctccccaatcgtttccgtccgcactcaggtagacggcgtagcggtcaaccgtcccctttgcggaatccttgcggggcgtgtagatgacggcggcaacgttgaccggacgccccatgtcgatttccagcgcctgcggaggagctatttccccctgggcggcatgcgtatgccagagggtggaggggttgccgtcaatggccagctccggagcggcggcgcttctttccccggccgccaccttccagtcccgcgtagggacggggatgatctgcgcggttacggaagaccttctgccgcggtattcgcttaccgccttcaccgtccccccggcagggagaaggaaaggctccctgtacacggcggactgcgggccggggtccgttccgtccgtggtgtacctggtcaccacgccctccgcggatgccagggtcacccggccatcgcggtcgtaattcactgccggagcattcaggataacagggtacttccacagggaaacctcgcacaaggccggaacggcccgggactcttccagcaccacgcgcacttcatccgccgtcacgggcctgcccttcaaaagaaccctggctcctatgctggaaccttccgtccatttgatccagcggccgttttcacgcatctccacgcggaatttgcgtaccctctgccccagctggacgggttccgccagccggatgacgtcaaacgccgcaggttccggcaatttcaacgccaggcagggatttttatcttccggagcggccgcccagtacgtcgcccgcttccggtccagaacctgttccgggccgtgccccttccatgaggaggaggaatccgcccgtgccccggaagcgaagttacgggaatacaattcattcagcagcgcacggaaacccgccagggactttttatcctcttcatgaatgcggccgcgacggtccggcggcacgttcagattcaggttggcccctctgcctacgctgtcaaagtacagcttcagcagattctccggtgtccggacgcgggaattctcatgctcatgccagaaccagcccggacggatggaaacatccacttccgcgggaatccagtacttgccgtccacggtgccttccgtgcccaactggtagcgcacggtgccgggcgcgggttccgtcccggcttgcagcggaacgggagtgtacgtggcccagcagggatagcccgcataaccgctttcgttccccacccagcgggcgcccggccccacgtcggaaaaaatcaccgctccgggctgccgtttcttcagttccccccacgtcgtcttccagtcgtaatacgtgctccggtcaatggagcgcttctcccgcgctccaccgtaatagccgtcccctccgttcgctccgtcaaaccacgccaggaaaactgggccgtatcccgtggacaattccttcaactgctcacggtacattttgatatattccggggtgccgtaggaggaagcgttgcggtcccagggcgacaggtaaatgccgaacctgacgccgtactttttgcacgcgcgggaaacctccttcaccacatcgcccttcccctgcttccacggggaggccgccacgctgtgccgggtggtcttcgtgggccacaggcagaaaccgtcatggtgcttgcaggtcagcaccactcccttgaacccggcgtccgccagcgttttgacgaggtcgtccgcattgaaatcggaaggattgaacagctccggcttctcgtcgccatagccccattccttcccggtaaaggtattgatggtgaaatggatgaaggcatacatctccatatcgtgccatgccagttgagccggagaaggaacaggcttcaacggagaaaccccattcttcactcccgcttccgccaacccggcggccagcatgcaggttcccataaggacaggggtcaactgattcaatcttctcatcaaatgcataactaacgttcggaactatgtacgctccgggcatcccgttctttcagacaactctacgagttaaagccgtaccgcccgctgaagatggcctgtttcccgcaatcgcgggagaaacggggcgcctgcgcttttttccttttccgcccatcagggattatggagcaatcaatatattgaacacgtatccggacagaatgataaacgccgtcactgttccgaagaaaatccagatcagcttccaggtcatcaccttcttcagaagggccgcctccggcacggaaagccctaccgtcgccatcatgaacgctatcgccgtgccgatcggaacgcctttcgccacaaacacctggatcaccggaactatcgccgccgcattcgcgtacatcggaaccgcgcaaatcacagcaaccggcaccgcccaccaatgctcccggctcatggacgcttcaaaaaatccctccggcacatagccgtgcaccgccgctcccatggcgatgccgatcaccacatacagggccactccctttacgatttcccacgcatcatgcatgatgacggcccatctcttccggaacggcgtccccttccgctcccacgcgccgctttcctccccggactggacaagcagcccccgtatccagggggacagatagcgttccagcctgaacctctccagcacagcccctcccatcatccccagcaaaatgccggagaccgcataaatcaccgtgatcttgaacccgaacgcccccaggaacagggcgatggcaacctcattcaccagaggcgatgtgatcaggaaggcaaacgtcacgcccagcggaatccctcctttcacaaagccgataaacaggggaatggaggaacatgaacagaacggcgtgaccgccccgaacagggcggcgaaaaaatactgaaacccgtagagcttctttgtcgtcaaaaacacgcggatgcgttccaccgggaaataggcgttcaccacgcccatgaaaagactgatcgcgtacagcaggaagaggatcttcaccgtgtcgtacacgaagaagttgaccgcctcccccagacgggtatggggtgtgaactccaacaccccgtaaaccagccagtcggcaaaatcctgaatcataaccgggaagaattctcctaccgctctgcggaaacagccgggcggggaggtgccccgcccccggaacgttcccggtgattcatcatcttaaccaccgccagcagaatgagcagcgccgcagcccagacggcagcccttttccatccgccctttcgcttgaaggaaacgctgccgcagcagccccctcctccgcacccgcaggaacctgcctccggatggggaacattcccctttactgcccttgaatcctccggccttccgctacagcaacccttctccggagaatccgcttgaagcgctttttggagcatcctcctgatttcatcccgggagggtaccgtgccggaaacaagaatcctgccgtccacctcaagagccggggtttccagcactccgacggcggcaagttgcgcggcatccgtcaccttttccggaagcggttccagacagagttcccgcatgacctgctccgtcacctgcgccaatgccgtacatttggcgcaccccggtccgtaaattactatcctcttcatgtaattattgatttatatttttaagaatatcaaaatgtatgaataaaaaatactgaacaaactgaataccaataccgttacccctttaacgccgggctttcctgcaaacacgacagcacgctgctgaggcaggggcagcacagggaataatacacatttttcccccgctgctcacaggacactatccggctgttcttcaacacgttcaaatggctggaaacggtagacatgtcacgtccggaatccttctgcagttcgcagacgcagcgttctccatccagaagcatctccacaatcatgaggcgcacgggatgccccagcgccttgaaaacaccggcaagaggttccagctccttgacggagtgaaccggacgggatgaagaggtgcaggagcaatcggacataagcaatggatttattatttttaaaatcgtaaaaatgtcaatctgttttcccgccacggccatggcacaccacacaggcacggagccatgcggcagccgcttgaaatcaccccccatgctggacacggcaattcccttccgatatgctcgtttacatacctttaccgccatgctgtacatcggatgccacctctcctccgcaaaaggttacgaagccatgggcagggttgccctttccatcggagccaacaccttccagttcttctcccgcaatccgcgcggaagcaaggccaaggccattgacgaaccggacattgcccgttttctgaagctggcggaagacaacggcttcggcacgctgctggcgcacgccccttatacgctgaacccctgctccgctgaccccaaagtcacccgctttgcggcccaggtgctgagggaagacctggagctcatggagtatctgccgggcaacctttacaacttccatcccggcagccacgtgggacagggagtggaaaaaggcattgaactggtggcggaccaactgaacggcgtgcttgctccggaccaaaaaaccaccgttctgctggaaaccatgtccggcaagggaagcgagctcggcaggacctttgaagaactggccgccatcattgagcgcgtggacctgaaagaaaagctgggcgtctgcctggacacctgccacgtttattccgccgggtacgacatcgtcaacagcctggacgccgtgctggaacagttcgactccgtgctgggcctggaacgcctgcgcgccatccacctgaacgacagcatgacgcctttctcctccttcaaggaccgccatgaaaccatcggcaaggggagcctgggagaacaggccttcatcaacatcattaaccatccttccctccgggaagtgccctttttcctggaaacgccccgggacgacgccgggcacggcgaggaaatagcctggctgaaagaacattaccgcggctgagcttgatttccggatcaaccgggttgcctgtgatggagaaaaagcttgcatgcgctccggatacgggatacatagggcccgtaaattagtttaaactaattccaatatctgcttttcaaggcagaacccatccggcttttatgaaagaaatgcgcatcgcaaaaataacagggcgtgaaattctggattcacgcggcaaccccaccattgaggcggacgtttatctggaaggcggagccacaggcacggcgggcgtccccagcggagcttccaccggggaacatgaagcctgggaactcagggacggcgacacggcccggtaccagggcaagggcgtcaccaaagccgtggacaatatccgcaacgtcatcgccccggccctgatcggcctggaagcgacggaacaaaccacggcggacgccctcatgagctccctggacggcaccttcaacaaggccaaactgggagccaacgccattctgggcgtttccctggcgcttgccaaggcggcggcggcccagctgcaacagcccctgtaccgctacctgggaggcccgaacgccaaggttctgcccatccccatgatgaacatcatcaacggcggcgcccactccgacgcgcccatcgactttcaggaattcatgatcgttccgtccggcgcgcccactttccgggaagccctgcgctatggcgcggaagtctttcatgccctgaaatccgtcctgcacagccgcggcctttccaccgccgtgggtgatgaaggcggcttcgcccccaggctgaactccgcggaagatgcgctggactgcatcgcccaggccgtggacaaggccggctaccggttcggggaggacatttccattgccctggacgtggcttcctccgaattctacgatccggaatccggactgtacgttttcaagaagtccgacggcagccgcagaaccgccgcggaactgacggattactacgtggaactgaagaagaaataccccatcgtctccattgaggacggctgtgcggaaaacgactgggacggctggaaaatcctgacggaaaaactgggcaaaagcacccagctcgtcggggacgacctcttcgtcaccaacgttgaattcctcagaaaaggcattcatctgggcgtgggcaactccattctggtgaaggtaaaccagatcggctccctgacggagacgctggatgccgtggagctggccatgggcaaccgctacaccgccgttatttcccaccgctccggggaaacggaagacgccaccatcgcggacatcgccgtggggaccaacgccggccagatcaagaccggctccctgagccgttccgaccgcatggccaaatacaaccgccttctccggattgaggaggaactgggggaatccgcccgctacggcaacggattcggcctgttctgaccccttttgccggaactggtataaagcaacccaaatccccggtcgtcgtgaggcggcgcggggatttttcattctccggggtaattgcatccttttctttgggacaaaatatgcaatgctgggctttcggattccgcattgccaaaaagccccatctccgttccgcgccatgtctcccagcctttccctgcctacacgccccctgctgtgcgcggcactggcgtacatggcgcttcctctgggcctctttctgtggggatggctgcatcccgccttctccgttccgctttgcgccgcactggcgtatggattgtacgcctgcacccggaatcttccggaacagcggcttcctctgaatgcccgcggactggccgtgctgggctttctgtccgccttctgcctgctgctggtgctgctgtgcggcttcacgggccactgccagcagcacgcggactttgcggtccgcaacgccgtttacgaacagcttgcggcaggctcctggcccctcgtcatggcggacgggcgccacttcatctactacctgggccattggctgcctcccgcgctggccgcctcctgctgtccggacgcatgggctccctggctgctggccctgtggaccttcctggggctggaactggcgctgctggcggctgcctcccgctggggcgtccggcaaacggcctggtgggcgctggttctcttctgcctgggatctccggcagcagcgctggactgcctgggaatgcccctcccctccctgttcgcggaatacaatgcccagatggtgctgttcatcggcatgcccgctcaactcttcaacacgttcaaccatgccgttccggcgctgttgtgcgccgtgcttattctgacccgctccctgcctgccgcgggatattatttcatgggggcattgctgctgccgtcctccccgctgggcgctcttctgctccttccgtacatagtgtatgaaaccctgttccgccgcccaacggagcaggctcctccctcccggttccggtccctcctgctccagccggctttctgggttgccttcctgtgcgcggcggtcatggccgtcttttatgcccatctggacggtggggggcagttttcctgcctttttgccgggaagtatgcggaaatctaccactacggccagcaacggctgctgctctatcccggctccgtcaaatacgccagtttcctgctggctctggccctgggcgttctgctgccgggtgcgctgctcttccaagcatgccggaggaatccgctgtattacatcacgctggggatgatggcaggcagcctctttttccgcacgggcatcatgaacaatgaacttctctttaaagccccggcggtcctctatcccttcctctccctgctctttctccatgccttccgccaggggggcacgaaataccggaccctcctgattctttacctggcctgcacggcccttccgtccctgcaatgcatgatggaaaaagcgggtacgttctccacccgggcaagcactatgcaggagcatcagctgacggcgcacggcggcatgcttgaccgccggaaagaccccgtctgccgccaattcgtcaaaaaggacggccatcccctccccgcctggctgttcaagaccggaacaaggccataacatcacggcggcgggaatcaatccagcctgatgccgaacatgtccgacagggacccggcatccttgtccagcgcgtcttctccgccgggaacggattccggagccttcggaatcaggacggaggcgtccatcccgcgcagggtgaacagcagttccggctgttcgtccagcatcacgccgaaggcatacaggaccgcggacgcatgcttgcacaaatccgcccagtccgggcaggaacaggaaaaacgccactcttccggcgcggggaacaggccgccctccggatcgcacaggatttccagcagctccggggagaggttccccttcagcaagtcaatccaggaaccgatatgcccggcgcaccgcgcacgcagccgggcaagcgcctcttcatccggaggggcggcatgcacgcggacctcatacaaatgctcccccatcaccagcgcgtcaatgcggccgggagccgctttcacgtccagaacgcagccatagcgcaaataagtacgcccgggggccagccgcatgccgtacacctcgcacgcggccaggctcttcatccattcctttccccagaactttttcgccagatttcgcccggaagccgtcacgggatgcagctccatcccctccgcggccagttccgccgccttctcctccgcgcgtttccgcaaatccgcccgtctcaggggcatgccatcattttcacacatatgatattttaccttttattccataaagaacggcttataaatcattcactaatgttctttaggaactgttctcagcatgaaatctccaaataaaggtaccgtgaatgccaattctccataagaaggactatatatcattccctttttcattaaatgggcccgggttggacctatcttgttcacagtaactcccagagcatgtgcaatttctccggctcgcatcctttcagatcttaattctgccatggttctcaggaatcttttttctcccggagtaagccgatcaaatcttacacggaaaaaattttgatccaatctctctataaccttctccgttgcccgattaattacatccaatgtaatattttcagtttgcgcctgtttccaagcctgatatccccattcttgtaaaaaatacggatatccatgagtaagttcatatattttatcaagagcatcatttgcaaatacagctccctcccttctggccggttcctgcaatgcgcgagcaacatcttcctgggataaagctccaacatcaggaaaactgaataagcgttcagcataggatttagaatctccggccaaacccggcaaaataggaagcccggcacctaataagacaataggactctgtttctgttgaattctatgcattgccataatcaatgcacttaattccttctctttaaaatattggatttcatcaataagaatggcaacagcggattgtttttccatggctgcctccgacaatgcctgaaaaagctcaggcaaatcattttcaaggtctccgctgtccgctacacccggtaacggatccaagtccaatcccaaatctccatagttaattctgatagttccaataaaatttctaagagcaatcagcccccttttaactttatcacctgttccggccaatctgttcaattcaaaaaacaacctcctcaaatatggagcaagactggcacctaaagatttattttcatgtgcttcaatcgagatcgtatgatatccatgttgttgcgccaatcgttccatttcattgagtagaaccgttttccctactcctctcaaaccagttagaagcatgcttttttctggtctcctattcaaagtacgccctaataaaatctctgtttgtctaagaatgctggacctccctaccaactcgggaggaggagagccagcacctggtgaaaagggattttttatttcatccataatatagcccgttatagtaagtatacttctaaggcttttcaagtagaacttactagaccttcttacctcttcttacctcttcttacctcttcttacctcttcttacctcttcttacctcttcttacctcttcttacctcttcttacctcttcttacctcttcttacctcttcttacctcttcttacctagttctacctagttctatctaaaatttaatagaactaggtagaataaaaactccattccaaatccgtccacattacctatttcaagctttcaaaacaacatggcttcaggcacaacatgtgggtcatgtggaaaggcagattttctaaacccaccgctgatctggttcaacgctacggcgaatccgtctcctacgactggaggctcttccgccaggacattgccggatccatcgcccatgcgcgggcacagctcaaggcaggcctgctttcgcaggaggaattcagcgccattgaatccggcctgaaggacattctgaaggacattgaggcaggcagcttcacgtggagccgggagctggaagacgtgcacatgaacattgaaagcgagctgacccgccgcatcggcgcgccgggggccaagctgcataccgcacgctcccgcaacgaccaggtggctacggacacacggctttactgccgggcggagattgatgaaatcctggaaaaagtgcgctatttgcagcgtgcgctggtcatgaaggcgaaggagtacgcggacgccatgatgccgggctatacccacctgcagcgcgcccagcccgtcacgatgggccaccatttgctggcttacgtggaaatgctgaaccgggacgcggaccgcctcacggactgccgcaggcgcctgaacgtttccccgctgggttccggagctattgccggttccaccatctgcctggaccgccgcgggattgccgcagaactgggctttgacgccgtgacggagaattccatggatgccattgccgaccgggattacatcatggaaaccctctttgacctggccgtgatcggcgcccacctctcccgcatgagcgaggacgtcatcctgtggtgtacggcggaattcggcttcgccaccctgtcggacgcccataccacgggctcctccctgatgccccagaagaaaaatccggacgtcgccgaacttacccgcggcaaaacgggacgcctgtacggcaaccttactgccgtgatggtggccgtcaaggggctgcccctgacctacaaccgcgatctccaggaagacaaggaacccctgttcgattccattgacacgattaagctggccctggacgtcaatgcggagatgatggccgccatgacggtcaacacggcccgggccctggaagcggcttccgatcccatgctgctggctacggacctggcggactacctggttcgccgcggcgttcccttccggaaggctcacgaactggtcggaaaagccgtcgccatgagcatttccacgggtacgcccctcaaccagttgagcgacgaacagttcgcctccatttcagacgcgtacggaaccgacgcgcgcgacgtatttgaattgacaaaagccttcgcccagcgtaccaacccgggggctcccaattccgagaatacccgccgccgcatcgcctactgggaagacattctttccaaataacactgcctgcggggagcggacggaacgaggaacctgccgtccgtctccgcggcgcgcctccgggtgcaggaaggggacgttttacacccctccggcggcgggattccaccgcagccggccaacatcccggcagccatgttcagacctgctctcctttcctctctcaaaacctataccaagcaaacttttctggcggacctcttcgcggggctcaccgtcggcgtggtggccatcccgctggcgatggcctttgcgattgcatgcgggctctcccccacccagggcctcgtcaccgccatcgtggccggcttcctcatttccctgttcagcggaagcaagtatcagataggcggccccaccggcgccttcgtcatcatcatcatgggcgtgctggaacagtaccacgcgtccggactactggtctgcacgctgatggcgggcctctttctcattatcctgggcttctgccgcatgggggcgcttatccgcttcattccattccccgtcaccacgggatttacctccggcattgccgtggtgattttctccacgcagatcaaggacatcttcggcctcaccatcacggaaaaaatccccggcgacttcattgaaaaatgggcgtgctacttccactacttccacaccatcaactgggcggcgctggcgctggccgtcggcaccgtcgccattaccctgctgagccgccgcttctggcccagggtgccggccatgctggtgggcatgctgggcatgaccgccgtttccgtagccttctccctgcccgtaaccaccatcgggcaggccttcggcagccttccgaacacgcttcccctcccttcactgccccatattgaatggcacaatctgggggcgctgacggccccggccttcaccatcgccctgctggcggcgattgaatccctgctgagcgcctccgtggcggacggcatgacgggaggacgccacaaacccaatatggaactcattgcccagggaatcggcaacatcgggtccgccctgttcggcggcattccggccaccggggccatcgcccgcaccgctaccaacatcaaggcgggggccaaaagcccggtttccggcatgattcacgcggtgaccctgcttgccatcctgatggcctttgcccagtacgcccagcagattcccctggccgtgctggcgggcatcctgacggtggtgtgctacaacatgagcgaaatgcacacgttcagccgcctgctgaaagggccgcggcaggatgcggcggtgctggtgatcaccttcctgctgaccgtctttgtggacctggtcgtggccgtggaggtgggtgtggtgctcgccgccctgctcttcatgggccgcatggcccagatcagcgacgtttccgccattaaaaacgagctgctggataacgacgaggaagacgacgaagaccgttctacggccaaactcagcattccggaaggcgtggaagtttttgacgtgaagggccccttctttttcggcgccgtggaacagttcaaggaccaggtgctggaaacgctggagcacgataccaaggtagtcattctgcgcatgcgcctggttcccgcgctggacgccaccgggctgaatgttctttccgacttctgccaccagtgccgggagcacggctccaccctgctggtctgcggcgtgcagccgcaacccctggatgtcatccgccatgcgcccttttaccgggagctgaaacgctacaacatttgcgagaatattgacgccgccctgaaccgcgcccgcaagatcatcaacggtcccgcgcccaaacacttgtaacggcggctacttcccccgtgcggccaggtaggccgtgccccattcattcatggcttccagtacgggcagcacgctcctgccgaaggccgtcagggaatactccaccctgggaggaataacggggtacgccttgcgctctaccaatccgtccgcctccagctcccggagctgctgggtgaacatcttggtggtggcctccgggatcaggcggtgcagctcgttaaacctcacgggagccttctggtaaagatgccagaggatgacaatcttgtacttcccgccgatcagggaaagcgtgacgccgcaggggcaacggtaagaggaggaagtttttttcatcgttacagtatcttttttgacactatattacaaaatagtgcctacttgtcaaaaactccctgtctccctatgctggcgggaattccaatccacacagccatgaaactgaccatcgaccaagacaagtgcatccactgccatttatgtgaaaaggcctgcttcctgatccgcttctgcggcttcgattccctggaaggagctgcggaacaatactgcatcggctgcggccattgcgtagccgtctgcccgcggcaggccattacccactccggagtaaaaagcacggaacccataggccccgttccgggcgaagcggaagtgctgaacctgctgatgaaaaccaggagcgtacggcacttcaaaccggaccccgtcagccgggaaacgtggaacgtcctgcgccgcgcggcggaatactcccagtccggcctgaatgcccagagcatccgcctgacggcggtggaagacccggataccctctccggcatcagaaaggccctgctccgcatgtacgacaagctggaaaggctggccgccttccccgtcacccgcctggccgcccggctgtccctctccccgcaggattaccacgccgtcatctctgaaaccgctacacagcccctgcgcaggcaggcggcggaacggggggaagaccccgtactgtacggcgccccggccctgctcctgctgaccggcccggcgtcacaaaccgcgcgggaagacgctacggtcctctcccagaatatcatgctggccctgaccgcgctggggctggggagctgctacatgggcggcctggtcctgggatgcagggttttcaagtacaagccgcttctccgcgccctggatttgccgaaaggccacgcggtccatcaggcccttgtgctggggacgcccaccgtacagctcaaacgcatgccggaacggaagcgccgtaaaatcaggttccggtaagcttccccgtcaacggtccgcttcctgctcctcatagcgggaaaggaggaaatccaggtcttccagcagggtctggcaggaacggtcccaccgcttcctgccctggagcgccatcacgcattcctttctcccggtaaaacagtatttggtaatgccgtgcacctgcaattcttccacctgctttttcagctcacaggcaaaaaacagccagaacggaacgctgcgggcaatctccgccacactgaccgtcatggggggcgtttcctccttcagctcccttgccaggtgcgccaggcctacctccgtaagcatgcggcgcaggcgttcatacagctcggacacctgcatgacggacaggtcgcactcatgctccagataatagcgaacggaggccagcaagtcatccttgaacggcagggtggttccggcgcgccgggcggcatgttccagggcatccgccagccactgttccccgtactcggtgatcaggcaatcaccaagcttgagcagcggtctgttgtttcggaagccgatcatggaacagggaaaaggggggaatttaaaggatgggaagcttgcgctggaggggatcaatcagcgtctggtggcgcatctgcgtgatctcctggatgaactcctccacattggaaaactggcggtacacggacacgtagcggatgtaggcgacaggatcgatggcgtaaagtttttcaatcacttttttgcctatctcgctggagggaacttcgcgcaaatggtcgcggtgcaattcggaaataatttcttccacggcgcggtccaagcggtccatgctcacgggcctcttttcacaggctttcaccaggccgcgcaaaatcttctcgcggttcagggcttcccgcaggttatctctttttacaacgcgcagctccgtacgttcaatctgctcataggtcgtgtaacggtaatcgcacctcaggcacacgcggcggcggcggatggtcgtcccgtccttggacatacgggagtcaatgaccttatcctccaaatgaccgcactgaacgcatctcatggcacgaccatactactacataacgcatccataaaggaaaaagtacgccaaatatagtacagatgccttaatggtcagcatctcccaaccaagacttcctgtgaataagccggggacaaaaacactcccgtccgcgtttccgcacgggttgacggagatgccggaattgtgaataagaggcaggcaggcttccatgtactccgggtgtgaagacacattttttatgctctcctcccaccggaataaaaaccggaaaagccctgaacggattccggtccgcgccagggtcgttcatggccgtccgttacgggttcaccgttccgccttgattgacgatactgcccgcagccagcctggcgccattcagattcaacacagcgccgtctttgacgaggactctgcccagattcagggcctgcccctccattccttccagggacatttccacctttccggacaagatccaggaacatttcaaggaagcgggcagcacccgttccaacacgacgcgggccattccctccgctccccctccgccttccgcacgaaccacctgcacttccgcctgtccggacaagcggacggggtgggctttgtcctggaccagcgagggcttgagttccacggtggagccgcccggaatattccaggcctgacggcccgcaagctgtacatttgtctccaactgcaaatttttcccttccgccagccggatgcctcccggcccaagcgccaaacggtcgccggagccctctcctttgctctgaataatcacggtattaacggcgggatcctccacacggatgccgaacagcttcaccacgcccgatacaatgctgggttttacggaagaagccaagttccacacgcccacgtttttccccggcattttccggttcatccaggcatccggagaaccgagaggagcctcatagcggccgctgcggacggaaccggtatccttcccggccagacgggcggcttcataggcaaagcgcgcgccgatgctgatctgggactggccgttgtaatgcacccccatctggtcgccggcagtcagcttgggaaggtccctggtaggggcatagcccagggacggacgggaggcggccagctccttcatcacctggtgggtcgtttttccctgaacttcggtatcattccccttcaggcctccggtgacattgcccgtctccggatcgctttcattctttccggcccagttggcattctcgccaatgacggctctctgtgcggccagggcggacgtatccccgtacggtttcaagtccgccgccagattgcccagaagctccagaaaacgggaagcgctttctggaacggaagcgccgatattgctttccccctgcaaatacagcagcccggcaaactccactttggagtgcttggacttgtctaccgtggcacaggcgtttttgacggcctgcaccagcgccttgtaagcctggccgtttttttgccagtgggaattgccgccgccgtcgcgggaggctttcacaatggccacatccgcatccctgaaccatccgttcttctccagggtaaaggcaaacccgtattccggacccatgcacaaactgccgttatagcgcggcatggcgggccgtacctgctcccaggacgtggaggctccggggaacaccccttccctctgaccgaagttctcatgccagtagagcgtattcttcggctcatacttcttcaacagctccggagaagcgggactgcccttcacggctcccagggaattggattggcccgtcagcaaaaaaatcttcaattcttttgcggagcataccgaaacaaggcacaggaacaggaaggacagcagataggtcatttgagttacaattgcgggaacacaactataactgccggaattttccttttcaatcgtcaactgtcggatatgggagccggaaggaggaggaaaaggaaaagaccagttctttttctatgctcccgatggacagcatagcccccttattgattttttaccgaagagcttggaggaggcaaaggcgcgacggctcggacaggcggcatgtaccaaatgttccacttagccggaggtagaaggagacaagaaaacgaacaagccccgccagttgaggaactggcggggcctgatgaaaaaaaatcccggcggcgacctactcttgcgggacctatcgtccgactaccattggcgcggcagcgtttcacttccgggttcggaacgggaccgggtgggaccactgcgctctggccaccgggcttcagggggaagagtttttcattttcttcatcctgcctgcccgggagcccttggggggctttgagggggattttttaagggttgttgtgtgtgtggctaagaagatttcctctcgttacgaggggaaggaatcagcgtaaactgacatctgcgtggctggtggtgttacttttaaacatacatccaatgaacaagacaacagcaagttgttattcacgaacgggagtgatgtaatatgatgaagtctattggtgattagtatcgcttggctcaatacattgctgcacttacacctgcgacctatcaacgtggtggtcttccacgaacctatagggaaaactcatcttgggatgggcttggcgcttagatgctttcagcgcttatcccgtccgcacttagctactcggccatgcacttgacagtacaaccgatgcaccagtggtgcgtcagacccggtcctctcgtactaaggtctgaacccctcaattttccaacgcccacagaggatagaggaccgaactgtctcgcgacgttctgaacccagctcgcgtgccgctttaaccggcgaacagccggacccttgggaccttctccagccccaggatgcgacgagccgacatcgaggtgccaaaccacgccgtcgatatgaactcttgggcgtgatcagcctgttatccctaaggtaccttttatccgttgagcgacggcaattccactttctaccgccggatcacttgggcctgctttcgcatctgctcgacttgttggtctcacagttaggcgggcttatgcccatgcactcgacacccggttgccaaccgggctgagcccaccttcgcgctcctccgttactctttgggaggataccgccccagtaaaactgaccggctgacacggtcctctggccggattcacggctcagggttagatcctccagtttcaaagggtggtgtctcattgatgactccgacgccccctaaagggcgtcttcagcgtctcccacttactctgagcattaaaaccgaagaaacaatgacagcttacagttaaggtctatagggtctttccgtccttctgcgggtaggcggcatcttcaccgccactacaatttcactgagcgcctggttgagacagtgcccaactcgtttcacgattcgtgcaggtcggaacttacccgacaaggaatttcgctaccttaggaccgttatagttacggccgacattcaccgggacttgggttcagagcttcgccttgcggctaaccccttgccttaatctttcggcattggtcacgtgtcacaccctatacttcgacttgcgtctttgcagagtgctgtgtttttgataaacagtcggttgggccatttctctgcggcctgcatcgctgcaggcaccccttcttccgaagttacggggctaatttgccgagttccttaaccaggtttcactcttacgccttggtatattctacccacccacctgtgtcggtttgcggtacgggtcgcttagcatacgctggggcttttcttggcactcgatccaatgatgcgctgagtccgtggactcaactcggaattcaataacctagtcatcttttctcatgcgtccccccagtttaagggtcgcgagctcaggattattaacctgatatccatcgcctacgcctctcggcctcggcttaggtcccggctaacccagggacgaaacacgttgccctggaaacctcgggtttacggcggccggggatttcacccggctttacgttactcatgtctgcatactcacttgcatgtgctccagggtcagtcgccatcacccttcaacgcgcatgcaacgctcttctaccactctaccgtaaggtaaagtccagagcttcggtataacgcttgatcgccaatcattttcggcgcaggatcactcgatgagtaagctattacgcattttttaaatggtggctgcttctaagccaacatcctcactgtctgtgtaatcccacatcctttccactgagcgttatttaggcaccttagctgctggtctgggttgtttccctctcgacaatgaagcttatcccccactgtctcactgccacgttccattgcacggtattcggagtttgataaggtttggtaagcgggtgtgccccctagccttgtcagtgctctacccccgcgcatcagcacgtgacgctgcacctaaatgcatttcgaagagaaccagctatcacggggtttgattagcctttcactcctaccctcagctcatcagagaacttttcaacgttcacctgttcggtcctccacatggttttacccatgcttcaacctggccaagggtaggtcacctccgcttcgggtccagtacctgcgacttaattcgccctattcggacttgctttcgctgcgactccgggccggaagcccttagtcttgccacaaacactgactcgcagactcattaaacaaaaggcacgccatcgcagattgctctgctctgacactttgtagacatacggtttcaggttctatttcactccgctcacagcggttcttttcacctttccctcgcggtacttgttcactatcggtcgccaactagtatttagccttgcgcggtggtccgcgctgattcatacatcgttccacgtgtgatgtattactcaggatcccactaattcccacgctggatttcgtctacagggctttcaccttctacggccagcctttccaggctgttctactatccagtatggtcgaatatgtcgtggtcctacaaccccgaaggagtaccttcggtttgggctccatccgctttcgctcgccactacttacggaatcgatttctctttcttttcctccgcttactgagatgtttcacttcagcgggtttcgcgtttcataccctatgtattcaggtatgaacgatcgagtattgcctcgatcaggttaccccattcggatacccccggatcatcgcttgcttgcagcttcccgaggattttcgcagcttgccgcgtccttcttcgcctgttggcaccaaggcattcaccgtacgcccttacttacttcatcatattgcaaaagttttttaccacttccacaataccacaaagccctttcgtgacttactgtattgtcttatttcttggtatgcatgttttaaattgtgtattgtagttgtttttcaactacccactttgttggaaagcaattgcttctcagcaattgttttctttgccacgcagatgtcaattttcgctttccctcaataatcgatttttttggtgggcctgacaggacttgaacctgtgaccccgcgcttatcaagcgcgtgctctaaccaactgagctacaggcccggttttgggtctcgcagaggcagttaacagcgaacaggtaatagttaatagccatttaccgttctccgttgccgccttcttaccgaaactggtggaggcacggggactcgaaccccggacatccagcttgcaaagctggcgctctaccaactgagctatacccccagttgcggttctttttgaaaaaaggtcgtcacgcacgtcgtgcctagtttcgctccaagcgaactggctgtttacacatctttggttcgttgcgggccctcgcgggttccgctctctcttccctcgggaagagatccgacctgtgcatttttcatgcactttctccatagaaaggaggtgatccagccgcaggttcccctacggctaccttgttacgacttcatcccagttaccagtctcaccttaggaccctgcctccttgcggttggcttcagatacttcgggtgcgaccggcttccatgatgtgacgggcggtgtgtacaagacccgggaacgtattcacggcgccgtagctgatgcgccattactagcgattccggcttcgtgtaggcgggttgcagcctacagtccgaactgggcccagtttttaggatttcctccgcctcgcggcttcggccccctctgtactgggcattgtagtacgtgtgcagccctgggcataagggccatactgacctgacgtcgtccccaccttcctcccagttgatctgggcagtctcgccagagtccccacctttacgtgctggtaactggcaacaggggttgcgctcgttgctggacttaaccaaacatctcacgacacgagctgacgacggccatgcagcacctgtgtaacgcctccgaagagtcgcatgctttcacatgttgttcattacatgtcaagcccaggtaaggttcttcgcgttgcatcgaattaagccacatactccaccgcttgtgcgggtccccgtcaatttctttgagttttaatcttgcgaccgtactccccaggcggcacgcttaacgcgttagctccggcacgcagggggtcgattccccgcacaccaagcgtgcaccgtttactgccaggactacaggggtatctaatccctttcgctcccctggccttcgtgcctcagcgtcagttaatgtccaggaacccgccttcgccacgagtgttcctctcgatatctacgcatttcactgctacaccgagaattccggttccccctccattactctagtctcgcagtatcatgtgcagtccgggggttgagcccccgcctttcacacacgacttacgaaaccgcctacgcacgctttacgcccagtgattccgaacaacgcttgagacctctgtattaccgcggctgctggcacagagttagccgtctcttcctcttgtggtactatctttttaatttgctcccacatgacaggggtttacaatccgaagaccttcattcccccacgcggcgtcgcaccatcagggtttcccccattgtgaatgattctcgactgctgccacccgtaggtgtctggaccgtgtctcagttccagtgtggccggacatcctctcagaccggctacccgtcatcgccttggtgagccgttacctcaccaactaactaataggacgcgagcccatccccaagcgcattgctgctttaatcttgcgattttatgcggtattaatcccagtttcccggggctatcccactcttgggggcaggttactcacgtgttactcacccgtgcgccactagagaattattagcaagctagcaattctcccgttcgacttgcatgtcttatccacgccgccagcgttcgttctgagccagaatcaaactctccatcaaatataatttttgaaattgctggaccaaatggaatctttcgatttcatctgcgccatgcttcagtcagctcttccctcaagttgtgtctcttgaaggcctcttcgctctgccaagcacggcgcgcgtcacgaccttttttctttccccttgcttctaccaatccgcccctctcggagctaggtcgctccttcgggttttttctccctcgcacgtctctcgacgcattcaggaaaaccctcggcgggttcggtagtcattcccttgaaatcttcttatcggcccctttaatgaggctcttccgggtggccggccccagcttcattcaggccctcttccgagtccctcctgccgccgggcttttcatcccgtcgccgtgttggcgtgccgagaagtctaccattttcaccccccttgtcaatttttttcgagtcgttttttgcggagatcctttcacccattttatcacgtccattcataacttccaatttataaaatagttaggcttttgtcatactccccctccctcgtgccatttttttgaacattttctcccgtgatgtttccgcaataactacagttcctcttttttgccccctgccaggacgaaaaaaagggctattgaacgcaggtgcttccttcgcccacctccattgcattccttcccttgaaaaggagactgaaccattttgttttcccatggacggaaaggattttttctgctatctataggaagtttttattattttgccatctatgaaaagatcattctggattggaattatctgcgctgcctgctgcctgggaaacattccttcctcatccgctgtacaaacagccagtataggctccactttttcctgcaccttcctggattccggagaccagggattttttgattcatcaagcacccatacatgggaccaaggccagatagacgctgccatgcgggcgttgaccacatgggatagcttgatcaattccaccccgggcagaacacttactgttggcctcacctggtacgacggagccaattcctccactctggcctccgcctattccccttatttctactaccagtcaaatggaccgcaacaggtttccaccctggtggagtccgtctggcgcgatgggagcacgaggactgcaacgggctacgatatttacatccagtgcaatacttctcatttgaattctctttattacgaggccgccttaccggcggagcatacgggaaaatatgattttcaaagcatcctgacccatgaggtagggcatgccgcagggtttctttccctggcgacacaaaccggtaccttccaggtccagtccaggaatgcttcagcagcttacagcaccatgctgtacaccaggtatgattccctgttaaccaaccaggaaggccaatccatcgtgaataaggccggaaacgggaatacggcatttacacttggagaaaccctgtccctgggcgatacggggctcaccgcctataaccccgccacctggcagcaagggtccagcatggcccacatcgacagcgcgagcgatccggacgccctcatgcagtattccatttcgccggatacctaccaccgtaccctgacggatggagaaatggaattgatgcgttccatgggctggaagatggttccggagcccggcacctccacgctttccctgctggggctggccgtgctcgctttacgaagacgccgctgctgacggtttcctctcccggattttcctttcacgccggccagacggcagtttcctttagccgccagggagtggattggtagcagaagggcgttcctgccagggaacgcccttcatggtttttcccggcggcacaccggaaaagcagccttttcagttatttcttttccttggtaaagtccagcttgccgcccttttcccgcaccacgatttccgtcccttccgggaagtcgccctccaggagcttgaggctgagggggtccagcaggtcatgctgaatggcccgcttgaggggacgcgctccatagacagggtcaaagccatggtccgccaccagggccgtagcctccggagtcatgcgcaggaacaggcccttggcttccaggcgcttgcggacgcgctggagctggatgtccacaatgcctttaagttcctccgccgtcagacggtcaaagatgatgatttcatcaatgcggttcaggaattccgggcggaagtggccgcgcagggcttccatcgccttggcttcccgctgttccgcgttggattcattgaggatgtactggctgccgatgttggaagtcatgatgatgacggtgttccggaagtccaccgtacgcccctggccgtccgtgatgcggccgtcatccaatacctggagcagcacgttgaagacgtccggatgggctttttcaatttcatcaaagaggaccacgcagtacggacggcggcgcacggcttcagagagctggccgccttcttcataacccacatatccgggaggcgccccgatgaggcgcgccacggagtgcttttccatgtattcggacatgtcaatgcgcacgatggcgttttcattgtcaaagaggaattccgccagcgccttgctgagctccgtcttgcccacgcccgtggggcccaggaacaggaaggagccgatgggcctgttttcatcctgcaatcccgcgcgggcgcgccgcacggcgtcggacacggccttgacggcctgcttctgcccgatcacgcgggcgcccaggcgttcttccatatgcaccagcttggcgcgctccccttcctgcaggcgcgcggcgggaatgccggtccaggtggccaccaccttggcgatgtccccttccgtgacttcctccttgagcaggcctccgtcctccttctgcattttgttgagcttttccttgccttccgtcagggcgcgttccgcttccggaagttcaccgtacgtgatttcggaagcgcgggtcagatcccccattctcttggccctttcgctttccagcttgagggcctctattttttcctgttccctgcggacggcgtccagaacgtctttttcacttttccacttggcaatcatggagccggatttttccttcaggtccgctagatccttggtgattttttccagacgcgccttgctgtcggcatcctcttccttcaccagggcctgccgttccatttcaagctgcatggcttcgcgttcgatctggtcgatttccgtaggcatggagtccagctcaatcttgagccgggccgctgcttcgtccaccaggtccaccgccttgtcaggcaggaaacggtcagagatataacggtcggaaagagtggcggcagccacgatggcggcgtccgtaatgcgcacgccgtggtgaacttcataacgttccttcaggccgcgcagaatggcgatggtgtcctccacgctgggttcagacaccatgacaggctgaaaccgtcgttccaaggccgcatccttttcaatgtatttgcggtattcgtccagcgtcgtcgcgccgatggtccgcagttcgccacgggccagagcgggcttaagcaggttggaggcgtccaccgccccttcactggcgcccgcgcccacgatggtgtgcagttcgtcaatgaacaggatgatttcaccgttggagtccgtcacttccttgaggaaggatttcaagcgttcttcaaattcgccgcggtatttggcccccgcgagcatggacccgatgttgagggacacaatgcgcttgttgcgcatgctttccggcacgtcaccgttgacaatgcgccgcgccaggccttccgcaatggcagtcttgcccacgccgggctccccgatgagcacggggttgttcttggtccggcgggaaaggatctggaggacgcggcggatttccgtatcacggccgataacggggtcaatcttgccggcgcgggcgcgggccgtcaggtccgtgccgtatttttccagcgtctggtatttgccttccgggttgtcgtccgtcacgcgctggttgccgcgcacttccttcatggcggccagatagttgtccttggtcagtccaaaggtgtccgtcaactggtgcaccttgttctgcgtgtccagagcccccagcatgaagtgctccacgctgaggtagtcatccttgagctttttgcgttcatcctcggcggcgtgcatcaccgtagccaggtcacggcccatctggggctgcgtggtagcaccgctctgggtgggttcatgggatacttccctctgggcggcctgcaacagcaggcccggatcacaagaggccttccggagaataggggaaagaattccgccgtcctgctccagcaacgctaccagaacgtccagggaggaaatttccggctttccgagccgccctgccgtctgctgcgcctgcatcagcgcttcctgaaattttgttgttagattgttaagcatggtatgttggtaatttagacataagaatatctccaaccgttgaatgggaaagcaggatttttgccgttatccaaatttttttgaccctccgaattacttgtaatattgtggtgcatccggcgtattttacagaacccgcattttaccggccttttcttttttcctgtctccagttttttatcaaaatgatccgtctttcttttcttccgttcctatgctccgccctgctcctggttcaaacgggagcctccggcaaggagatgccttccccctatcccgctccggaaccaggcgtccgcctgacaccgccggaatcaccggctcccgtgctgaacgaaccgcggcttttcggcgcacgtcccggctcccccatccagttcgccatctgcgccagcggagaacgccccatgagctttgccgccgccaaattgccccccggcgtgaagctggacagggaaaccggcgtcatcaccggtaaaatcagccgtccgggaacttatgcctttcccgtccagataagcaacagccacggcaaagcgaacgggaccatcactgtccgcatcgggaaggagatgtgcctgactccccccatgggctggagcagctggtattcctacagcggcggcgtgagccaggaaaatatcctgaaaaccgcccggctgctcatcagttccggactggcccaatacggttaccgctatgtcaacattgacgattgctggcaaggcgccagaggcggcaagtaccgcgccatccagcccaacaagcgttttccggatatgaagtccatgtgccgtgaaatccacagcctgggactgaaagcggggatttactcaactccgtggatgggaacttacgccggctacatgggaggcacttcccccaatccgcagggagattattcctccctggcccttcctgaaagcaaacgcccgcagcccgatcaattgttcgggagctgtccgggttcccagcggctgggagccgccaaaacaggccccgtatggatgattacccaggatgccaggcagtgggcggaatgggggtttgactacgtcaagatggactggtacctgatcgacgtgcccagcacggaaagaatcgcggcggatttgaaaaaaagcggcagggatattgtgctgagcgtttccaattccaccccgttcgagattgccggccccatcagcaaaacggccaacgtctggcgcacgacgggggatatagaagaccactggggcagtttgaagaagatcgcttcctcccaggagaaatggcagccctatgccggaccggggcactggaatgatccggacatgcttcaaatcggccgcctgggcaaggtcggaaaggcgaataccacattctcccccacccggctgactccggacgagcagtatttccagatgtccttctgggccataatatccgcccccctgattatttcatgcgatctggagcatctggacgatttcacgcggggcatcctgtgcaaccgggaagtgatcgccgtcaaccagacgtttcgcggcccttcggaaaaagtcctgtcccaagatgatggagaagtatggatcaaaccgctgggggaaggccgtaccgccgtcggctttttcaataaaagcaataaaggccagaccattcatgtccccctttcccgcctcaagctgaagtctccgcaaaacgcgcgcgacttgtggaagcaggaaaacgccggcacggcaagccgggaaatgaaggtgcggctcaatccccacggagcggccctgtttcttctggaaggcaaaagatagccccatggttctggaggagagttcctccctttcattcataaaatccgccccggcgaccggagaaagatgcggaaccaaggcaccggacaactgccggacgatttttccgccagggtattccccggaccgggacggtcaactatataccactaactggggggcaatgtatccagggcggcgttcagcgtcatcacgttgattacgttttcccccaggatgccgcccggaatgaggtgttccgccaccaatcgccttactttttccagtggcagcctgcgggccgccgccacgcgggccgcctggaatcccgccgcttccggggaaatgcaggattccaggccgcttccggaagcgaacaggagatctgccggaacaggcgtttcctgcggcaggttgtgggctttcagcagggccgccttgcgctccgccaccgtcctgaccagttctccggaggtccaggagaggttgctggcaccggaaggcatggtggcgtagtccccggcggagggcctgggccagaagtacctggcggaagtgaagggctgggcgatgagctccgaggcgatgacttccccccgttcattccggatcagggagccgtgcgcctgatgggggaacagaatcaggctgacaagcgtgacagccaggggataaatgccgccggtgacgacggccagcgccagaaacaggcgcagattgggaaatgtccatttcataatgattcagcaggttgatttttaattgttcagacgaggtgcagggcggtgacggccatgtcgatgagcttgatgccgatgaacggcgcaatcaggccgcctaccccgtaaatgaggatgttgcgcttcagcagggaggctgctcccgccggtcggtaggaaacccccttcaaggccagtggaataagcgccacgataatgagggcgttgaagatcaccgcgctgaggatggcgctctgcggggagtgcagtcccatcacgttcagggcggaaagcggcccccgggccatgccgtcagccacaaagaggcccgcaaacatggcggggatgatggcgaagtacttggccacgtcattggcgaaggagaaggtggtcagcgcgccgcgggtgatcagcatttgcttgccgatttccacgatttcaatcagcttggtcgggttgctgtccaggtctaccatgttgcccgcctcccgggcggcctgcgtgccggtgttcatcgccacgcccacatcggcctgggccagggcgggagcgtcgttggtgccgtccccggtcatggccaccagatggccttccgcctgttcttcacggatgcgcgccagcttcatttccggcgtggcttccgcaatgaagtcatccactccggcctccgccgcaatggatgcggcagtcagggcattgtcccctgtcaccatgacggtgcggatgcccatggcccggagccgggcgaagcgttccttaatgccgcccttgacgatgtctttcaggtaaatgacgcccagcacgtcccttccccgggccaccaccagcggcgtgccgccggcacgcgcgacgttctgcacggtcatttccacctcctgcgggaaggctccgccctggtccttcacccactgcgccacgctttccgcagcgcctttccggatggaaacggccggctggccgtcgtgcgccgcaatgtccacgccgctcatgcgggtggaagcggagaacggaacaaaggtgatgtggtccgcgtccatgtggcggccccggattccaaattgctttttggccagtactacgatgctgcgcccttccggcgtttcatcggacagggaggcgagctgggcggcttccgccagctgctggtcctccacgccgggtgcaggcaggaattcattcgccatgcggttgccgaaggtgatggttccggtcttgtccagcatcagcacatcaatgtccccggccgcttccacggcacggccggacgtagccagcacgttccggcgcaccagccggtcaatgccgctgatgccgatggcgctcagcaggccgccgatcgtcgtcggaatcaggcacaccagcagggagaccagaacgggcagggagatatggccgtccgccctgaagcccagcgtccgggcggaatcttcaatgtatccggccatggctgggagggaaagcactacggcaatgaagacgatggtcagcgccacgagcaggatgcccagcgcgatttcattgggcgtcttctgccggctggcgccctccaccatggcgatcatgcggtccaggaaggtattgcccggttccgccgtgatgcggatgacgatgccgtcgctgatcacgcgggtgccccccgttacggcgctgcggtctcccccgctttcacggatgaccggggcggattccccggtaatggcggattcgtccacgctggcgatgccttcaatcacctcgccgtcaagcggaatgatgtccccggcctcgcacagcactttttgccccttgcgcagctcggaaacggagactatttcctccgtccccttgtccgtcagcagacgggcgttcacatagacgcgcatttttttcagggcgtccgcctgggcctttccacggccttccgccaatgcttccgcaaagttggcgaacaggacggtgaaccagagccagagcgtgacttgcagggtaaagccgaaaggctgcccggcggcggcatcccggataaggacgaccgtggcaaccagggcaccgatggccgtgacgaatatcacgaagtttttggataaagcacgcgggtcaaatttgcgcagcgcgtcccggaaggccgttttcagcatggccccgttgcaccaggattgattctttttttcttctttcatcatcgtaaaatctggtttgttggtgaatgctccttacagcatggttcccgaatacaggagcagatgctccagaatgggccccagggccagggccgggaagaaggtgagggcgcctacaatcagcaccacggccaccagcagaaccatgaacatcaggttgtccgtcgccatggtgccctgggccggaggcgcggttttcttggataccatgctgcccgcaatgatcatcaccggaatgatggctccgaagcgggctagcagcatcgccaggccgcccagcacggaatagaaaggcgtatcccccacagccaggccggcaaaggcgctgccgttgttcccggcctgggaaccgaagcagtacaggatttccgtcagcccgtggggtccggcattgcagatggattcacgccccacttccgtagcggcggccagtccgctcataagcaggacggttatgccgggcagcagaacgcccaccatggaccagcgcacttcccgcgcttcaatttttttgcccaggaattcgggagtacgccccaccatcagcccgcacaggaagacagtgatcatggcgaacatcagcatgccgtacaggccgcagcccaggccgccgaagatcacttcacccagcagcatgttgaacagggcaatgccgccgcccagcggggacatgctgcagtgcatgcagttcacggagccgttggaggaggccgtcgtagccacggaccagagggagctgttcgtcacgcccaggcgcacttccttgccttccagcatttccatgccggggaacagcgggttccccgtgtgttccgcccactgggaaagcccgatggtcgtcacaagcagaagcatcatggcgccgaagatgatccagccctgcctttttttcccgatcatcacgccgtaggcgtacgggcaggcgcagccgatcaggagcagggagagcatttcaaccatgttgctgaacggcgtggggttttcaaaggggtgcgtgctgttgttcccgaagaagccgccgccgttcgtcccaagctgcttgatggccacctgggaggccgccggaccgttgggaatcacctgctccacgccgtccatgcccggtacggtggcgggtccgtcaaaggactgcaccaccccctgggagaccagcagaagcgcgacgaccacggaaatcggaatcagaaagtacaaggtactgcgcgtcaggtccgcccagaagttgcccagagtggaggcgcatttccttttcagaccgcggatcagggcggccatgacggcaatccccgtggcggcgctgacgaagttctgcacgcccagcccggtcatctggacaaagtagctgatgccttccggcccttcgccggagtagaactgccagttcgtgttggtcatgaagctgatggccgtatttagggcaatgtcccaccgcatgttttccgtgccggcgggattcagcggcagccatttctggcacagcagggaaaggaacaggatgaggaatccggcggcgttgaacagaagaacggccgtcagatactttttccagtccatttcgcgggaggggtccacgccggccacacggtaggtgcagcgctccacgggaccaagaaccggggaaagccagctccgctttccctgtaaaacattcgccagccacttcccgagcaacggagtgaaggcgaccagtatgcctatgaataggacaatgattaacaagtcgtgtgaggacataacgcaactttatacatgttccggaaattccgggtagttaacaaggggctgccggacattaagaaattgttaatttccctctggaagcccgtttttcatgacgccagtacgccgttagaatcccacgcccaggcggaagcccacccagaactcgtctccggcgtccctgcggcgcagcaccgtagccgcctgggaataattgacggagccggaaagggaataatgttccgcaaaccgccacgtcacgcccaggctccagtcaatgcagttggagccgtcgtcatagtccacgttataaccgccgttgtacccgtacctggccatgggcgttaccgtcacgttctccacgggggaccattccagttgcacaaaggcgctgtaataggcttcaaaatcctggtgttccaccttcacctgggtttccgcccccacggtcagccagtccgtcacggcataggagacggtcagggccggattggctacgttgtagtcctgcgtgaaatagaactggtgctcataccagggattgacggtccacttccccagcttccaggcgtaacccagaaccaggtccagctcgtcataattggaggaatcccccccggcgtaccaggcgctgagcgtaaggtctttccaggagatgctcggagccacttcccagatgccgctgcccggcaggcagtccagcccttccgtcacgtatttgctggaccagcccgcggaaagggagaaagcccagtccgtgtccgtagaagggatggcggcctcctgcgcgttggccagggagggagaggagggagaggccgtttccccgcccatgcagacggttcctgccatcatggcgcagcccagaactgcggcccctatgttttttgcggtgtgtgtaatcttcataaagacgtatcgaatacgtcctgaatcctacacagcatattgaccttcgtgaagttaagccatgccctgcaaccgttatgaaaaaatatatttcccggcttccacgggtggaaggccacagcctttcccggcccgcggaaatgggaagaagatttattcagctccgtccgccacaattctgtaccccaggccggattccgcgcggatgatgcggttttccggatcggaatcccccagcttctggcgcaggtgggcgatgtgcacccgcaggtagtgcgtatcttcctcatgctgggggccccagatttcacggagaagctggcggtgggtcatcaccttgccctgatgaagcagcagaaggcgcagaatgccgtattccttggaggtcagatggatttcctccttccccttctccacgcgccgggagctcaggtccacaatgatggaccccagccggaatacggagggctccctgtccggccggttgcgccgcagcatcacgcgcaggcgcgccagcagttcccggccgctgaacggcttggtcaggtaatcgtccgccccggcgtccagggcgtccaccttctcatcctccctgtcccaggccgtcaggatcagaatgggaacctgcgtccattcccggagctgtttgagcacttccaggccgttgatgtccggaaggcccaggtccagaataatggcgtccggccgtttcagagcggtctcgctcaggccgagctgcccgttttcacactcgcggacatggtagcctgcgccggtcagcgtcaggttcaggagacggcgtatctgccgttcgtcatcaataaccaggatatctgcgggaaggtcgctcataacacggggaaggaaggtttattcttcaggaacatgatcatgttccaccaggggaaggacaagacggaaacaggttccggcgggaacggcaaccagagtaacggctccccgctgcgcctccatgaaaccgcgcacgatgggaagccccaggcccaggccgccgggccgcgtcgtccggaaacgctcaaaaatggtttccgcccgttcggggggaatgcccggccccaggtcatggacatccagccagacctggccgcgcacgggatcggcgccgcccttcagcgtcatgggggttcccgcaggagtatgcacgcaggcattcagcagcagattgaccagcacctgctccatcagggagaaatccgccttcaccagcggataatccggcggcagggcgacagacacgggatggtcccggcgcgcctccctggtagcggccagagccccttcaatcacgtcccccaggtcgcaccagtccagtttgggcttcagggcgccggattccaggcggctcacgtccagcaaatttttcaccaggcggcgcaggcggcgtgcggccagcaggatttccccatactcctcccgttcctccggcgcggacgcggcgcgcccggccagcttctcacagccgccctcaatcacggccagaggcgtcttgaactcatgggaaacgctgtccagcagggagcggtgcagtttttcggattcctccatgagccgcgtacgcgcccgttccgcccgcagttcttcacgttccagcgccatggccagctgcgcgcccatgctttccagcaaatccttctgccctgccgtaaggcgctccccttcctccggcctcacgcccagcacgcccatgcagcgctccccggacatcatggggaggtaaaacccttccgccaccgggagcgtatccgtaaacctgcctgcgggccggcggtgctccaggcaccaggcagccacgctccattccttgtcatccatggaaaaagcccccccggattcccaaagcttcagcctgcggccgctgccttccggcgtcatgaccgccaggcgcacccccatgatctggctgatctggcctgcggcgccggaaatcagggaaggcacgtccgaggcggacccaatggcccgcgaatacaggaacagggcattcgtctttttttcccgttcccgctcctcctgctcgcggaccctcaggcgggaagtgagccgccccgtggagagagccaccagaaagaagaaaaggcacatcagggcatcctccagccgttctatcttgaacgtcatcaccggaggaatgaacagcaggttccacagcagggcgctcagcgcagcggccatcagcatggcccagcgggaacggatgaaaaagcccaggcccactactcccgccagatacaggaagccgggagcgaaataaccggtaaacgcggaaatcaacaggccgattcccgtaacggccgccgtcacgcctgcggccagccagtagtcccggccatatttttccgtttcccggtgccagctcttccaccggttccggaccggaccgggagcggcgggaactacgtaaatgtcaatctggtcgctcccctttaccagcttgtccaccagggacatgggccgcaccagcccccacaggtaagcctcctgcggcttgcccaccacaatctggctgacatttctcaaaaaggccatgcggagaagcgtctccgccaggtcggaaccgggcatcacgatcacttccgcacccagccgccgcgccagctccaggttggcgtccagccgctgctgctgttcgggggacagcggcacgcccgtatccacggaaagggcaatccacggagcgttcagggcgtaagccatgcgccgcgtccagcgcaccagccgggcggaaaacgggctgggccccacggctaccatcagccgttccccgctgcgccagatggagcggtccccggagatggtgcgcacctccgtcagctcatggtccaccttctccgccatgatgcgcagggccagctcccggagggccgtaaggttggactccttgaaaaaatggtccagcgcggcggaagcctggggagcgctgtataccttcccttcctgaagacgcgtccgcaactgctccggcgtgatgtccaccaactggatgcagtccgcctccgccagcacggaatccggcacggtttcctgtacgggagcggcggtaatgtcatgaacggtatcggaacggctttccagatgctgcacgttcagcgtggtgtaaacgtctatccctgcggccagcaaatcctccacatcctggtagcgcttcctgtgacgcattccgggaacgttcgtatgcgccagctcgtccaccagaatgagctggggctttacgcgcagcgcctcctccaggtcgaactcctccatctgcacgccccggtaagccattttcttcatgggaaggcgcggcagcctgccgataaggagcatcgtatcctcccggccatgggattccgccacgccgatcatgacctgcacgcccttgtccgccgcctggatggcggcctccagcatggcgtacgtcttgcccactcccggcgccatgccgaagaagattttcagcaggccgcggccggggcgggattcctccctccggatggaggccagaatcctgtctgcccgctggctgtccgaatgcgtttctgaaaacatgaaaaaagggaaccgtaatggtatccggcttgaatgttagaattaacctaatggaagaccgttcagggtgcaaataaaacagaccagaaaaaacgttaaaattttattaaattccaccccccttccccatttttgtttccattcttccctcttttcgttatcaagcatttttaaattttcctctttccttttcacgatgaacgccttccagaatattctccgcaccgtcgcctcttccgcagtcctgtttctcctgctcctgggaaccgccctggcgcggggagcggaggaagccgcttctgaaaacttcgactcctttccgacgggcagcttcacctccctggaaaccgctctggggaccatgacggcggaaagcgggcatgccgccatcgccagcaaccgctgttcttcccagcccaactgcatgcggctcatcggcctgggcgccgggacgaaaagcacagccacgctgacgctgcccactcccctcgccgtcaaaaagacgcttgccctgaccggggaacgctggacgtccgacagccccttttccttcaccatccacgccgcggacagggaagggaatgaaacactggtggcggacggctcctccctgaaaacgggcagcaatcccatgacccagcaggtgaggggcgccatcccttccggcaccgcgcgcctcatcttccgctgcgaggcccccgccaataagggcgtccttttcgacgatctggtcttttccgaattcaaccccctctccagcaccgcggaagcatggccggccatgatccgcatggaggccaacggcatcctccgcttttccctgacggaactccccgctgcgtatgacggcatggccgtcacggtggacatgagcccgtccgacgatctgggtgacattgaaagcgtttccctttacaccggtgacgcggacggcatctattccgcgcccgcctacggcagcagcggccacggcgccatgagcaccacgggcgtcctcgccagcccggcccagccgccggctcccgtcatgacgttccccgtcactccgggggttctcacgaacggacggcaatactacttctgggtcagcgtcaagctcaagaactccgccagcatggaccacaaggtgggcgccagaatcacctccgtcaccgtggacgggcaaacgactgatgttgccgatggagtgacggccaggcagcggataggctatgccgtcgccaaggcgaacgatccggtttacgaaggccccttggaaggaaagacctccaggaaattccgcattccgggcatcgtgcgcgccaggaacggggatctggtctccgttttcgacatccgctacgacggccggaacgacatgcaggccaacatcgatacgggatgcagccgttccacggacaacggacgcacctggacgcccgtcaacgtggccgtcaacttcaaccccacgggcgattccgccaacgactaccattccggctacggcgtcagcgacccctgcatccttctggatgaagtcaacggtaccctgtgggtggcaggcatcgccaggcacgggctggcctcctccaaggccaacgtggacgtggaaagcctggaaaccgcccagtatgtggtagcgtacagcacggacaacggccggacatggggttccgcggaccccggcacgggggagttcgtaaaaatgaaaccccggagcatcaacaaggacatcaagaacagggcctggaaatcctttttccagggtccgggccacggcattacgatgaagaagacggtcaacggcgtgcgccccattgtctttccttcccagatatggacgggcgccagtggcgcgggaactccccagtcctgcatcatttattctctggaccgcggccagacctggatcagcgaggacaccggcaaatccggcacgcccggcatcggagccggctccagcgaatgcgcagtcacggagctcagcgacgggcgcctgatgctcaacgcccgcaatgaaagcaggagcgggtaccgtaaggtcttcacgacggacgacatggggaagacgtggacggctcatgccaccaacctgaaagccctgccggagcccgccgcctgccaggccagccagctcgccgtggaaaactccgcgaacatcagcagggccctccttttctccaaccctgataaaacttccgccccccgcgcccgaatgaccctcaaagcctcctttgacgaaggcgccacatggccctccagccgccaggttctttacgattcccgcccctgctgcggctattccgacatctgtgaaacgggagacggccacatcggcgtgctgtatgaagggctcaacggggacgaaaatatcttcttcctgcgcattccgtatgatgaattccttccttccctggacgttcccgccgccggggcgcccgtccgcgtgggaccggaaggcgtgacggcagccacgttcaccgtctccagcgacgattcctggacggcgtcctcttccgctggctggatcaccgtctctccctcttccggctccggaaacggctccgtcacctacagcgtggaccgctgggaaggcgcgggcgaacgcaccggaaccatcacggttgccgttcctggcgtccagccggtctccgtcactgtcatccagtccggcagggcccctgcgctggcggtttcccccgctgcgctggcgcttcccaaaaacgggggaacggcggtcttctccgtcacctgcgacgccgcctggaatgtctccaaaacgggagactggataaacatcaccggcatgcagggagcggatacaggcaatggtaccgtatccattgccgcagaggccaatgccacggaaggctcccgtacggcgcagctttccttttcctcctttggaaccgtccgctccgccaccgtgactcagcgggggcagaaacgcacgtggaatgaatggaaggaggatgaaatcacctcccgggacccggacacggaccagacaggccccaatgattccccggccggggacggcatccccaacctgttgaaatacgccacaggactggatcccctcaaaccctgcggtagcgtcgtgcgggtcaccgcggaggaagcgggcggagacgcctgcctggtactgggctggcccgtcaacccggaagccaccggaatcaggcacgcagtggaagcctcggaagacctccagacctggacggagacggcggaagtggaaacggaaggcaaaagctccgccactttccgggatgccgtgcccatgaacgcggaaagtccccggcggagattcctgcgcctgaaaatttcccgtgaaggggaaagcccgctttaagggcaaaacaagcacgcggcaccgggaatcttccggcaaggggaaaaaagcctttttccctcagcccatccttttccgatattggagaaggaaccggatgccatgccgccattttttccggatggactgcactccgcactaaaagcggaaaatgccggaaacgcacttgaacccggtaaattccactcttgccgtgtccgcggccaaccgcaggaatccccttgtttttctgcgttcgcaaaagaccgtctaacaaataaaattaaaaaatcggaacgttttttcctttcttaattgacaaaccatgccctttcctcttaatgatttaatgtttatgaatccggtatattgtctgccagcggccctcttcacatgcgtgttgttgtcggcaacagccgcctccctgcatgcggaaacagcgtacagcacgccctgcggctacatccagacggatctgaatgccaaaacaacgggctatctgggcctgggagtgcatccggaagccctgatgcagcatacgcttgaggaaaacaacatcaccgtttccggcagcaaaatcaccatcacggatccggacgtcaattttaccgacctgatggagacggattccgcctatgttttggaactcattttcggagacgaggcgatggcccttcccctcaacagggacgcgtggaaaaagcccgccccttcctggacggcgaataaaataacggtggatgacaaaagcgcagcggacctgattaaaaacagcaagccggtttcctacgtgctgcgcaaggcgcgcaccctgaacgatgttctgggaggcgacaatacgttcagcctgaaaagcggcacttccggcactgcggatgccgtttatatctccacctccccctccatccagattccggtttaccactccgctacggaaaacaaatggatgcgccgcggttcccgggacgacatgggccttctccccgtcttcaatcatgaaccccttaaaatcgtccggaaagccggcaatggcgtgcaggccttcgttatcggggaagtggcgcagaagcaccagaggctccagctctcccaggaaagcacgctccttcatacggggctgcctgttccccagacgcttctcagcacctccctccacaccgccctgcccgatccttccagtgacgtggtttacgtgcctctcacacccggcggccctctggagccctgttattatgattcttcctccggacagtggaaaaacagggacacgggtgaaaacgtatcctccacggcggtggaaggcatcctgaacatcctttccggcaccaggcttcccgcttacacaactgtccagaccaatacattacctactcctcaataacaacttaacaagtagtgataccatgatgaaacattccttcctgctgtacgcagccgccggactgatgatcgcgggagcagcctctgccactacgctcaccgtttacaatgaagacgaatatgggactgcccctattacgcccattcttgacgcctccggccattccctgcaaaacggctccgccatgctcggataccttcaagacagtacctggtctttcgacctggttgacggcaaaattgaatggtccaaaaacagcacgcccgcaggccagttgagctacagccaaatggcggaaatcaggcaaagcttcaccaccagcctttccgccgtttctccggaatatcccggcgccactaccaatggcggccagttttcactttccggcacgctggcctccggtctggaaggaaagcccattgtcctcctgatcaacaacgacgattctcccggtgaattctccatgtttacgttccggaacgtggatacgggcgaactggccaaatacccgggagtggtggggaacgacatgacgtttttcttcgggtcgcaggcggatgccattaccgagggttatgagtggtatgccatccctctctttaacgacaacttcaatctggttcccgaacccgccaccgctacgctaagcctcctcggcctggcggcgctgatgatgcgcagacggcgctaaaagagcttttcccactgttaaagcctccgcacgggaatgcctgtgcggaggcttttttgcaggcagacggcagccgcactccaggccctccttcatcacatcccgccgccggaggagcgccgcgagcctctgcggcaaccgattcatcatgcggctggcagccgcactggttttcagaaaatgcgcccgctggcgcccaggttcatctttagttggcgcaagggcttgcggcgctccaaccaggttccaaacggcattgcggcaaataaaacgccccgcgcactccgaagagcggcggggcgtctgttcaagcggtggaaaccgcaggagttactttttaatggggatgatgtccagctccgctacggcggcgtaatcccgtccctgcgtctcactgagggcggagaagcggaaatagcgcgccttgacgggcgcctggaacttcacttcctgaaggtccgcgctgtccgggaaggcgcccttggcggcaggctgccacttctctccgtccgcgctcacttccacggaataatccttcacgcggccgttgctgcttccgtcctggcggggcaggtaggtaatgccggagaactcccgctccttgcccaggtccacggccagcacgtgcgggtgcttggtcacggtcttgttgtactcggagtgccagaaggtgccggggtccccgtcaatggcgaactcggcgtccgcctcgccctgctcctggctggtcacgctcttgaccgtgtatttgtccgtacgggtcagcatggtcatgtccagctgggccgcgggcacgcggatttcacccttgtaggacttggaggtgacgggtcgcatgaagaaggacagcgggtagggcttgttggccttgatgatgtccctgctcatggggccggggccgcaggaggcgccccccaggccgcgcgtggcggaggagaggaccagcacggtcttgtccgtcgtcttgggcagctccacggggtggttcgccagaatcaggtccgtggtggtgtacggaagggcggagaaggcaaacggggcgcccacggagccgaagagcaggccctgccccttgtcatccgtgacggccacccagcgggtgtcttcatggttgccgcagtcctgcggcctgccgtacgggaagaaggaatcccgggccgtcgtcttgtacacgcccagaggcatgccgctcttgcggtccgcatagttttcctccggcccgcggccgtaataggtcacgttgcccatgttcgccggcaactggagctcataccccaggcgcaacagctccaggggattgccgcgcggcagcagcacggactggcagacgacggttccatccgggtagatggtccattccagattgttgatgaaatgggtgttcgtgtcattcaggggctgctttttgggcgtaatggaggtcttggtgtcgccatagccgctgatgttttcagcctgcttgccgctgaccttgacggattgcttgacggtgacgctgctgccgttgtccacggcttcatagctgagcagttcatgcttcagttcacggaggccgttggccatgctcttggccatgacgcccggctcattgctggaagcggcgcgcagggcgttcaccgccatgggcgtcttgaacaggggcttgccgttcacggtgaactgggccagttctccggtagccgcgtcaaactgcacggagaaatccttgccggacacggtgtgcttgtccgcgctgagggttactttgccggcaggagccttgaacatgggaaggtctccctgcacgggaagctggagctggtcaaaagccagttcatagcccttcccggcccagtccttgtccttcttcagcttgtagccgatgcgcagggcgtattccgctcccggcttccggttcttcagctgcgggatgtccggcacgggcaccacgatcttttcccggggaccggccggcggcgtatccaacttgccttccgcgaccacgttcccgttctccgtcagggtccaggtgatgtcgtacggagacaggtccgtaaagaagttcttgttgaagatggaaatcctgccatcgtccgtcagggacgtggagatgttctgatagacgtgcttcacttcaaagtaacccggttccggcgtgcggtccgccaggatggtgccattgaacacgaactgaccgctgttgggatggtcgttgaagtcgccgccgtaggcgagcatcttctccccgttcggcagggtcttgtacaggccctggtctacccagtcccagatggcgccgcccatgatgcggtcggaggactcgatggcctcccagtaatccgccaggttgcccatggcgttcatcatgttgtgcgcgtactctgaaatgtagtagggcttcgggaagttcttgttggccgccatggagcgcgtccagtccacggaggggtactggttggaacccaggtccacgatgtcgttgttgcgctcatagtgggtggggcgggacatgtccctggcctttacgatcttttccgcgctgcggaaattctggccgggccctgcctcattccccagggaccacatgatcacgctggggtggttcttgttgcgctccaccatcgccatgatgcggtccacgtgggccggcatccattcgatggggtgggaaagggactccttgccgtagtagtagccgtgggactcgatgttggcctcgtcctgcacgtaaatgccgtacttgtcgcagaggtagtagaaataggggtccgcgggataatgggagcagcgcacatggttgatattggcgcgcttcatcatctgcacttcctcctccatctgctccggagtcacgtaatgcccggtttccggatggctttcatggcggttcacgcccttcaccttgaccggctggccgttcaccaggaacacgctgtccttgatcaccacattgcggaagcccacgcgggaggaaaccatttcctccgtcttgccgtcacgcttcagcgtcagcaccagggtgtacaggttgggatcctccgcggaccacaggcggggcttggcgtaaatgcccagcagggaagtcttgaaatccttcatgccggtgatgcgcagggatttttccagcacgccgtcatacggcgcgtccttgggcttgacgggctccaccagcttgccgccggcatcatacagggccatggaaaccgtgcagccatccagcttttccgtcgcgggaaacaggttgcgcacgtccacatccacctggaggcgccagtccccgttcatggtgcccggcttggcatggtcaatattcagggcccagtcccgctggtccaccggattggtctgcgcgaaaaagtcgcggatatggaccttcggcagcgcaaaaatggaaacgttgcggaaaatgccggacaggcggaacatgtcctggcattccaggtacgcgccgtctgaatggcggtacacctccgcggccaccacgttttcacctttcttgagataggggctgatgtcaaagcgggccggattgcgggaatccttggaaaagcccacgtactgcccgttgatccaaaggtagaagaaggaatccacgccgtcgaactgcatgtacacctccctgccgtcccagtccgcgggcacttcaaaggtgcggcggtaggagcctacggggttccgctccttgtaggacgtgtaattcttgttggagggctccttcatcacatacggccaagagcgttcaaaaggatacggctggttggaataaatgggggtgccgtagccctgcgtctgccaggaggcgggcaccttgatttccttccagtccttcacgtcgtaatccggcttgtaaaaatcggccgggcggttctggggatccttggcccagtggaacttccactggccgttcagggacttgcgccacttgctgttttcaggcagcactttcagggcggactgcaaatcgctgaaagacgcaaaaaaggccgtgggggcctccttgttcaaatgcaggttctgttcctgttcccattccagccctgtgggggcgggcgcgggggaggaatcgcccggggctcccaggccgcacatggcggagcctaccgccagcgcggtacaggataaaagccaggatctggtcgttctcatgaagtaagtatgtgtcaacgttggtatgcaaaaacggattgtcctgttacatacgaatccgcaattctaattctaacagcaaacttcacctttgcaagctgccgttgcgtttatgaaccgcctgcgaagaacgcagccgttaaaaagtatgctttaactggaggacgcccacgcactgcatggattcctgctgcgtatactccttggtgatgtagtgcaggccgaacagcagttccgtgcgcttgtaccggaggccgaagccgtaaccccattcccccaccacgggatacttgttcacgtactccggagaagagcggaacaccgtgccgtccaggtacaggtcatgggccacggcgcgcacggcggcgtgaagatagccgtaatacccccagttggcgacgttcgtcctgttgtaaacgaagggcggcgcggcgctggtggccccgcggatgctgttttccggagacgtattgcccagattgtagccgaagcggaaggacatgccgccgcccgcctgcacctttaccgtgccggcgtccgcgtgccagtacgccagggcgtccgtttcaaagccggaactgtagcgcttttccaggccgcgcaggcggtagtagcgcttgaaaaacagattggccgtcatctctccggggagctggttggaccagccgggccattgttccatgccccacagcttatgaatgaaatgctgggagcctttcgccagggaattcgtgcccgtggtgcccaattgcagctccagggaattggccctgtcttcattcttgaccagggaggtcaggcccagcgtcaggttgcccacgtagggatgctggttataaatggggtaggtagccttctgctccggggtgtacatgagctgggtcaggtccagcccccactgctggcggaggttgggggaaccgttcatgcccatgaaccgccgccaggaagcggaagcgttcgtgccccccagcaccgttcccagcatgccggaaaaggagtggccccgggatgtggtgccggacatccaggcaaagcggacgccgttggtataattatcgtcatctcccacgaacatgtcgttttccagatggaaactgatgacagggccctcctgcggcgcttctatctgctgggttcctgcctgaagggaaaccgccgacaacaggccggcgcacatgcacaaagccgtacatttcatgcgcggcagtttgtgcgtttcacttccgcgtggcaaggaaaaatcaggcatgccctgtgtttgcacttttcaaaaccgggaaatatccacagacttcccctgccctgccagggtttttacgccatgattattgacacgcactgccatctggcttccgcgcaattcgaccagtcccgccggaaagcctatgtggagcatgccctccgggaagacattgaccgcatgattacgctgggagcccgcccggatgactgggaggcgaacacggcgtgggcgcgccagttcccgggcgtggtcttttgcgcgctgggcatccatccggacgacgcccatgaagcgccggagggctgggcggaccgtctttcccgcatggcgcaggatatccccctggccgccatcggggaaacggggctggactacttccacggagccccccggggctgggaggctgacagcttccgccgccttcagcagaacctgctggaacagcactttgacctggcggcgcgcctgggcctcaacattgtcctgcacacgcgggaccggaaagggtccggaagctttgaagacgccctggcgattgcccggaatcacgcgggccgcgtgcgccccgtgttccactgcttcatcggagacacggcccaggccgctcgaatttttgacgaactggacggcatggtctccttcaccggggtggccacctttaaaaatgcccccgtggtggcggaaaccgcgcgctggtgcccggaagaccgcatcatgctggaaacggactccccctacctcagcccggaacccctccggggccgcatgaacgaacccgcccacctcatccatacggcccgtttcatcgccgcttccagaggcatggaactggatgagctggcccgcgtaacgacgcaaaatgcggaaaccttttataatctggacaagggctgaaaaaaaatcccggcaatccacgctagcgccttgaaaccgaaatcataaattagtatgaacagggcacacatgaaagcgccattcatttttacctgcgcctgcgctgccgcgctggtgctccccttctcttcctgctccacccagaattcctccacggccggctatgacactgcggaaccggccagcggcgaaatcccgccgtggattgcggaaagctctgatcccgcttatgaatccggccattacagcccggtgaagagctcctccagctcttccagttacgcctataatccgcccgccaagccttccgtcagcaagaaatcccccacgcggaaaaccacggccagcaacaaatcctcccgcagcacgagcgccagaaagagcaccacgcgcaagcccgctcccaaggcacgcacctacaccgtgaaaaagggcgatacgctgggagccatcgcccgcaggaacggcacctccgtcaaggccctcaagagagccaacggcctcaagtccgacatgattcacatcaaccagaagctcacgattccgcgttccaagtaatccggggggcccttcccggtttcaccgcttatgaagcatctctttcttctggccgtcctccccgtggttctcatggggtggacgtcctgcacccactccggcaagggccatacggccctgccggatccgcgcgctgtggacaaatccgtcccggagtataaaaacccgttccatccctccacgtatgcccactttgtagcccgcaaggactaccggaaaacgtatgacgtctacaaggatgataccctgctgaaccgcaagccgaagaaatcccgtaaaatcttcgtctgcctggacgagcagcggggccagtacctggtggacggcctgatcgccatggactttcccctctcctccggcgtcaaggcctacccgaccaaaacgggagactacaccgtcatctccaaaaaggaagaccacgcctccaacctttacggcaagatgtatgatgcggaaggcaaatgcatcaactataacgccgaatccacggaccccgttccggagggaggccgctttgacggttcccccatgccctactggcagcggcttaccaatgcgggcctggggctgcatgtggggaaggtacggcgccaccccatctcccatggctgcgtgcgcctgccgcggaacgttgcggaaattctctacaagcaaaccagcgtaggaacgcccgtcaccatccagagaacgcccctgcccgtgccggaagctcagaaagcccctgccgtacagtaacaaacagacagaatcctgctacagcaaaaacgacttttaccggacagtccttttcaaatatatttctaaaaaattctcttcctttagcggatccctgttaattcacctgccgtctgcaggattgtaataacagtagttgtaatagaccaaagccaatttgccgtcgttcatttcgctggaccattgcaccggctggacgagactgcccgtgccggtcacggtcccatagggcgagtagtcgtaagttgccgcgatcgttccccgcgcgtcgaagacttccgtcacattcttgttaaagtcaactccatagcagtaaagggcattgtcctgcaccagggccagggggcgcgtggccaccggttccaggggatcccacaacagtgtccgaagcacgttccggttgtccagcatgtccaacgccgctatttggaggtagccacggtacaggtagcgttcatggctggcgaccgtcccgttgacggtgactttcttcatgtagcggcgtcccatggagttgtacccgcattccactactatgcgtcgtcctcgctggtgaagcttaccgcatggttggttgcgttgtacatagctgtccacacgcccgttgcggtcttgatcaatgttttttggttgcctgaagcgtcatattgcagcacaaagggcgtttccccactttcttccatgcgggtgtactggttgagttcgttgactgcgtaagtgagttcttccgctatctcccgcgccgccttgcgattgccgatgttgacgtgactgttcccaaggcggctctagtgagttcacttctggcatcataagtgaagctgtcggcgcggacgtttctgttccacgtagttaataactacattcctcgatggcagtagtttcttctttcggcttcttaatttaatggaaaggatattctgtttatccacacaacaccccttaatttggatggcgagtgtaatagaactattcctctatttcatcattatataatttaaatagataaaattcaatatatcctaccattaatccaaccgctcctgacaatataaaaaaataatgatgttcatcgcataagatacggtccagcatagcgcccataatgagtccgataatcagtcctaaaaaacaagctaccagttgatttatttcactagggaaaatacgccagattacccagccaattacagccaatataaatgttactggaaatgaaaatacaatcattgaaaatccagccatgacggcatggtgaaaattagataaacacatggaatgtccggcgccaataagccaaggagcaaccccgcaaattaatatgatatgaattatgttgtatattagttgcattgagaatcattaagtaacatattccaaccaatatcagaacctccttccggaagtcccaaaaaaggaataaagcctcggctggcataacaagtcacatgggcttttagcctacagttgtttctttctgaacaacacgagacgtcttgacactgcttttcagcatttcatccggcgtagctataagaagcaccttccaatattaaattagccattaaatctaattgatagttatttcatattcttccataaggaattaacggaatatccatgaaattataactccacaaattggaaataaataaaagataatgaataaaatttttgatttttcatatatgacgaaaatattaaagaaagatatcatccatattagaatcccgagtgacactgttagcaacgtatcataattacatcctatttttctcggaagaaaataatacatcaccggaacaatcaatatcatgaaaataatatagtttacaatagaattgcccatttttcctttcttatcttgagaaaggatatcaaatgttacaattttttttactgctttttttgcgtttcgtttatgttctatttcttccataccatatagctctataagaccaatccacacaattattaataaacatattgtatggaggaggtttttccatatcctgttgcactccccgaagcatattcatatcttctacaggagaggatggaatagtttctggattagttagattcaaaccatcggaagattcaacatgaccatttcctataacaaacgatcctaataatatttttatgattattatctcccctaattttagagcatataatggattccgggtttctacccatttttgcgccaaccatcccgttagcctatcagtaggattcaaaccataatcaaacgtcttaacccctactttacaccatttcccgtctttgttcttctcccaaagatcaacagctacacctatatgcaaggtaaatgtcatgtcggataattgatcaggtaaaatctgtgaaatgtatctgtcatttccatttaagtcattaaaaatatatggagaatttttaacaaaaccataaagattccatccaccttcttcagcgatgggatcgcaattgatccacctgccctctgcaggattgtaatagcggtagttgtaatagaccagagccaatttgccgtcgttcatttcgctggaccactgcacggacgggacgaggctgcctgagccggacacgatcctataaagagtaacaataagctatcgcaattaaaaaatacggaactgtttactctagtcttgtttcatggatcttctctgtttttcatctgagcaattttctgaatatcaaaagctagaatcttttggaaatcttacagcaagactattattcataattccgtttttaaatataaattacatatttaatattaaataaataatcgaatacacaaaacctgaaaaagccattcctaaaagaaaaaaatgtacttgctttaatcgtctgtaagacatatttcctcggatagcaattacaagataaagttcatctggattccaatgtgcgtttatcttacaaagaacgtatacaactatagccacacaggacatcaataataacgtgtacacagaacttaggaatatagcgatcacaacgcatccgccagattggtacagagctaacagaatgagtgcacataaaacaatgagaaataaagaacctataatttcagcactgattttgtattttctaactatattctgaatttctctccttttataaaacttttcttcttgctttgtctttgatgttaataaacacatcaaaaaggacgaaataagaacccacagtatagaagacataaatctacatttttagttcaaggcaggccatggcctagatggcaaaagtggtgaagtggggggaatcgtacgggtagataaacgctctgcagttctctcaacagaagttttctccccaacaataacttgaatcgttcaatcttccatattatctaaatccgatgaaatatcccaggattgaattatcccttttgccaatgctttattagttattttaagagtatacatggtaaattcttctttaacataatatgcccacatatgattattggtttggattaaaacagcctgttcatattgaagtttagttactgattttaattttccatattttttaagtatcctaatcttattttgaaattcaacaaatttagtaacacacctttgattttttgcaagaacttatccgaatttttggaaacttttcattacacttactcctggaatgatagcaccagaaaccgctgtagcatctacagaaacccaatcaatatcatcagcaggttttccctctataatattaggagtaacttgaattccaatatcaacagcagcagaaattactgcagacactagacgatcaaaaaataatccgccctgtcaatattttttataggatcgtttcccacgaacgcatacaaattccatcctccttcttcagcgatgggatcgcgattgatccacctgccgtctgcaggattataataacggtagttgtaatagaccagggccaattcgcgatcgtgcatctcgccggaccactggacgagctggacgaggctgcccgtactggtcacggccccatagggagagtaatcgtaagccgctacagcagctccctgtgcgtcgaacacatccgtcacattcttgttgaagtccgttgcatagcagtaaagagaggcgtcctgcaccaaggtcaagggacgcattgctaccgttccaaaggatcccacaacagcgtgcagagcacgttccggctgttgagcatatcctgcgccgctagttacaggtagctacggtcattctattataaggatttttaggggatccacattttttatgattttttgttatcttttatacaattgttctggtactattatatcatatggaaaatgttccgattcaattctcttcctgtgttctttgtaatacgctagcttcttataaaacaagtctgaaaacattttttcatgattatttcaattggaagcagatttatttttgattttcttcaaaacatctattattctgaaacactcaatgactataataagataagaaaaaattaatgctgtatatgatattaaaagttcattcgaaaagttttcccataatagatttataccatgatacattgttgacaaaactccacttattccagagatcagaaataaataaattgtaagtttgataattgaaaaagggaagttattaaatgaaaaattaagagtattttttttgatccaaacaaggattcttaaaaataggattacaaaaatacatccacaaactaattcgaaatattcatatccggttaaaggagattcagggtaaatcataataaagatgactaattatatcgtgttcattatttagaccatatttttttattttcattaaaagatttgttagcgatttctccagtttgatctataacaaatggaattttcaaagtagcggcaatcttaacataccccgttgcatctaaagttaaagatattggttttgcattcaaagttaacccagcacttatcttaaaatcaatagaataagatgcttgtatataagatgataatgtaatacccgcatcaattctatgagacaatcctaataattcttcccgataggatgttgaacttttaccattacaattgtcaattttaagtattttttcattacttaatccagcaaccatagttcgtaaagaatattcaatatcaggcagaataggcaaccatttttgtttaattttaagtcttatgcctacacctataccaacatctgttcgtaattttgcttcaatgcatacacaatttttctttttttctattgatatacttccctcaataataagaagaatgggtatgtaacccgcagggatagtcattgtgtagccaaattcgttagtttcttttccgagataatcaatagtgaataccacttcattatcaacaaacccatacaaattccatcccccttcttcagcgataggatccctgttaatccacctgccgtctgcagga

SEQ ID NO: 5 - DNA, 2801211 bp, Akkermansia muciniphila (residues 1-1,400,606 of 2,801,211)
  source 1..2801211: mol_type = genomic DNA
ccggcggatttaaggaagcagggccccggattcgaccttcccatcgccctgggaatggttgcgggagcggctgaaaaggagatggacgcttctgcctggtgcattgtgggagaactggccctggacggaaccgtacgccccgtgcaaggcattctgccgcaaatcatggaagcgcggcgcatgggcaggaagcgcatcatgctgccgcaagccaatgcctatgaagggacgcccgtacagggtgtggaaatttatcccgtttcttccctgagagaagcctggcatttgcttacttccgacgccctgccgcctccatttacaggttcagggcgagaggcccatgctccacgggacaaagacgccgctgtggattttgacgaaatcaaagggcagccttacgcacgccgcgccatggagattgcagcggcaggaggccataatatcctgctttgcggctctccggggtccggcaaatccatgctggcgcaaaggctcccgaccattcttccgcctctgagtccggaggaagcgttggaaaccagtaaaatccactccgtatgcggtctgctgaaacgggggaacggcctggtggaccagcgtccgttccgggctccccaccacaccatttccgatgccgggctgatggggggaggtgcgaatatcacgccgggagaagtatcccttgctcacaacggcgtcctctttctggatgaattgccggaattccgccgtgccgctctggaaaccctgcggcagccgctggaaaccggccaggtagttatttcccgcgcttccggcaccatgacatttccgtgccgtttcatgttggcagccgccatgaatccgtgtccctgcggttatctgggagacagaagaagagcctgcacctgccccccggcgcagatcgcacgctaccgccataagatttcaggcccgctgttggaccggtttgacctgctgatggaagttcccgccgtggatccctccattctggcttccgcgcctgccggagaatgttccgccagtatccgggaacgcgtggcggccgcacggcggctccagtccagcagatacgcaggaacgcctttccgcaataatgcggccctttccggaaaagcgctccagaagtattgccgtctgctgccggaagggagggctatcctgctccgcgccgtggaagaactggccctttccgccagagcctatgaccgcattttaaaggtggcccgaaccatagcggatttggaaggaacttctgatattcaggatgtccatttgtatgaagccgtgcagtaccgcgctttcgagcaatcactgagggattagcactatgaatctctctcctttcgcaactatctcaaaaacaaagacatattcccgttccgaaaataaaaaagaggcagcttttcagctgcctcccgaataacgaggatatttactatgaacgtctgcggcgcagcaacatggctcccaggcccagcaggcccaaagacgctgcggcaggctcgggaaccgtttcataggaaacctgtatacctgtaattgtataagcggaagtagcggttccggcaccaccgcgcactccggcaactaccttatacccttcctcccaggtaaggggagccgccgacatatccagggaaattgtcgttgtttccgatgtagaggtaaatgaaaagtcctgtatcctggaaagttcctcaaccagagtgccggttgaatcatatacggcaagcaccatggaataactgttgattacagaagaaggagtattgcaggaaaacgtaatggaagaaacggaatccccctcctgcggccctccaagaaccatggcaaaagaatccccgctaactccggcgcgtccgcataatgtaatggttcctacattgttctcattcacccaagtgccttcaccatttattccccaatttgaaatggaattgttattgccgccggcatatattccattttgcaggccctttactttgtccagaagctcttgccccgatgttctcgccatagtggcggtctgtgatacgctttgcgattcaggaagctcagcaacaatcgtagccgcctgggcggacatcatacatacgcaactggctaacaaaacataatgataaactctcataacgctttgcattgattagaggattgttaatccgctctttttctttccgtaacatcatggggaaaacgctggacctattttcttcatgaatggtttacgataacattcgattcataataatgaatgatttatgaaataacatgcagatgttagaatggaagaggcgcaaggattagtctttataaagtccttacatcaaaaaagaagtccactgccggaataccgctctttcaactttttatgttgacaacggattaacaatccgctgtcccctttatccaatccttaatgataaagaaaaagccgcctcagcaaagtgaggcggctttttccaagaagactttttaacgaatagcttccaaagcctgtttgaggtccgcaataatgtcttccgcagcttccgtccctacggaaaaccggatgaggtcaggccgtacgcccgcctccatgagctgctcatccgtcaactggcggtgcgtatggctggcgggatggagaacgcaggtacgggagtccgccacatgggtcacgatggcggccagcttcagactgtccatgaacttgatggaacgttcacggcctcccttaatgccgaaggttaccacaccacaagattggccaccgcggaattgcttctgcgccaattcataatactcattggaagaaagacccggataattaatccaggcaacatcttcctgcccttgcaggaattccgccactttctgcgcattttcacaatgccgcggcacacgcaggtggagggtttccaaacccaaattgagcaaaaaggcattctgcggagactggatggaacccagatcgcgcatgagctggacggtcgccttggtaatataggctcccttgccgaagcttttgctgtaggagagcccgtgataggagggtccggttccgtcaaacccgggaatttatccttgtgcgcttcccagtcaaagttgccgctgtccacaatcacgccgcccacggcggcggcatggccgtccatgtacttggtggtggagtgggtgacgatatccgcaccccattcaaaaggacggcaattaatgggtgtggcaaaggtattgtccacaatgaggggaacgccgtgcgcatgggcaatatccgccattttacggatatccagcacgcaaagcgtgggattggaaatagtctccgcaaagaaagctttcgtattggggcggaacgctttggcgatttcctccgccggagcgtcctggtgcacgaaagtaacttcaatgcccattttccggaatgtgacggcaaagaggttgtatgtgcccccgtaaatcgccgaagcactgacgatatgatccccagcctcgcaaatattgaaaatggcaaagaaggaagccgcctggccggaagacgtcagaatggcggccacaccgccctccagttcggcaatttttctggcaaccgcctcattggtggggttctggaggcgtgtataaaagaatccggattcttccagatcaaacaattttgccatttgttcgctggtctcgtacttgaacgtcgtgctctggtaaatgggcaatacgcggggttcgccctttttaggcgcccagcccgcctgcacgcacagggtctccggtctcaattcctgattcatcatgcggggcatgctatgcgatgcctcctgccttgtaaagcagggaaaaccagacgtatggacaaattcgcccctgcccccgccgaagcacactcccggttttttcccagtataaaacccctgttcccggcaaatcaaccgcaaggacaggggcgttttacctgcgcgcgggataccctacgatcaaatgaaacggcaattcctccgatacccctttcccggaaccaaccgttccccggtgaataaagccgggcatctcactacttgatttccggcaagggggtggaaatttcctcttccgtcagatagcagccgggatcggacccgtaccagtgtccgttggcaaacgcggcacgggtgcggaagcctccgccgcacagggcgaagtgaacgcagcggccgcaacggccttcaatcttcttctgccgctccagaggatcgtcggaaccgcgcagctcaggcaacatttccgctgcagctccggccctggcatcccataaatcggaaaaccggtcacttttcacattgcccagagtaacggattgccagaactggtccggatgcacggcaccctgtgtgtcaatattggcgatgccccggccggaactgttcgcgccgccgccattccattgaagcaggccgagggtttccttcgccagaggggagccttcccggagctggcgcagaagcaggtaaattccgtccgcaggctgggttacagtcagcacttcacggttttttccctccgctttccattcctctacacgggcaatcagcgtatccatggcattccttgcttcctcctgagtcagggtctgcacttccacgccgcggccagtggggaccagatggtaaaaacagacgcgctggatgtcgttggcgtcaataaaatccaaaatctggcccatgcactgcacattgttgcgggtcagagtcaggcgcaggcctgtcttttgccccacttcactgcaaagcctgaatccgcgcaccgcctgctcaaaagaaccttccacaccgcggaatttgtcatgaacggcgccaatgccgtccagggaaatgcctacgtacgccacgcccaattccttgaaccgcgctgcagcttccggcgtaatacgggtgccgtttgtggaaatggtcaccttcagcccttttccggtggcacgttccagcagttccataaagcgcggatgcaccagcggctcccctccggaaaaaaggagggcattcaccttgtagtccgccagatcatcaatgaccgcgcaacactgatcccaatccagctctcccttaaatttccgggcagaggcgtctgcataacaatgcacgcatttgagattgcaggtacgcgtaatattccacaccacaatgggcttgcgcgcacgggacgaagccggtgcacaggattccacggcgccccctgcaaaacgaccgtgcccgtggccctgtccgtatctcaaatggtccgcgggctgttccgcccctgtccaaagtctggtaatattaatcatggtgttgtgaaagcctgggctgataagggcagaggttgtcttccgccatcatgtctccgtaaacggcataagcgcgagaccgggaccctccgcagatggtacggtactcacaccgtccgcatttgccctgcaacgcattgtcatcccggagtttgaggaaaagggggtgcgtgcggtagatttctccagggtcatccgtccggacgtttcctgccgttatggggagaaaaccggagggctgtatttccccggtatgagaaataaacataatgcccttgccgtcccgggtgggaatggcgcggcgagcaggcttgcttccctgagcacgggcttcctgaagcgccacgcggcgataatggtgcccttccgtcgttttgacgccgaaagaaacctcatggcttatcctgctcagttttttccagacggcttccacttcttccgccgcaggcatctcatccatggcggcgcggcctgtgggcaccagaagaaacacgctccacatgcccggtttcatttttttcaccagctccacaaagtcgtcaaattctcccagcgtgctcctggtaatggtggtgttgatttgcaagtgcatgccggcttccttcgccatttccgcagcccggagagtccgttcatatgtgtgggggacaccgcggaaggcgtcatgggtactttcatgcgcaccgtccaggctcaatgacatgctctgaaccccagcttctttcaacgcatggaaatccgtgtgcaacagccgggcggtagcagcagggctcaatgccacatgcagccccttgccggaagccgcacggaccaattccagaatatccggcctcatgaccgggtctccgcctgtcagcaccagcatgggaggccgcagttccgccaactggtcaatcaggcgcaatgcctcctcatgagtcaattcatccgggtggggacgcggctgggcgacggcgcggcaatgtctgcacgcaagcgcgcaagcgcgcgtcacttcccagaagaccaggaaagggcgttcattgagatctgtttcactaaaaaccgggcgcatttttcaggacagccaatttagaacaattataattttttgaccagcccaaaaggacgcatcctttaaaaagttcacttagccgcctcttcacggattttttgaacttccttaggcagttcggaaagggaattcagagcttccttcaggttcctggaagcatccggagaaagcatgatggccgttacatgcttgacaatgggctgcatcatttccacaagctgctgctgcactcccatcagcttggcctgctggttgcgggtgagaggcggcagggcagcctgtttcctggcaacgtccagcatagccgcccggtagcgacctatctgttccacagcagccttgccggtttcttcatctcttaccctggccagagagtcgttaagcttttttacttcctccacagttttggttagcagggtttcatgcgtgttgccctccgcatcctccgggaacggctccgcctgctcagccttatcccgggaagcttgcgccagctccttctgaacagactgtaaatccgccagggctttttgcaaatcaggcgtaagcagaccttccttcttcaaacgggacagagattttatcaattcacctgaaattttctgtgcttccgttatctgggcggaaacctgagcctgctcctgaagcgtggcaccaggaagctccagctgtcttttcccaatgtccagcagctttttatgaacttttttaaccgtttccacagcagcggccgctccaggttcatccgttaccttgtccagagccgctgcgatttcatgcatgctggcaacgctctgcctggtcagggaaagatgggagtcctgggcaaatgcggaggctgttatgcaaacggcagtgcccagactgatggaagcaacaattttattcatgatacggaagcctttccggtatggaagaatacgttttcctcctttccccgtcaatggcggctattgtcaagaccactatatgaaaaaagggctgtccgcaaacaagcggacagcccttttgaaatcttaacagcccggccttagtcgcgctgctggcgtgaatacttgtagtagctctggaagctgagttccgcagggaattcgctcaggccgccattgggattgtattccttgaggccgctcatgccgcagcgcccctgataagggggcttgtacgtgcatttgtaagtaggagcccagaaggtgacaagttcataaattccgtagcccatgcgttcaaacatggtagcggtgccatcaacaatgcctacggaaaaaccggcataatctccctcgcggctcgtccagttgatgattcccagcgggatttcttcaacggaataaataaggttggcgatggcgcggcccagcttgcgggtgggggtatattcggaagcggggggagcctgaatgtccgcactggcgacaccaacgacgccggcggcaaaaagagctgagatgatggcacgtttcatactgattgtttatatagtataatttgtcgagggaaagcaactcaaaaaaacaaaaaatcaatctaattccggccggggatcccgcgtcatgagttccgcaagcgcttccatcggcggcttggattcataaagaacggaataaacggcgtcaatcaggggcgtcctcacctccagcttccgcgcaatttcatagacggacaacgtgttgggcaccccttccgccaccatgcccagggtatccaggatttcctggagactcttcccttccgccagtctccgccccaccgtctggttgcgggagtggcgggaatagcaggtaacaatcaaatcgcctactccggaaaggcccatgaaggtttccctgcggcctccgctggccacgccgatgcgcgtcatttccgccaggccgcgggtcagcaaagcggcctgggcgttatcccccaggttcagcccttcgcataagccggccccgatggcaaagacgttcttaatggttccgcccagctgcatgccgataatgtccgtagcggaataaacacggaaggttttggatgcaaatatctgctgcacccaatccgcatacttcggatcttcaaatccaatcagggaagcggacggaaggcccaggcagatatcttccgcatgattgggaccggaaagcacgcctatggggttggagggcagatattcctgaaggatttccgtcattcttttatgggttccctgttcaatgcccttggtgcaggagacgatgacggcatccggctgcaccggcaggctgcgcagccgctgggccacggaacgcatggctacggaaggcaccactactacaatgagttccgcatccttcacctggcccaggtcgcaagtaggatggatattgggggccaggggaagggcagttttcgaaaggacggggctgcgccttgtttcggcaagctgcctggcctgagcctcttccggcgtccacaggacgacttcacattcccgggtcgccagaaccatggagagggccgtgccccaggaaccggctccaatgactgctattttatgtaaccgattcatcatcttacttggactttttggaatagaaggagtgctccgttccgttgagaagccttgcgatattggaacggtgcttgagaatcaccagcgcgcctaccaccgtgaaaaaggcgacgtaaagtatctggggggagacatccccgtcctggcaaagaggataaatccaccatccggcggcgatcatcaccacagcggccaccaggctggccagggacacgatgccggagattcccataaccaccagccaagaagccagagctacgcaagccaccaccggattgagggcaaataaaacccccgcggttgtcgctacgccttttcctcccctgaatcccaggaaacaagtgtaagtatgaccgagtataacagcgaaacaggagagaactaccaagacattgaaatcccagccgcccgcatcccccgtcaggaacggcagccagttcaaggcgccgaacacagggatgaacccctttaagaagtccagaatgaaaacggaaaggccccacttccagcccagtacgcgccacgcattggtagcgcctatgttgcgggaaccctgctgcctcaggtcaatccctctgattctgccggcaaggtagccgaacggaatcgctccgatcaggtaatagaaaactatccaggcaatcatgttgtgcggagtgcattttaatcccccgccggtcaaatgacaatggggaaatcacctccggcccggttctttccggaggggttgctcctgtaaaagaacaccatacctgacagcctcctccagatcctcattttcaaggctctccgtgccccggtctacggaaaagccctgtttaaggcgcaataagaacagcgcgaacattttcccgcccgcccagaaccatgctcccgcacttccttcgccggaataagcttatttaccgccctcgcagggtttccgcatgacggcagcccagacggaggcattatcctgctggggctccagcatatccttcacctgttccataatgatccccaccagctccctgctggaacaatccctggccttttgaagagccaggaaagaaggttctctcaacagctcgctccaaacctgcaagccgtccgagcatgccagcaccgcatctcccggatgcaggagcaggggcatggcgctgatgtccaccagttccatgggaccgcccataacggcggaacggagaatgcaacgctgccgaagcgcaccctgaagtgacattttccccttccggtaaaggcaatccgcaatcggtctcatggaatggtcttcattcagacggtccatgcgaaagctgtccgctccgctccataaatacaggggggagtctcccacgctgatccaccacaggaaatggtcgcggatgaagacggccagcaatgtggttccggattcctccggttccttctgaatggcggccaacgccctgttggcagcatgcaaagccgccgttaaacgttccgggatatcctcgatgccgctttccgcaaataccgcggcaaattcctgcgccaccacacaggaggcgcaatctccgcgaagatgccctcccatgccgtcgcacacgatgcctagcatcccgccagcggcgggaagacttttaaccacgtcttcctgctcgcggcgtttgccgatccattgggcggaagcgcagtccagaatatccggggtgcggggagccatgcggccggtggttcggattaactgtccttacgtttcaactgcgggaagagcagcacgtcacggatggaagaagcccccgtcagcatcatgacgacgcggtcgatgccgatgccgatgccgcctgcggagggcattccgtattccagcgtttcaatgaaatcatagtccacacgctgggtctccccggcagcctggtgctccaggcgttccttttgcacgtcaggatcgttcaattccgaatagccgggggaaatttcctgcccgttgatcaccagttcatatacatccactacgtccggattttcccggttcagcttggccaagggaaccaggtccgtggccacgtgggtaacaaagcaggggttcatggtcttttcctccaccagtttttcatacacctgctgggaaacatccacatctttcatatccgggctgatttccactcccagctcttcacagcgggcgcggcgcgcttcgggggaaatgtcaaaccagtcttcccccgccacgccccggatcaggtcctggtagtcggcgcgtttccagggacggctgaggtcgattgtgtaaagaacgttgccttcagcgtccttgtggtcaatctgaaggccgccgcagaatttttccgccagatggcagatgagctcctccaccatattcgccatggtttcaaaatcaccgcaggcgcaataggcttccagcatggtgaattccgggttgtggcggcggtcaattccttcattgcggaagctgcggttgagttcgaaaattttcgtgaagccgcccaccatcaggcgtttgaggaaaagctccggggcaatgcgcagcgtcagcggcatatccagcgcgttatggtacgtttcaaacggcttggcggcggccccaccggccacatcctgaagcatgggggtttccacttccagataaccgcgttcctggagaaagcggcggatttccgcaatcatgagggagcgcgtaacgaacagggaggcgctttcctcattggaaatgaggtccaggtggcgcttgcggtaggtcacctccttgtccgccagcccgtgccacttgtccggcagggggcggaggcttttggaaagaatggtcagtccggatacctttacggtaggttctccggtacgggtcaggaacgtggttcccctgatgccgacccagtccccgcggtccaggagcttccaaagcttccaggtggtttcatccacctcatttttatgcaggaacccctggatttttccccgtacgtccccaatgacgaaaaactgggatttgcccatgtcgcgaatagccagaaggcggccggcgacggctacctgtttgtcttcctggaaatcggctttcaatccggcgggagtggtggtcacgtcaaatcttgcgccgtaggggtcaattcccagctcacggattttggcgagcttgtcgcggcgcacggcaataagttcggattccgtcgtggtcggatgtgcctgctgttgttcggacatagtgcggggattctaaaggcttgcttccgttttggctagcgcattgtcaggcagaggggacatttttggcggccggttttgacccgaaggttccttccccccctttttcggaagccggatgccggaacattccccagtactccggccgttttgcaaaaagcctgggcagaaccacataaagcacgatatccaaaggaattgaaacaaaactggtcttattattaaaaaatggccggcaaatccccacatacgcataattgcttttacctttggcaacagacatgttataaatgttcccgttaagacgcaccttatttatcaattatatactatccgtgcagacttatgagtgatcagacaaccgtaacttacagcacgattgacgctaacgaagccgtagcctccgtagcctatcgtttttctgaagtcattgccatttaccccattacaccatcttctccgatgggtgaatcagctgaaagctgggccgctgtcaacaggaagaacctgtggggcaccgttccctccgtggtggaaatgcagagtgaaggcggcgcggcaggcaccgttcacggcgccctccagaccggagcgcttgcaactacgttcaccgcatcccaggggctcctgctgatgattccgaacatgttcaaaatcgcaggggaactgactcccgccgtgttccacgtagccgcccggtccctggcttaccaggccctttccatttttggcgaccacagcgacgtgatgagcgcccgctcctgcggatgggccatgctgtgcggctcctccactcaggaagctgcggacttcgccgctatttcccacgccgctacgctggaatcccgcattcctttcatcaatttctttgacgggttccgcacgtcccacgaaatcggcaagattgcagacatcacggacgataccctgaacggcatgattaagcaggaatggctggattccttccgggaacgagccctgacccctgatgctcccgttctgcgcggcactgcccagaacccggacgtttacttccagggacgtgaaacggtcaaccgtttctatgaagccactccggctattgtccagaacgccatggacaagttcgcggaacttaccggccgttcctaccatctggtggattacaccggcgctccggacgccgaacgcgtcattatcctgatgggatccggcgctgaagctgtggaagaaacggtagaagccatgatgacccgggaaaacgccaaggttggcgtgctgaaggtgcgcctgttccgcccattccccgccgccgaactcgtcaaggccctccccgctacggtcaggaaaatcgccgtgctggaccgcaccaaggaacccggctcccagggagaaccgctccatcaggacatcatccaggccctcttcgacgcccaggccaacggcacgctgcccttcaccaacggcatgcccaaggtggtaggcggacgctacggcctctcctccaaggaattcacccccgccatggtcaagggcgtctatgacaacctggctctggacactcccaagaatcatttcaccatcggcatcaacgacgacgtactgggcaccagcctcccgtatgatgaagattattccacggaagcggacgacgtgacgcgggccatgttcttcggcctcggttccgacggcaccgtaggcgccaataaggatgccatcaagatcatcggccagcatacgaacctgtatgtgcagggctacttcgtgtatgactccaagaaatcgggttcctccaccatttcccacctgcgcttcggtccccgtccgatcaaatccacatacctgatcaccaaggcaaacttcctggccctgcaccagccttccctgctggatctgttcgacttcctgaagaatgccgccaacggcgccactttcctgatgaacagcccgcacccggcggacaagctctgggacacgctgcccgcccgcatgcagcagcagattctggacaagaacatcaagctctacacgattgacgcttttgccgtggcccgcaaaacgggcatgggcggccgcatcaatatgattatgcagacctgcttcttcaagctggccagcgtgattcccgcggatgaagccatcggctacatcaagaaggccattgccaaaacctacgccaagaaggggcaggaagtggtggacaaaaacatcgccgccgtggacgccacgctggaaaacctgcaccaggtggacacaaccggaaaaactgtaaacggacacgccattccgcccgccatgtccccggacgctccggattacgtacaaaacgtccttggcaagatgatgtgcggtgaaggcgacagcatcccggtcagccaaatgcccgtggacggcacattcccgaacggaacgtcccagtacgaaaagcgcaatctggccctggatctgccggaatgggatccgaccctctgcatccagtgcggcaagtgtaccgccgtctgcccgcacgcggttatccgtagcaaattcttctctcctgacgctcttgcaaacgccccggaagggtttgaatgcctggatgccaagcatccggactggaagggagagaaattcgtcatccagatttccccgaacgactgtacgggctgtacgctctgcgcggacgtctgcccggccaagagcaagacggatccgacgcacaaggccctgaccatggtcccggccgggaagattcacgacaaggaagaagccaattggaatttcttcctgagccttccggacgtggactgcaccaaggtaagaacggacaacatccgctccatgcaggtgctgcgcccgctgttcgaattctccggcgcctgtgccggctgcggtgaaactccgtatgtaaaaatgctctcccagctcttcggcaaccgcctggtggtcgccaatgctacgggctgctcctccatttacggcggcaacctgcccaccaccccgtggtcccatgactctgaagggcgcggccccgcctgggccaactccctgtttgaagacaacgccgaattcggccttggcttccgcgtctccctggacaagcagatggaacacgccattgagcttcttcatgaagctgccggcgccgtgggccaggaactggtggaccggatactggctaatccgcagaaggatgaagcagacatcgcccagcagcgtgaaaacattgaagaactcaagaagaaaatcgccggcaagccggaatacgcgcgcctcctgacccttgcggataaactcgtccgcaagagcgtgtggattctgggcggcgacggctgggcctacgacatcggctacggcggcctggaccacattctggccagcggccggaacgtgaaggtgctggtcatggatacggaagtatactccaacaccggcggccagtgctccaaatccaccccgcgcgccgcagtagccaaattcgccacgaacggcaaacccggcgtgaagaaggatctgggcctcatggccatgacttacggcaacgtgtacgtggcctccgtcgctctcggcgccaaggacgaacacacgctgaaagcctttgtggaagcggaagcctatgacggcccggctctcatcatcgcctactcccactgcatctcccacggcatcaatatggccaagggcctgcagcagcagaaggcatgggtggattccggccgagttctgctttaccgctataatccggacctggcccgccagggcaagaatccgctgattgtggaaggcaagggcccgaagggcgatctgcgcgatgtgctgctcagcgaaaaccgcttcaaacttctggcgaagaccaataaggaaggattcgaaaaactccttgaagaagcccagaaggatgtctggcaccgctggaacctgtaccaaagcattgccggcatgggtgccgacaaacctgcggaataaggtataggccgcttaatttcaacgcccctgtccggcttatccggcaggggcgttttttactgccggatattcatgaaaaacaaaccatgaatatttcggggaggggactgcttttccgccccgccatacagccacgcaagcaggcttcccgcgccagtactttcccttcctgaaagccggagaattcatccttcccccgcagcacaaaaaagggcgcacaccttgctgcaaggccgggttttaatatatcaccttatacgggttaatttccgcatggaggttttgaaggccttcaatgaaccgcagcctttgcggccagccatgtccaaggcaaagaggggcatttcatgcggccaggggaatactgtttcctcacaccttcctccccagaggagcgcggcccgctttcctgcggaccgcgccggtggaaaaaccggaaaaaggctttaaaacagggatgctgcttcaagattcccgaaaatggtgcacaccggaggaggaatataccattccggatgccgtatccgggaagtgcaccacatcaggcgtcaggcgagtgcccacatccagatagaccagcttctccgtagcggatccgttgcggataacatgcgctccctccgggctggcagggaatgcaatcgcatccccctcttttaaattcttttcaccctcaggcgtacgcacaacggcatggcccctgatgatgtaaaatacctcttcattcacttcatgataatggtagccataggcgtaccgccccggctccacttccacgaaactggccgcacattttccggcatccgcttcccggatgacgggctttaccgcaaaggaattaccctcccggctgataacctgaggctccgtctccctgtaattggcaatgatgatcttgttcatggcattatctgttcatgcttgccgtaacggcaggcacttattaaaataggcggcaacattctttttgtaaagtaggcagaaaatagtactctggattcctgaaagaaactattgcttaaaataaatgacttactataattcatcatgccctgttgaaactactctccaactgatttcctcccgctggaaagtgctcatcctccgcgatctgctcgaaggcacccggcggtttggagaactccgcaaatccattgggcctgtgacgcagaaagttctgactgcgaacctgcgttctatggaaaaggacggcctgcttacgcgaaaggtgtatgcggaagtacctccgcgcgtggaatatactcttacggaactggggcgcagtctgcgccccgtcctggcctccatggcggaatggggatcgaaataccaaagagaaaaccgctgatcctcccccctttccggagcttaaccgaacctccggaaagacatggaaatacagcagtttccctttttcccgcaagaaaggtcagcgggaaatttccgtcgttttacggataatttcgcgggctttccgcacgtcttcctcatgggaatccccgcggcttttttccacggtaaagagcttggaaagctcttcatccatgcgggctacggcagctttcgccttaggattttttgcggcgcgggcgcgcaggatattgaccttttcaaattcctccagtccgtcccggagtttttcaaaccgcagggaactgagattgccgggataaacaaggtagcagtctcccgcgggccagttcccgaaatcggtcttttcaaacggattacggttccaggaattataagcccatctcaaaaagccgtccaaatgattggcggcggcaaagaggggaagccattccgcctccgccagcggggaaatagtgaaggtgttgggctttttgggatggacacagacatagaacgtcgtcttttttccctcctttttacgctgcgccagcagatcgcccgtgaccgtgcctgcatggtcaattacaggagagacgtcataaacgtcccgggtcatggccgtaggccgattgacggcggaaacgattttgaattccggggcatacttgtccagtacattcttggccgccctgaccatagcgtccggccgttcatccagcccgatgcaggttttgcccagccagcccttgctcttgacgtgcttgcgaaaatccgtcaggaaaggcccccagatagcttcataggagggatcgttcggcttaagatccagaaatttgtactttccggtcgcctcatccaaataacggattttcatgttccagggaatcatggtatagcaggatatctgccccttgacgcccacctcgttcatcatgaaggaaacccacttgtcaaaattggcgtaattccagcgcatggttccgtttttgcccttgacccattcaatcatgggcgggaaccagtcataagtctgggcattccaggcttcatcaatcagggagcatgtaatggccttttgcccggcatccgccagccttttcatcaccggcttcatcagtgcgaaatgctccggagaccacggttccacatcatgccagcgggccacggcctgcggatgctgccacaagtccagatgaacttgccaatgcgcgggagcagggagggattccggcgccacctccagaattaccggcacactgacgggagagccgctttctgcggaaactaccacttttcctttgtacacgccgggtttggcagacggggggatattgacctccacccataccggacgcacgcctccggcttgcaaatcgcagctgttttcgctgccgatgatatctgaaatcagcctgttgccccccctggtgtagcgtatcatggcagtccggacagggataatctgtccggcagcgttttttaccccggcgcaggaggccgataactggggctgcgcctgggaagaccagacggcaatctgcccgccagcgcgttcgcctctccagccggacagacgcacggcatcctgaagcatttcctgcccgggagcgccattgtaaggaatacggtcataatccttcaccgctgcagcctgcaggctcagagcggcatcgggtccgtaccctttgatttccaccagatgcccccccttctcattgccggcgctattgcccaaaaaagtgattttaacgtaacggaccgtctgcggattgaatttgaagggaacgccttccggagtggcggcaatgctgttggaagactgatccgccaacattttccagttctttccgtcttcggaaccttctattttatatttgtaaatgcgccctccctcccaatagggccatacatgcagggaggaaagcgtccggggctttcccatatctatctggagccagacgggaatgccctcgcaaccccagtatttgccggcattattcgtctgcccgtccacggccagttccggacggtcactgccgtaatgaccggaagcggttactttggctccggcaaataaattacctgcatcacccggagttcctgcggaaacaagggcgggttcatacaggggatgcctctccagggactgggcctggacaaaagacgttaaggcaatagcggaacacagaggaaaaaaaagacagcgcatacgcatattacgcgccggaatttcattttctctcaaaagaaaagctgtttccgctattccgccaaaggacgtacgggtattcctctggaagcaaagtaagccttggcttccggcaccgtgtattccccaaaatggaaaatggaagccgccagcacggcatccgccttcccttccaccagcacatccaccatgtgatccaaattacccgcacccccgctggcgattaccggaatgcgcaccgcactgcttacggcgcgggtcaattcaatatcataacctgttttggctccgtccgcatccatgctggtcaacaagatttccccggctccgcggcgttccgcctccacagcccattccacggcatccagccccacgaatttccggcctccatgggtggaaacgccccacttgccggaagcctggcgcttggcgtcaatagcgacgacgatgcactggctgccaaaagccgccgcaccttcattaatcagctccggcctattgatggccgccgtattcagggaaaccttgtccgcacccgccagaagcatttcgcgcatgtcctttacggaacggatgccgccgcctaccgtcagcggcatgaagcagcatgccgccgtgcggcgcaccacgtccgccatggtggcacggccatcggaagaagcggtaatatccagaaaaacaagttcatccgcctgctgggcatcatacgccctggcacattctacaggatccccggcatctctcagattaatgaaattggtccccttgacgaccctgccgtccgttacgtccagacacggaatgattcttttagccagcacggccctatcaagccatcaccgccgccaaaggaaaagcctaaaatacggcttgccgcgggatgccttttgataaacatgttccctttttgaccaaggccctcttcggcagcgcttccatcccgcatatccacggtaagagaaatttactgaaattcatcaatatcactattccactcactttccggccggccctgccccgccatgaagaaacgcagtgcggcatctgcccctttcccgcccgcatgcataaaacggcctaagagcttttctttccatgtccaggtggtagagttcgcataaggcatttccattcatgaccactacacgctcgggattcaccaaacttgcagccgtctgcattgccattcttctgggggcggtggtctgggagctgggctggcccctgacgcgggcggaacatgagtggtcgcggctgattgcagccgttgccacactgggccacctgacgggtattctgggttcctatttccggaaggaaatcaaccgcccttccctgaggctcctgattttccaaatcatcagctgcctcatgatttttctcctgattgccagggaacaacaggaagcgggatacatgaggttcacggagctttcccgcctggtgattacggccgggctgattgccatccccacgctgatgtccctgaccaggatttttgaatggctggtgggcaagcaaaaaaaaggccggcctcttatggcccccgccatgcagtttgtagcttctctgggagtagtcatcctggcaggcaccggattgcttctgctgcctaattccacatatccgggtattacactcagttttacggatgccctgttcaccagcaccagcgcagtatgcgtcaccggtctgaacgccgtggattttgcccatacttttaccccgctgggagaaatgttcacgcttgcccttatccagattggcggattcggcatcatgacgttcgcctacttcgtagccatggtggcaggccagggtttttccctgagggaccgcgtgctgctgacggatctgcttgatgaagacaatctgggggccgtcgtctcctttattaccactattgtggtcagtacgctgttcatcgaactgtgcggcgccgtccttctttatttctcctgggaagggaaggacatcaacctgatgggggagcctttgtggtggcattccctgttccactccgtttccgccttctgcaatgctggtttttcaactttcccgatgaatttgatggagccgggcatccgcctgtgctacagcgggcaggcggtcatcatggtgctgatcgtatgcggcggcctaggattcggcatttacaaggaaatcaattcgcgcctggcaaaccgctttttttccaaacaccgccgcctgcacatgcagtggactccttatttcaaactggtgatgatctccacggggattttgctggcgggaggcgccctggccatctttgccgtttcctctccccatgctgcggaaccgttgggggaacacctctggatttgccttttcgacagcgtcacggcacgcacggcgggattcaatatcagcgactacggccgctatctgcccgcagccagcctcattatgtgcggtctgatgatggtgggaggcagccccggcggcacggcaggcggcatgagaaccactacctgcgccattgcaggcgcggaaatcctgcgcatcctccgcggcagggatcatgtggaattcttccgccgccgcatcgaccagcgcaccgtggcgcgctgcgtgattaccgtggtggtctcctgcgcctggatcggctgctttaccgtcctgatttgcgccctggagccctccatgagctctctggatatcttctttgaaaactgcagcgcttttgctacggtaggcgtgtcgcggggcattactccagatttaagcggcccttccaaataccttcttatcgtcaacatgctcgccggccgcgtggggctcttcgcttttctcattgcgctggccggcacccctactccgaggcattaccgctatccatccgtcaaaatcccgttaacctgaatataccattatgagatacaccgttatcggcctgggccagtttggacaggaactctgcacagaactttccgcccgtaatattgaagtagtagccgttgcctccacggatgaagaattggagcaaatcaaggatctggtgacttatgccgtggtgacggattacactaatccggccgctttgcgtgagttggaactggacgaccagtccgccgtcattgtcgccatcggagacagttttgaagaaaaccttctcgtcgtcacgcaccttcagaaaatgggcgtccgctacatctacgcccgcgtcatgagtccggtgcacgaacacattttaagccagatgaacgtgtatgcgctcatcaacttgtcccgcgtggcttccaagcaactcgccagccagttggaatccccggaattcctgcgcgtttcccccatggacgaaaaccacagcatcgtggaaatagccgtgccgcgcatctgggtgggcaagcgcctgcgggatgtgggcctgcgcacggaacaccacctcaacctgctcaccatccgccgcggggaggcccagactccgcaggggcgccgggaaatcctgtccataccgcgcattcccgtcattggcaccccttccccggatctcgtttttgaagaccacgacattctggtcctgttcggcaaagaaaccaatttgattgaattcgcccaattatccaaaggattgtaaaccatcctccgcgagcaggctgagggtatccctctccatttcagaaaaaggcgccggataagccgcctgtgcaaacagcctccgtcctggttttactggcttgacaatgcctcaaaagaagccaccagacgtttttcggagacgcggcccttgacggagatggcgggagcgaaaacggccaggcggtattcttccagcaaataaccgtattgcatccagcgcaggtctccggcatgttccttcaaaacctgatgccagggaaaatacacgcgttcaaagaggtccaggcgttccaattccctggcaaggggttgctggccgatgcgtctgatacgctccgcaattccctgcatgtaccgtttcagatccggcaagcgttccgctccatgcgcccacaggaaacgggggcgtaacaaccagtcaagctggcgctgaaggtcagccgtgatgcgctccgtatggcgcacacccttttgcagcgccgtaaagtccctgacggcatgttccgtacccgccaccagttcccatatatccgccacgttatgcgctgcgtcaaaaaggttttggcgcagattcatttccgcagcagcgaattgctccgccgtgcgcggcaaaggacggcccatggctatctccgcggcaacgtccaccaggtcttccgcattggtagacggctcccgtccgagcatatgaagagagagctttccttccagcttcaacggaaattttctgcggagatggttaagctggtccgtctggcgcaggcgcatgaaacgcaggcacccttcccggtgggattccgcagcgctcagttcatcctcaaagacacggacgcccacggatgctccttcatccaccagagccacataacccggccttcccgccacatccaccgtgtattccaaatctccgcagctccattccttcatgccggttacggacacgatatcctccgctgtttcctggaaccggcgggaaagttttttacccaggcggttattcagttccgcaacatccgtgcccatggcaagctcttccccttcatcatcacacacccatattttcgtaaccagctccgcaggaagacggttcatgtcaaaaaaggagggcgcgcaaaattttcccgtttccacttccacaaattccgccagtttccccgccagcggcccgtccggttccaggccatgcctcagttccgcaaagtaagcggccttttggctgataggctggagaaagacgcgcaaatccttgggaagggaacgcagcaggcattccgctcgctgggccagatggccgggaaccccccactccggcaaccattcgggaatatccggcaactggtcgatgtggacgcccagggtcacgccgtcatcttccgcgccgggatcattctggtaatacacggcatattccgctcctttacaggtgatttcatccggaaaaccatccagcaggtctttcccccagaattcgtacatggcttcctgtggcggaacatgcagagcttccgggtttttcttctccataccggcggcccaccgcaaaaaagccctggccgtacagcagtccgggggaacaagcctgttaaagaattcaaaaactccttcctcacaccagacctgatccggacggcgcaacttcagctctatctgccgaacctcttcccggagtgtttccagatgcctgatacaggcgggtttcgtgcggaaaccaccgcccaacaggccttcacgtatcattatttcccgcgcatgggcgggattgatacggccatagtgcacacgcctgttatcaataatgcgcaagccgccgcacacgacgcgttccactgcgtaaacagccccctgctccctgtcccaccgcgctccggaatagtgtgattcgcacagatggggcgctacccgctccacccatcccggttccaaaatggaggcgcggcgcatccacaggcgcgtggtgtccaccaactccacgcccattacccattcactcctttttttacggcggaacaggccggaaccgggaaaaatgccgaaggaacgtcctccggcgccgcgatattcccggttgtctgcatcccagaggccgaactggcgcggaacgcccgccaggatgctccggtgaatcatggcaaaggaagcctgccgctccgtttcttcttccaaaggggaaattctgcatttcagtgtttccctgaccagccgggaaaggtcctcccataaattgaaccattccatcatgcggttgaaattgaggaaatttttcccgcaccatttccgaagctggtttttacgccagcgccttccctcccggaattgccatgcagccttccataatttgagcagagacaggaagtcactgtcttcttccttccactgcgcgtgggcctgatccgctttctgagcggcatccgcagggcgttcacggggatccatgatgcccaggccggctacaatcaccagcatttccggcagggcctgttcatgttgtgcctccagcagcatgcgggccagccgcgggtcaatgggcaaccgcgccagctttttgcctacgggcgtgagctgccgggctttgtccagagcgccgatctcccgtaaggtgcggtaaccttccgtcaccagtttggatgaaggaggatccggaagtgggaactccggcatttccggcaatcccaggtctttcatccggagcagcgccccggccagtgcgctgcgcctgatttccgggtccgtaaaatccggcctgtcctcccagtccttctcactgtacaggcggatgcacacaccttcgcacacacggccgcaacggccggcgcgctggcgggcgctggccttggagacgggttctatctgaagccgctgcacttggcgtgccgggctatagcggctgacgcgcgccaggccggagtcgataacataaatgatgccggggattgtcagggacgtttccgccacatttgtagccagcacgatgcggcggtatccctgctccggatgaaaaatcctttgttggtccgccaggcccagcctggcgaacaaaggcagaatgcgcgtgtttctcagattccggccttccagtttttccgccacctcacgtatttcgcgttctccgggaaggaagacaagcacatccccgcggtcgtccagagtatccagccaatccacggcacgtgccacatgagccggaagttcctcatcgtcatgctgtggcggcagatagtggaggtccaccggataagtgcggccttctacctgaattataggtgcgcctccaaagaattcggaaaacccgccggcatccagcgtcgcggaactgatgaccagccgcaagtctctccgcctgtccagcaaaagccgcagatagccgagcagaaagtcaatgttgaggctgcgttcatgcgcctcatccaaaatcagggtatgatattggcgcagatccggatcatgctgcgtttccgccagaagaatcccatccgtcatgaacttcaggcgcgtatccggcccggctttttcctcaaagcgcacctggtaacccaccaaacctcccaggtcgcagttcaattcctccgccactcggcgggaaacggaagcagcagccagccttctgggctgggtgcatcctactctgccccgcgcctccccggcaagctccatggccattttagggagctgggtagtcttaccggatcccgtctcccccactacgacaatgacctggtgctcccgcattgccgccagaatgtcattccggcggcgggaaatgggtagatccggataagtaatgttcatggtgaagatgagaaaaaaaccctgcaagaacgtcctgcagggttgaagaagaaaaccgggaagttcttttactgacggggtttgggaagggcgatacggccgctccgggtcagcatctgcacatcataatcctcaatgagggacaggaaacggtctatcttgtactcgcctcccgtcacttcaatggtcagggcgtcccgcgtgacatccacaatgtgggcgcccagtatctggcagaactcaatgacttcatgccgcgtggcggaatctacgccaatgcgggtcaataccgtttcccggtacacattgtccgtattgcggaaatctactacttccaccgtgttgaccagtttttccagatgcttgataatctggtccagaacatcctccttttcgcgtacgacgatggtcatccgtgaaaagcgcgggtcctggctaggggcaacgttcaacgaatgaatattgtagccccgtccactaaacaaaccggcgatgcgggcaagcacgccaaatttgttttcaacaagtacggagatagtatgacgagtcataatttaatttcttaaaggtgatgcattgtaagcacttttgacttccagtcaagcctgcggacggtgatgccggaaaacgtttttcctgacggaggtttcggcaggaaccgctcaggccggatcaaagctcgtgcggtatgatggcgttgccttttgtcgcctccgggatgcggggaagcaatgttttttcagaaacggggcgcgcatccactttcacattgaattgctgcccgtcgcgggaaacggtcagcaatgccggcccttccctaagagctttgaccaaggcttccttggtgctgacactctggtggtttacggcaaataccatgtcgccggcctgcaatatctgccccacggatttcttcggattcacttgaatgaccagcaacccccgagcacctatggattgttcttccgcagtcagttcacgcaaatgcattcccactccttccatgaagtcttcccaaggagaaggaacattttttaaaatactatctcccaccttcagggtgacgttcattttttgccctttgcgccagactttcagccggaacttgtcgccgatggaaagattttcaatgcgttccttcacttcctcatccgtctggatggggacttcattgaaactcagtattacgtcacctgtttgaaggcctgcctgctccgccggggaaccatgcttcacgatgttgattactgcgcctcccgcctcatgataatccaggaagctgcgaagcgggggagtattgcgcacaatgtccaatcccagatatcctttcatggggcggccatgtttgcaaatctgctcaaagctgtgcatcaccagattggagggaatggcaaacccaatgccggcgtaatttttctccgcattgggaagcaccgatttattgatgccgatgatttccccgcggatgttgatgagggggcctcccgaattccccgggaaaatactggcatccgtctggatcaagttaatgccggaatccaccagcttgcgttcacgggcactgataatgccgcgggaaacagtcgtgcccagcccatagggattgccgcatgccagaacaatcatgccgggcgcaatttcatcactgttgccgaacggaagaggggtaaacgtcatcgggttttctacctgcagcacggcaatatccagttccggatccacccctaccaggcgtacggaaacgcttttcccattgctcagcgtaacgcgcagcgcatgcttgttctgaatgacatggtaggcggtaataatatgcccttcttcagtaacaatgacgccggaacccaaaccatgaaccgtcagcctcttttcaatcatgaaatcaccatcctcggaaggctgaggaacgcttgtcacgcctgtagtgtctatgctgaccaatacccgttccaccagccgggcaacgcgtgaatattcctcattgagctggtgcaaaacaggaatatcctcctccttcaattcgggctgctgggccagggtaaacacttccgaccggaaggaaacattcttctccgtaacacgactgttccatctccaataggcaacggagaccacggtcatcataaccgtcatcatgatgacaagtaaagcccgtgtccatatggtcgatctcatggaaatgccctgccgtaataacgatcaaacggtttgcggcttgatcacaaggagatgcctgaaaacggagcctgtcaagcttcagccgctttttgacattccggttccattgatactatttaagtactttctcttcaaatgaaaaaactttcaaatgacaaatacgcctttcaacaaggcgtactttatgatatcatgcggctacggttttatgggttccagcactttacaacaacaggccattcatctcgtcttcggtacggatgaaggaatggtgcgtgaaaaggcttccggcatctttgccgctctgacggaaggcacaaacgaattttcccatgaaattctggaagcggcctgcggtgattccgatgaagcggcccagctggtacgccaggttatggaagctctgcggaccctcccgttttttccggggcgcaaagtagtctggatgaagaactgcaattttctgggagactccgtcacggggcgttcctccaccacggaagcggctctggattctttcaggcaattgctggaaagcggcctggggtcggacgtcctgcttcttatttccgcctccgaatttgacaaacgccgttcctttaacaaattcctgcttcaatacgccgcatcggaagaattgaacaagccggacatcacgaaagcaggctgggaaggcagtttaatgcccctcattaataaggaaacggcggcgcggggcatgaatttcgactccgccgccctggaactgttcattcaccgcgtcagcgaatcctcccgccaaatcatttctgaaattgaaaaactggatctttatctgggagcggacagacgcaccgtaatgccggaggatgtggagcgcatggttccgctgacgcgtacaggcgttatttttgaaatttcccgggctttggaaaacaagaaaagcgatgcggccatctctttgattgactttcaactggaacgcggtgaaaacgccatcacaatcatgcgtgccgcattcatccctacgttaagaaatttgctggctgccagacttttatgtgacgcattcaacctgaagcccaccaatttcaaggaatttacggcccgcatttcttccctgccctcctatgcggccgcgttaattcccttgaaaaaagacggtacacccaatgcgtatccgctttttctggcggcgcaaaatgcttccaaattcaagacggaacggctgaagcaaactttgaaagaatgcatgaaggcggataaagccctggtgtcctcctctcttgatccccgcctgattctgcatcgtcttgctatctgctccgcatcctgatgaactcctccccttcttccgttttccccctgtttgacgttctcgtcgtcggcgccgggcacgcaggcattgaggcggcactggcagcatcccgtctggggtgttccgtcgccgtcctaactcataacctggatactatcggacaaatgtcctgcaatccggctattgggggacttgccaaagggcatatcgtccgggaaatagatgccatggggggagcgatggggttgaacacggatgctaccgccattcaattccggatgctgaacgcttccaaggggcccagcgtgcgcgctccccgcgcccagtgcgataaaacagcctaccgcacaagaatgaaaatggttctggaaaccgcccccggcatacgcctgtttcagggagatgtggtcaaactgctcgtcaatggagaacagcaggcaacgggagccgttacttctctgggctgcgccatccatgcccgcagcgtgattatctgctccgggacattcatgaagggattgcttcatgtgggccttcaacacataacaggaggccgaatgggttgcgcttcttccagcctttccgccgatcttgccatgctgggttttcaggtggaaaggcttaaaacaggaacttctccccgcgtcaatggaagatccatcgacttttccgtctgcgaaatacagcccggagacactccggaagccctgttcagctaccgttcccgtgatatactgaaacgtgattccgaacccttttgcactttgaacacgtggggagatgaaaatttccggatgaagcaaatgccgtgctggatcacctacaccaaccagactacgcacgacattatccggaagaacttaaaattcagccccctttacagcggtatcattgaaggcgtaggcccccggtattgtccttccatagaagataaaatcgtgcgctttgcggaaaaaaacagccatcaggtattcctggaaccggaaggccgcagtacggaggaattctaccttaacggagtttctacttcactgccctactccgctcagtgcgacttcatccataccattcccggcctggaaaacgcgcagctgatccgtccgggatatgcggtggaatacgacttctgtcctcccacgcaattgcatcctacgctggaaacaaaactggtggaaaacctgtactttgcaggtcaaatcaacggcacttccggctatgaagaagccgcagcgcaaggactaatggcgggagcgaacgccgctctgaaaaccctgggcaaaccttctctggtgctgcgtcgggatcaggcttacatcggcgtcatgatagacgacctcgttaccaaaggaaccgatgaaccttaccgcatgtttaccagccgggcagaattccgcctgttgctgcgtcaggataatgcagacctgcggttggcccctctggcttttgaagcgggccttattacctgtgaaatggcccggaaggctgaagacaggaaaaatgccgttgaagaaggaataataaaagctgccgcgcttaaacatgaaggagtttctctctccacatggcttaaaaggcccggcaatgactggactctattgcctgaagaactgaaaaaaatgttccacgtggaacatttggatgccattgctacggatatccagtacgaagggcatattgaaaggcagaaaaaacaggcggaaaaaatcatacggatggaaaataaaactattccctccgatattgattacgaacatgtccatgccttaaaaaaagaggctgtcatcaagctgggcaacatacgtcctgcaactatcgggcaggcctcccgcattcccggaattaccccggcagatatcgccctgttgcttgtgcatctgcaaaaacgcagcaggcaacaaacataataccccgcgttttttattcagaaatttcaatttaaggaggaccgtaggaggcgggtattgaaaaaataaatatgcaggaatgtccttgagccgtatctgatcccattatatttccctgtcgctattgcctggagtcgataaaaagattcaatcctgttttctgaatgtctttttgcgcgacagcagctcttcccttccttcgaacaaccaccactttctgcttgtcgtaaaaagaaatggaatatcccttcagtattattgaataccggccttcctgatttatccattgaaaatcattaagaagcatcgcccggtcttttcacggattccattcaaatactgccgataagaaaaaacggcattaagcttactccaaggggcaagggaggccggaagggctgaatgacaaatccaccgggctaatgaaaattaccttcccaagtttaaaattcttcggataaccaataaacaaagacctcatccattaccggtaacagatatctccccggatacatacatcatctccaaaaatatttacaacaggttgttcaagatgggcttcatgctccagaaacggaccgggcgctacgccgtccgcaccgccgccgataatgatgggagcataaaaccccacccactcgtcgactaaaccggctttcagaaattcccggaccagacagcctcccgcttccagcaggatagttcctatttttttatcattatataatttttttaataattccaaataactaaaaacattctccacaaccaaagtacggtcacgaaattcatctgttaaacaaatggaatccgcaggtatggaagaagcattatgggttagaataatacgccagggttgttccttgaggggagaaacaggacgatccggtttcctaatggtcagggacggattgtccagacgcacggtattccctccggtaagaaccgcatcacattcggcacgcagggtatgtacaaaagatctggatttttcattcgtcagccattgggaacgttccggactacgggaaatgcggccatccagagacatggcgctttttgcaattacccagggacgcccttccagcatgttcaccctgaaccccctgattaaatgatcgcattccttctccagaaccccgcgggtaaccttgatgccggcctgttcaagaatatcagccgcagcaccgcggtgtttgggattaggatcttccgaaccataaaccacccgtttgaaacgatatttcaaaatggcatccgtacaaggcggtgttttcccggaagtactgcatggttccagagtaacatacaaagttgagtccgcgaacaggggggcattgccattcgccactccgtcggcaatggcctctctttccgcatgaggcaagccggcttttttatgaaatcccgaaccgatcacctggttttcatgcacaatgactgcccccacgcagggattcggactcgtaagtccgattccatttgaggccagttttatggccatgttcatccaacagtcatcctgatttttcgtattcacgccgttttgtagcatgaaaaccggaagaaggacaatcacgttgtgtgattgaagaatattaggtttaacaatattaaattccttcttcttctgctgtgtgcctagtgtgaataagatttcaaatggctgtaaatgagagtattgagcatcatttcaaatgttaataaatttggcccgcaagcctgtgaataatatctgaataagttattcacatcatactcacggttaatcaacctggcctttcacaaggttattggcaggtgcggctgtaaacagaaacggcattcctgcttgcagaaaacccggaggaaagcataccatccttttgtgaaggctgccagattgatttacattccggagagggatcatacttttcccgctacaagccctgaaaggcccttctacggcttttccgtggctggaatgaatatagccgcttactgtgcttcccgtcttcgggaagtgggctttgaagcggtttttgacccgggaacgccgttttcagaagaaaaaggggaaatcatagaagtgtccatgcatgatttttccccggaggcggccatatggcttgccttttgcggggcaggggaagcaaggagtgaagaagggcatttgctggcccggaaaagcggggaaaacgggttgacgcgggtattcacgcggaaggaagcagcgatagagcgcctcgtttatccctgggatcttctggaatggcaggaaagagtgatggagaagatggagtgggaggatttctctggaagggaaggggtttatgtcatgggaacgctccgggtaggggaaggaaccgtcatcatgcccggcgtggttgtagagggagccgtgtgggcgggtgatggctgccgcatagggcctaattgctatttaaggggttgtgtatctttggggaatggctgtgtagtagggcagggagtggagctgaaaaattgtatcatcggcgacggcacatttattcctcatttgagttatgcgggggattccattattggcagtgacgttaatttcggcgccggaacggtatgttccaattttcgccatgatggcggcgaacacagaatggtggcgggaggaaagctggaatttactggaagaaacaagcttggcgccgtcattggagaccatgttcggctgggtgccaataccgtcgttttgccggggcgggttcttcctcccggtgcttggaccagaccgggggaagtcttcacgggggcatgaatcgggtaaaggaattctcttaatactgaaaaggccgcatgcggaaaaacgtcttcccgcatgcagcctttggcgaatggttaaagttgcttcagcagcaccggcggcggcgcatcatcagggcagccagccccaacaggcccagggaagctgtggctgcttccggcacaggaagcacaacgccgtcataaaatttgatgttgttgatatccatagtgccgttcatggggcgggtatttccaaaagaagctccaaactgggagcctgtcagggcgggggaggatggattccactcggtaatcgtacctgccagagcgccgttgacatacacggaaagcgtttgggaggaaagatcggaaacgatactcagattagtccagctgtcctgctggagatccgtccaggtcaatcccgtattgatatttccgccagtttggccgccgaaccccttattgtagaggtatagttctccgttattagtgaattccagcaccatgctgttggattctccggagaccgtttcattggtgtacaggctgaaaatgtctttccacccattgctggtggaactcaggtttttcaggtcaaagctcacggtgaaactgccttggatgcccgttatgtttgagttatagggagtgccggaactgctgccgaacgtagcgtaatcattgccggaagtgtaattgaaggaaccgttccagttgggggcggttatttgtgctccttccgcagtccattcccaggaatagataggggtagccgcatgggccatgcctgccgctgccagtaaagataaaataataaatgagcgtttcacggaaattctgaaatatgggttaaaatcaatccaataggagggtagcggattataaatccggggtcaaattatttttctgaaaacaaatcatttaacggaaaaaagattacggagaagataaaagaagagaaaacagaaacggcattcctgttggaaagaaaacgtacatttccaataaaattgccgcatcctgggaaaaaagagacaatatccggatttataatccgcacaaggatattgaagaaatctgattccccggaatggatttttaagaatgcttaaataatttgaaaaaccttttcatgcaagatatgcccggagaaattgcatattactatatatagtatgcttttaaaaaaatactgccaaatattagggtttgacggagaaatggcttgaaccatgaaaggcacttatgagaagatgcgaggcagataaaagcacagacacatgaagtttaccatttccaagcaagtatttctcgacgggctgagacaggttgccagcgtcgtgtcttccaagacgacgctgcccattctttccaatgtcaagattgaagctgaaaacggccagatacgttttacggctactgatcttgatgtatgcattactggcgtggttcccgcaaatgtgctgcgtgaaggcaccgtgaccctgcccgctaaaaagctggtgagcatcatcagcgaacttcctgaagccgaagtccaggtggatgtcaaccaacgcaaccaggctgctgtggaatgcggccgctcccagtttaaactgaacggccttccggcggatgaatttccggaactgccgtcttttgagcaggctactgtgtaccaggtggagcagaatatgttgcgtgactgtatccgccggacggaatatgccatttccacggatacgacccgctacgtgttgaacggcatttccctttctttccgcaatggtaaaatgactttggtagccacggacggacgtcgtttggctttggcggaaaccaccctggaatttccggaagaacagcaactggatgccatcctgcccactaaggctgtcggagaactccgccgccttctggatgaagtgggaaccgtcacgatccggttcacacgcaaccaggcagcctttgaaatcaacgatacgctcttaatcagcaaactgattgacggcaattacccgaactaccggcaggtaattcctacggattgcaaggaaagtatcgaacttccctgcggggaactgctggaaacagtgcgccgtgtttctctcctttccgtggataagagcacaaatatcaagctgaattttcgtgaaaacgaactggaagtggcttccagcgcagaaggagtgggcgaagctcatgaatcgatgacgatcacttattccggaaggccgctttccatttcctttaatccggatttcttcatggctcccctgaagacgatggccggggatacggtcattacgctgaacctcattgatgaaatgagtccgggcgtcttgaagattggcgatgagtttctgtatgtgctcatgccgatgagatctcccaattgattttggtggcacaaaatcgttcatacagaggaacaggcgtcatggagacatgacgcctgttttttattggctgagagtgaatggaaaagaaatgttattcacataaatgttctacgtggaacattttttattttccattacaggaaaactgtaatctgccttgaaaagacggaacatctgaatggggcgcgaggggcatcgccggaaacctctgcgacgacgggagaatgccattattcgggaatgagaagatgcggggacagcaaatattcagagcggagaattgacaaattttactccgtatcactcgcccagcagacccggaggagcgaacaagtccggagcaagatgaaagggataaaaaccggatgcttgaagaatggcttcacggacggaggatatggaattgaaacaggaatgttccacatccagaatacgtccgtccttcagtttaatcatcaatccgggttctgcctcattatttggtgtgcatcctatgcgttcaattaattcccacggtatttccctgcgtgaaatgctgttgccccagaagatggaagaagaagtgattgtgagaaaataaggcctgcccataataacgggaagccacaggaacagtaaaagggcgccgagaagaaagttccaccagccggaaccgaaaaaagcccaggccaggctgcatcccagggttccgagaattctccctcccagccgataactgcggtagaaataataagtgttcatgagttgcgaagtcaatgaaacgtcaaaccgaccatggaacaataagttcccgaccgtattctatacgctaccgctttatcccggcaaagacaagatgataagtcaggaaatccagttcagcatgtcaggcggtacggaaccgcaggaacgtatcagggaaagaaaatgctcttccatttccggcggaggaggaaaaaggcctggcaaaactcggccttcgacaagttccagagctccctggttatgaagagccaggggcggatcaatgtaacgcatttgcgtaggatccggcagaataaaattaagagggcggccttcgttcagcaggcggtttttcggaatttccggcccccattcatcctccacacccatattggcaagcagaacgccggaagagaaaggcatggccgggtcaataagccctgacatggcatgccgctttcccgtagccgtaacggcgcagaaagcatgcctgattgcgtcagtaagggtttccctgtccgttgccggcacaaaagaggcggaagccagaggttttttttccacgtccgctacaatgacattcagtttccgtctgagagcatgcagagctattccacggccaacttttccatgtccaatgactaccagagtctgtccctgttcattttttattccaagagattccagagcccggaaaaaactttctccggttccaaggcaggtttctatctgtttaatctttccggcgtccaccatccacacgggctgcgtgcatgccgcatagcgttccgcacccgagcgggttaattccacatacccgtagcggctgggaacatggctgagcgctccggcgcagtccatgaccacatcataaggtccgcctgcccgttccgcttccaccacgggaattccatactgtcccaataatacggctgtttccgggtcatagggcattaccggggagaccgctactgtcagctccgctcctgcggccagaagagaggcgtatttggcgcaggtattccggaacacgggagaagcgtcaataatccggcatccttccagagggcgactttccgaccacattttatactggtgcaggagaacgggaaattcttcctgccgataaaaggggaacaaattttccagaatgcgctccggagatgcaggcataacaaaaatcttagggtttctcgcagcagagggtaatccctatcctgtcgttttcccagaaaaactttgttaaagaaatatcttttgtttaataatttttaaaagctgtagccagttcagggaagacaaagtgctaagtcatctatattcgcttgcaagtattttatgcgcgtgtcgtggcatgcctgagaacaatctttttaactgcattcttcacctgtttgatgcagaagtgttttctttttgcgtagaataaataggacagcaactgttaatatggtcaacatttccgacagacaaagtgctagccacgcaccgttcgttcccattgcttcaggcaacaggataaagcatggaataagaaaaacaaatcctcgcaacagggcaaacaaattggcgagttttacattttccacgctttggtaataaccgatgagcatcaggttgatgatgaagaaaacaaatgccagggagaaatatggaaatccctcaatggctatgagcgccgcagtgctgtccggattgacgaacaagcctaccagaatatgcgggaacaaaatgaatgctgccgtcgtgactatgccgcaaacaacggaggtaaataatgcgatccgttttgtatcggctacgcgttttttctctccaagcccgaagttatagctgatgataggttgcgctgattgcgctatggcattgcctaccatgaatacgaacggaaggtaatagcaggcaatgccgaacgctcctactccattatctcccagatatttcatcaatgtgtggttcccgacgaacatgagcgtggccagtgtcgcttcagtcagcaaagcggaagaaccgatgcgacattggcagacaatattaaggagggagaaccgaaaacttctgatgctccatttaataggataaagccgcagtttatgtgcaaatttccataaataaataaggcccgtggcgccgctcgcaaacagtgctatggttgcggcgaaagcagctcccgtcaatccccagcccaatggaaagataaacagccaaccgagtattacggtgatgattgcagcaatgatattgcacatcatagccaacttcggagcgccatccaaacgaatcatgaataggcagacagagcaccacatctggaatattaacgaggggatgaaccacaacaggtattccttaaccatgggggtaagatgttcggaagcgcctaaaaatcgggctgtagctgacggatatgccatcatcaaggcagatggcacgatggcggcaatggtgacgaacaacaaggcctgggtgacattaaggcgcgcagcctccagttttccttttgatagctgaatggaagcgactacggatgagcctacgcctgccatgagccctatcccggtaaacagcatcagcaggggaatgcatatattgatagcggcaatgccatcgcttccgattccgtgaccgacgagtattccgtctactgccgttactgccgatatgctaagcattccgaataaggtcgggataaaatactttctgaataatgtgcatacgtccagtgtgcctaaatcaattgcatttcttttcatatgtgtctgttattcttatggctattttttgccgggaaacaaaaaatgccggataaggtgattggttttacccagtcatcttatccggcatttttatttgccctccgatgaggattacaaaacgcttcttttcgttgtgtggtcgtaaaaatagtgcaataatttaggaaatataatttttttatacgtcatgttaatgccttggaaaaaatgggatagaaaaaagactgctttccgggcagtctttttaaaacagtttgtgctttgaagggagcgttttcccggcaggctattgtttgcggcctccggattcctgttgttgtgcgggagggattttctgcgcttccggtacggggagcggcgttttctggatgataacgggcgttcctatgctggtttgcctgtagaggatttccgcaacatttcgcggcagacggacgcagccatgggaaacaggatgccgccgaactttccctacatgcaggcccagccccgcgttggtaagacgctgccaataaggcatgggagaaccgtcaaaacgacctccctccggtatgggatccgtggattcggcattgtagttgatgcatttgccttcggcatcatacattttgccgtagaggttggaagtatggtcttcctttttggagataacggcgtagtcccccgttttggtcggataggcttttacgccggaggagagggggaagtccatggcgaccaagccgtccaccagatactggccccgttgttcgtccaggcagacgaagatttttcgggattttttcggctggcggttcagcaaggtatcgtccttatagacgtcgtacgttttccggtagtccttgcgggctacaaaatgagcgtatgtggaaggatgaaacgggtttttatattccggaacggatttgtccacggcacgcggatccggcagggccgcatggcccgtgccggagtgggaacaggacgcccaccccatgagcaccacggggaaggcggccagaacaaggagaggcttcataagtggtggaaccgggaggattccccggattacttggaacgcggaatcgtcaacttctggttgatgtgaatcagatcggatttaaggccgttagcccttttaagggccttgacagaggtgccgttcctgcgggcgatggctcccagcgtatcgcctttcttcacggtgtaggtgcgggccttgggagcggatttacgggaggagctctttctggtagccgtgctgcgggaggatttgctgccggccgtgctcttccgcgcggatgattttttagtgacggaaggcttggcggggggattgtaagcgtagctggaagaactctgaaccgggctgtaatggccggattcgtaagcgggatcagagctttccgcgatccacggcgggatttcgccgctggccggttccgcagtgtcgtaaccggccgtggaggaattctgggtggagcaggaagagagggggaataccagcgcggcagcgcaggcgcaggttaaaatgaatggcgttttcatgtgtgccctgttcatactaatttatgatttcggattcaaggcggtagcgcggattgtcgggattttttttcagaccttgcccagattataaaaggtttccgcatttcgggtcgtcacatgggccagatcttccaggttcatgcctctggcagcggcgatgaaacgggctgtatgaatgagatgggcgggttcgttcatgcggccccggaggggttccgggctgagatagggggagtccgtttccagcatgatacggttttccgggcaccagcttgcggtttccgccactacgggggcgtttttaaaagtagccaccccggtgaaggagaccatgccgtccagttcgtcaaagatccgcatggcctgagcggtatttccgatgaagcagtgaaatacgggacgcacgcggcccgcgtagttccgggcaatagccaaggcgtcctcaaagctcgcggagcctttccggttccgcgtatgcaggacgatattaaggcccaggcgctccgccaggtcaaagtgccgttccagaaggtcctgctgaaggcggtggaattgttccgtttcccagccttggggcgccccgtggaagtaatccaggcccgtttccccgatggcggccaggggaacgtcctgcgccttccggaaaagctggtccgcccagtctgccggggcgtcatgggcatcgtccggatggatgcccagcgcacaaaaaaccgcgccgggaaactggcgcgcccacgccgtgtttgcctcccagtcatccatccgcgcccccagcgtaatcatgcggtcaatgccttcccggagggcatgctggacgtaagtttccctgcgggactggtcgaattgagcggaagccagatggcagtgcgtgtcaataatcatggtgtaagggactgtggcggaacggatgaagtttgtggatatttgccggctttgaaaagtgcaaacgcagagcatgcctgatttttccttgccacgcggaagtgaaacgcacaaactgccccgcatgaaatgtacggctttgtgcatgtgcgccgccctgctgccggtgggcttcctgcaggcaggaacccagcagatagaagcgccgcaggagggctccgttatcagtttccatctggaaaacgatatgttcgtgggggatgatgataattataccaacggcgtccgctttgcgtggatgtccggcaccacgtcccggagccatacgttttccggcatgctgggaacagtgctgggcggcacgaacgcctcggattcctggcggcggttcatgggcatgaacggttccgccaacctgcgccagcagtggggtttggacctgacccagctcatgtacaccccggagcagaaggccacctatcccatctacaaccagcacccctatgtgggcaacctgacgctggggctgacctccctggtcaagaatgaagaccgggccaattccctggagctgcagctcggcaccacgggcacgaattccctcgccaagggctcccagcatttcatccataagctgtggggtatggagcaatggcccggctgggccaaccagctccccggagagatgactgccaatttgtttttcaagcggtattaccgcctgcgcggactggagaagcgctacggctccggttttgaaacggatgccctggcttactggcatgcggacgccggcacagtaaaggtgcaggcggggggcggcatgtccttccgcttcggctataatctgggcaatacttctccggagaacagcattcgcggcgcgaccagcgcagcgcctcccttcgtttataacaggatgtccgtttccaattgggggtattacggttatattcatgctgccgtgcgagccgtggctcatgacctgtatctggatggtacggtgtttcgttcctcccccaagtatgtgaacaagtatcctgtagtgggagaatggggttatggcttcggcctccggtacaagcgctcggaattgcttttcggcctgcattacatgaccaaggagtacacccagcaggaatccatgcagtgtgtgggcgttctccagcttcggcatactttttaacggctgcgtttgcaggccgttcataaacgcaacagcagcttgcaaagggcaagtttgctgttagaattagaattgcggattcgtatgtaacaggacaatccgtttgtgcatatcaactccgacacatattgatttcatgagaacgaccagatcctggcttttatcctgtaccgcgctggcggtaagttccgccatgtgcggcctgggagcaccgggcgattccgcccccgcgccagcccccacagggctggaatgggaacaggaacaaaacctgcatttgaataaggaagctccaaccgcctttttcgcgtctttcagcgatttgcagtccgccttgaaagtgctgcctgaaaacagtaaatggcgcaggtccctgaacggtcagtggaagttccactgggcgaaggatccccagagccgcccggccgatttttacaagccggattacgacgtaaaggactggaaggagattaaggtgccttcctcctggcagactcagggttacggcacccccatttattccaatcagccgtatccctttgaacgctcctggccttatgtaatgaaggagccttccaacaagaattatacgtcctacaaggaacggaaccccgtaggttcctatcgccgcacttttgaagtgcctgcggactgggacggcagggaagtgtacatgcagtttgacggagtggattccttcttctacctctggatcaacgggcagtatgtaggtttttccaaagattcccggaatccggcccgttttgacatcagcccctaccttaagaagggggagaacgtggtggccgcagaggtgtaccgccattccgacggagcatatctggaatgccaggatatgttccgcctgtccggcattttccgcaatgtttccatctttgcgctgccgaaagttcacatccgcgactttttcgcacaggccaatccggtggatcagagggattgggctttgaatattgaccatgccaaaccggggatcgtggacggcgattggcgccttcaggtggatgtggatgttcgcaatctgtttccggcaacggaaaagctggacggctgcacggtttccatggccctgtatgacgctgccggaaaactggtagaacctgtcaagcccaaggatgcgccatatgacggcgtgttggaaaagcccttgtgcattaccggcatgaaggattttaaaacttccctgctgggcatttattccaaacccaggctatggtctgcggaggatcccaacctgtacaccctggtactgacgctgaagcgtgacgggaagacggaagaaatggtttcctcccgcgtgggtttccgcaatgtggtgattaaggacagcgtgttcctggtaaacggccagccggtgaaggtaaagggcgtaaaccgccatgaaagccatccggaaacagggcattacgtgactccggagcagatggaggaagaagtgcggatgatgaaacgcgccaatatcaaccacgtgcgctgttcccattatcccgcggatccttatttttattacctctgtgacaagtacggcatttacgtgcaggatgaggccaacatcgagtcccacggctattactatggcaaggagtccctttcccatcccattgagtggatgccggcccacgtggaccgcatcatggcgatggtggagcgcaacaagaaccatccctgcgtgattatgtggtccctggggaatgaagccggccccggccagaatttccgcagtgcggaaaagatggtgaaggccagggatatgtcccgccccacccactacgaacgcaataatgacattgtggacctggggtccaaccagtatccgtccgtggactggacgcgttccatggcgggcaacaaggattttcccaagccctactatatttccgagtacgcacacaacatgatgaacgccatgggcaacctggcggattactgggaggccatcgagtcttccgaccgcattatgggcggcgccatctgggactgggtggaccagggcttgtacaagaccctgccgaatggagaaaagatgctctgctacggcggcgatttcaacgaccatcccaatagcggccagtttgtgttcaacggcaccatcctgtcggatcgtacgccggaaccgggttattttgaagtcaagcacgtctatcagaatatttccacatctttgacggacgacggcaggatttccattttcaacaagaatttctttacggacctttcttcatacgacattacctgaacccttacggaaaacggcaatgtagtagctgaaggcaggctggacacgcctccggccggtcccagagaaaagattgtggttcccattccggacattccccagttgaaaaaccggaaaccgggggtggagtatgccttgcgcataagttacaagctgaagaaggacagggggtgggccaagaagggatatgaattggcctttgaccagctccagcttcccgtgcagggagatctgcctgtgttcaaggctcctgcgggcaaagtcagcctcagcacggacaagcataccgtttccggcaaggatttttccgtgcagtttgacgcggccaccggggaactggcccagttcacggtaaacggcaagcctctgtttaaaacgcccatggcggtgaacgccctgcgcgccgcctccagcaatgagccgggcgtcatggccaagagcatggctaacggcctccgtgaactgaagcatgaactgctcagttacgaagccattgataacggcaatagcgtcaccgtcaagcaatccatcaaggtaagcggcaaacaggctgaaaacatcagcggctacggcgataccaagaccaccatcacggccaggaagcaacccctgaacgatacgaacacccatttcatcaataatttggaatggaccatctatgcggatggaactgtcgtctgccagtccgtactgcttccgcgcggcaatcccctggaactgctgcgcctgggatacgaactccagttgccggcgaatatggacaacgtagcctattacgggcgcgggccggaagaaaactatgcggaccgcaagagcggcatgcctctgggcgtgtataaaacgacagcctgggattctttcttcccgtacggcagaccgcaggattgcggcaaccatgaggatacccgctgggtggccgttacggacgacaaggggaacggcctgcttttcggttccgtgggcgcaccgttcgctttctccgcccttccgtataccaccacggatttgatcctggcaaaccaccccgtggaactgccgaagacgacggataagaccgtgctggttctctcttccgccacgcgcggcctggggggtgcttcctgcggtcccggccctatgggcagggacatcatcaaggccaacaagccctacccgatgtccttctttatgcggcccattaccgccaagtcctacaagggggaaatccgcgtgcctgcggcccggctggatatgaccatgctgacccgcacggacaagtatacggtcaagagcgtaaccagccaggagcagggcgaagcggacgccgaattcgccattgacggtgatcccggcaccttctggcactctgaatataataaaaccgtgaccaaacatccgcatgtactggccgtggacctgggtaaggagcgggaattctccggaatcacttatcttccacgtcaggatggcagcagcaatggccgcgtgaaagattattccgtggacgtgagcacggacggagagaaatggcagcctgccgccaagggctccttcccggacagtgctgacctgcaggaagtgaaattccaggctcccgtcaaggcgcgttatttccgcttctccgcccttagtgaggcgcaggggcgggattacgccgccgtagcggaactggatatcattcccgttaagaaataactcctgcggtttttaccgtttgaacaggcgtcccgccgctctttccgagtgcgcggggcgttttattgccgggctccatgggtttcctggagggaaaatgcagaagaagatgaaggatgaacaattggcagaacaaaaaaaccctgtacggaaaatacccgtacaggggtttgatgaaaagggaagcttctatttccgtttacggcgtaccatcagggccgtcaaacccagcaagctcatggtggctgtcgcgggttccgggatcaaaagctggatggtattgttttgcagattgatgtttcccaggatgcattcggtgtagtagtcaagctcgtttgttagagcctgctccttggtcgtaagccacagatcgaacgtctcggtgccggatatatctatattatcgtaattaagcagactgtcgctggacacgtctttaaagacaaaaagagctgtttctccatcctgtcccgtcaccattagataaaccggggatgtcagggaagaagagtaatctccggacaagttaaatctgccgtcagcgacgccgccattttgctcttccggtatatttgtcaacgcgctggtgaagttgttctgcatgctcatcagattactgtatttcagttgatcctgtgcatacgaattgccttggaagttccatcggttggtggtcatatcataactccaagtaccgctgctgaaggtgcctaaaatggcattgcccgcattcagcggttccccgagagaattgattagggaatatgcggaggaatcgtcattgctgatattgaaactgtccgctaaggcaatttctccagaaaagagagcgcaggcggtgaaagcattagtgaaaagggagcgatagaacatggctggttatttattggtttgatgtttgctggacaccgtgatgtaggaaggtgtcttggaagattcgtagtagatggaaaaaactccgctgaaggggatattggaaacatcctctccattgtcctgacgtttccaggaaccgttgttgttgacgaccttgaccatggcattcttgtcatctgcgggaatgttgatgacggcgtcatcaggcaattgcaaagctatttcagccaaagtctgggaaaggggcaggcgagtgtgaagaagggaattgaatgtgggaacgaccagcttctgattcttcagggatacttccccaatgaccacagctgtaacatcggaaccagctttgcgcgtaatggtcaggggttcatggctgaacaccggcatactgccgatattttccgtagatccccttcttctccattcatttccagaataataagcggcaagcctggtggttgccgaattaaaaatattaaccgtgtctgcagacatggcggagccgcttttcaggccaaactggttgtcttctccaagaatatcatccagagtgcgcgccttgcgcaggacatatgaatcggggggagtgcccttgcttaccagatcagaaagaaggcggtcatccactttaatggaatgctccgtccagctggctcccggttttttccaaccatcccggtttaagggaagagctataacttcattgccgaagtgaagaaccagcacataggcggagttttcattcatcaggtcgttgaaattaacgtccgggtccgtgatggtgactttattaccggaaatggtaatgttgccttcttcaagggtgtgctgtaccaaggcttccggatgcacccctaaacccagataacccgttgctttggcgtacagggttgtctggatatagccgcagggcgtactgtaagccgtttccgcatgcagggaggcgattgttgccggaagcaacgcgcatgcgcagagagaggctggcagacaatgtaccggattgataaacattaacccattaagaagaaaggaaatcgtttgtcaattaggaaagggggaaacattcccgtttttcatttgtcagacttttccccggatggaggaagctttcaggtttgtccgggggatggccccgggatttgaagcgcaggaagggctgccgccttttttttcaatgcctccggaacagtaacttccaatggccggacacaggaaaaacaggacggaggcagggtggtagagatacggtgcggaacctggaaggggaaaatcatgaaaaaaagatttcaggaatgcttggcagaggaaggggtggggagagcctgaaaacaggggagaggatttaataaaattttaatgttttttccgggttgttttatttgcgccctgaacgttcttccattaggttgattccaacattcaagccggatatcattccgattcctcttttcatgttttcagaaacgcattcggacagccagcgggcggacaggattctggcctccatccggagggaggaagcccgtcccggccgcggcttgctgaaaatcttctttggcatggcgccgggagtaggcaaaacatgcgccatgctggaggcggccattcaggcggcggacaagggcgtgcaagtcattatcggcgtggcggaatcccatgggagggaagatacgatgcggctcattggcaggctgccgcgccttcccatgaaaaagatggtttaccggggagtggaaatggaggaatttgatttggaggaggcattgcgcgtgaagccccagcttattctggtggatgaactggcgcataccaacgtcccgggaatgcgccacaggaaacgctatcaggacgtggaggatttgctggccgcgggaatagacgtttacaccacgctgaacgtgcagcatctggaaagccgttccgataccgttcacgacattacagccgcccccgtacaggaaaccgtgccggattccgtattggcggaggcggattgcatccagctggtggacattactccggatcagctgcggacgcgccttcgggaggggaaagtgtacagcgctccccaggcttccgccgctctggatcattttttcaaggagtccaatttgacggccctccgggaactggccctgcgcatcgtagcggagaaggtggactatgaactgacggaggtgcgtaccatttccggggaccgctctatctggcgcagcggggaacgtctgatggtggcggtaggtcccagcccgttttccgcccggctggtacgctggacgcgccgcatggcttatgccctgaacgctccgtggatagccctttccgtggatacgggcgtgcccttgcctcctgaacagcagcagcggctggacgccaatctggaattggcgcggcggctgggcgcggaagtggtcgtgatgcccggttccgatttggcggaaacgctgctccgcatggcttttttaagaaatgtcagccaaattgtggtgggcaaaccgcaggaaagctacctgtggggcctggtgcggcccatatccctggtggataagctggtgaagggaagcgaccagattgatatttacgtggttcccgccgcttcgggaccgggccgtaaccgttggaagagctggcaccggaaaacggagaaagatggccgggattactggctggccgcaggcgtgacagcggccgtcacgggtgccggcctgctggtttccgcatttaccggttattttgctcccggtttcctgtatttggccggagtagtggggctgggctttttcatccgttcccgctgggccatgcttctggccgcggcgctgagcgtcctgttgtggaacctgctgtttattcccccggtgatgacgttcaagatagagcggctggaggacgccttgatgtgcttctttttctttttggtggccctttctacgggacggctcacttcccgcctgaggatccgcgagcgggaagaacgggaacgggaaaaaaagaccaatgccctgttcctgtattcccgggccattggatccgcttcggacgtgccttccctcatttccgtcgcggcgggtcagatcagccagattatgggggtgcgcctggctgtcatgacgccggaaggaggcggcggcaagctgaggctttgggagaccggcggagagtactccatggatgagaaggaatggagcgtggcagtttggtgcatggaacaccgccgccccgcaggaaggtttacggatacgatcccggtagcggaagggttttaccttcccatgatgtccggggagcgttgcatgggcgtactgggcgtaaggccggaggaaggggagtgcctgacggccgggcagaaggatttgctggaaagcatgggagcgcagctggccatggcgctggagcgtgaagaattgagggcggaacgggcgcgtacgcggcttatggaagaatcggaaaaactgcaccgatccctgttggacagtgtttcccatgagttcaaaacgcctttggccgtgattgagggcggctgtgaaaaattggccggacgtgccgcgtccgcaccggaggagcgggaagaatacggggaaattttactggccgcgcgccgtctgcgccgcctggtgaagaatttgctggatgtgagccgcctggaatccggcgctttgaaacccaaactggactggtgcgatctgggggatgttattgaaggggctctggctgctaccagggaagcacgccggaatcatcccgtgtctgtttccctgccgccggactatccgctggtgaaggcggatttttccctgatggaacaggtactggtcaatctgctgttgaatgcctgcgtacatactcctgggggaacctctgttacgttgcaaggtggtgccgactccgtgcgcggccaggtctggctggatattcatgacatggggccgggcattcctcccgaacgggcggaaaccatttttgaacgtttccggacgacgcggcccggtggtttgggcctggggctccccattgtgcgcgggttcatggaagctcagcgcggtgccgtctccctggttcccgtttccgccggaacatgtttccggcttgtccttcccctggtggagcacgatagtgttcctgaagagtaattcctcctgcctcatgagcaactttcctgcagatatcctgattattgacgatgaacggcagatacgccgtcttctgaacctgacgctgaccggcgcaggctaccatgtccgcgagtgtgaaaacgggcagcttggcttgagtgagaccgctctgaagcggccggatgccattattctggatctggggcttccggacattaacggcttggaagtgctgaaacagcttcgggagtggactcaggttcctatcctgattctaacggcttgggacagggaggatgaaaaggtggatgccttggatgccggggcggatgattacctgaccaagccgttcagcggccgtgaattgctggcgcgcctgcgcgtgatgcttcggcgcaatcgtccggaccgtgagccgtccgtattccggctgggtcccattgtcgtggatctgagttcccggcgcgtggagaaggggaaagaggaaattcatttaacctccaaagagtacgggattctgcgcctgcttctgctccatcagggcaaggtgatgacccaccgccagctgctccgtgaaatttggggcccccagcatgaggaggacacgcactatctgcgggtgcacattgcccacctgcgccaaaagctgggggattccgatccggaaaaccgcattatccgcgcggaatccggcctgggttacagaattgtggcggatggagccgagtagcccttgtcccagttttactgggctggaaaaaatagcggcacattatctgcggcagccgggaaatatattttttcataacggttggagaatgtggcttaacttcacgcagtccaacatgctgtgtaggatccaagacgtattcaatacgtctttatgaagatcaagtacaacgcaagaaacgtaggagccgcagccctgggttgcgccatgatagcaggaaccgtctgcgcaggagaggaaacggtttctccgtcgatagcctccttgacaaacatgcaggaggccgccataccttccacagacacggattgggccttttccttctcggcggggtggtccagtaagtacgtaacggaaggtctagactgcctgctgggcagcggcatctgggaagtggctccgagcatttcttggaaaaatcttacgttcagcgcctggtatgccggaggagattccgccaattacgatgaactggacctggttctgggttacgcctggaatctggggaagtggactgtcaatccctggtatgagcaccaattctattttacacaggattataatgtggccaatccggcgctgacggtctcctatgccgtaacggattggatggctgtaggagcggaaacccaggtgaaagtggaacaccaggattttgaagcctattacagcgcctttgtgcggttggagtggtcccccctggaaaatgtgaccgtggttcccatggtcaggtacgggtacaacggcggttataacgtggactatgatgacggctccaactgcattgactggagcttgggcgtgacatggcggtttgcagaacattatacgctttccggctccgtcaattattcccaggcggctacggtgctgcgtcacagggatgccggagacgaattctgggtgggattccgcctgggcgtggagttttaacggcgcaccggcgttaaaaaacgggcttccggagaggaattaataatttcttaatgtccggaggccctttgttaactacccggaatttccagaatatgcgtagagttgcgttgtgtcctcgcacgacttgttaatcattgtcctgttcataggcatactggtctctttcaccccgtttctcggaaaatggctggcaagtgttttgatgggaaggcagacatggctttccccggttctgggtcccgtggagcgctgcgtctaccgtatggccggagtggaccccacccgcgaaatggactggaagaagtatttgacggccgttcttttgtttaacgccgctggattcctcgtccttttcctttccctgctgtgccagaaatggctgcctctgaatcccgccggaactgaaaatatgcggtgggatatagccttgaatacagccatcagcttcgtgaccaacactaactggcagttctattcaggggaagggccggaaggcgtcagttattttgttcaaatgaccgggctgggcgtgcaaaatttcgtcagcgccggtacgggaattgccgtcatgtccgccctgatccgcgggctggaaaggagatgcgcttctactctggggaacttctggacggatctgacgcgcagcacgttgtattttctggtccctgtttccacggtcattgctcttctgctggtctcccagggtgtggtgcagtcctttgacggacccattgccgtgccgggcatggatggcgtggaacagatgatacccagtggcccggcggcatcccagatagccatcaaacagctcggagcaaacggcggcggctttttcgggaacaacagcacgcatccttttgaaaaccccacgcccttcagcaatatggttgaaatgctctccctgcttctggccggctgcgcctgcccatacgcctatggcgtcatgatcggaaaaaagaggcaggggtggattatcttcggagccatgatgattctgcttgtggcggccattgtcttatcccagtgggcggaacatgcgggaaacccgcttttcccgggcatggaaatgctggaaggcaaggaagtgcgcctgggcgttacgaacagttccctctggtccgtcgctacgacggcatcttccaacgggtccgtgaactgcatgcattccagcatgtccccgctgggcggcgggattgccctgttcaatatgctgctgggtggggtaattttcggaggtctgggctgcggcttgtacagcatgctgatgtttgccatgattaccgtgttcctgtgcggtttaatggtggggcgaaccccggaattcctgggtaaaaaaatgggagcccgggaagtgtgctgctccatggtgggcatccttctgcccggcatggccgtcctggtcatgagcggcctggccgccgctacggaaaccgggcgggcatccatctgcaatgccggcccccacgggctgacggaaatcctgtactgcttcggttcccaggccgggaataatggaagcgcctttgctggtctggctgcaggggatacgcctttttattccctgctgggcgggttggcgatgctgctggcccgcttcggaaccattatttcggtgatgatgattgctggcagcatggcatccaggaaaaccgctccgccggcccagggcaccatggggacggataacctgatgttcatggttctgctggtagccgtcgtgctggttgtaggagccctcaccttcttcccggccctggctttgggacctattctggagcatttgctcctgtattcgggagccatgctttaaggcgtattagccgataatccggatgtttatgatcatgaaggagaaaaagagtcaatcctggtatgacggagccatgttgaaaacagctttcctgaatgcgctgcgcaaatttgacccgcgcgtcctgtctaaaaacttcgtgatgtttatcacggctgccggcgccctgatggcaacgattgcccttatcagggatttggctgccgggcaacccttcggctttactttgcaaatcgcgctctggctctggttcaccgtgctcttcgccaactttgcggaagcgctggcggaaggccggggaaaggcgtatgcggacgccctgaaagaaatgcgcgtttatgtgaacgcccgtttgctgacggacaagggaacggaggaaatcgtctccgtttccgaattgcgcaaaggggacaaagtgttgtgcgaggccggggatatcatccccctggatggagaggtgatagaaggcatcgctagcgtggatgaatccgccattaccggggaatccgctccggtcatccgtgaaagcgggggggaccgcagcgctgtaacgggaggaacccgtgtaatcagtgacggcattgttatccgtattaccgtggaaccgggccatacgttcctggaccgcatgatttccatggtggagggggccagccggcagaaaacgcccaatgaaaccgctctgggtatcttgctggtggcgctgaccattgtttttcttgccgtggttctttcccttcccgccatggccggatacattgaggattctgcccgggcgcttggcttcagggcggagggccgtatttccctgcccatcctggtctctcttctggcatgcctgattccgacgacgatcggcggattgttaagtgctgttggtatcagcggcattgaccggcttgtgcgccggaatgtgctggctgtgtccgggcgcgccgtggaagtagccggggacattgatgtgctgatgctggataaaaccggaaccatcaccttcggcaatcgaatggcgaacgaattcctgcctgcacccggtgtggatgacctgcagctggcggaagctgcccagcttgcttccctgtccgatgaaacgccggaaggccgcagcatcgtagtgctggctaaaaaacagtttggaatccggggccgccatatggacgcggaccatattgcttttatcccgttttccgcttccacccgcatgagtggcgtggatattgcggagcatgacggacatccggccgtttccatccggaaaggagcggcggaaagcgtggcgcagtgggtgaaaatccggggcggaactttcccgcaggaggtggaaatgatggtgcagaatgtcgcgcgtgttggcggtacgccgctggtagtggctcggggaaaagacgtgctgggagtcatttatctgaaagacatcgtcaagggcggcatcagggaacgctttgcccggctccgggccatgggcatacggactgtcatggtgacaggggacaatgccctgactgccgcatccattgcggcggaagccggcgtggatgacttcatggcggaagcgacgcctgagatgaagctggcgcgcatccgtgaggaacaggctgccggccgcctggtggccatgaccggggatggaactaatgacgctcccgccctggcccaggccgatgtgggtgtggcgatgaacaccggaacgcaggccgcccgggaggcgggcaacatggtggacctggacagcaatccgaccaagctgattgaaatcgtggaaatcggcaagcaaatgctgattacccgcggcgcgctgaccaccttttccttcgccaatgacgtagccaaatactttgccatcattcccgccatgtttgccggcctctttgtggctgacggcatggccagtggacctctttccgccctgaacataatgggcctgaattccccgcaaagcgccattctcagcactgtgatttttaatgccctggtcatcgtagcgctgattcctctggccttgaaaggggtttcctaccgtccggcgggagcggcctccctgctgaagcgcaatatcctcatttacggggtgggcggcctgattgctcctttcatgggcatcaagcttattgatatggtcatcaatgcatggcgccttgtttgaacaatccaatcctaacctgctgaattatcatgaagtggacatttcccaatctgcgcctgtttctgtctctggccgtcattaccggaggcatttaccctttggtcgttacgctggtcagcctgatttttttccctcatcaggctcatggttccctaatccggaatgaacggggggaaattatcgcttcggagcttgtcgcacagccttttatctccgccaaatatttctggccccggccctctgccggagaatacgctaccatgccttccggagccagcaacctctcctggacttccgggaagctggtcaggacggtggcggagcgcagggcggctctgctgaaagcccacagtctgccggagaaaacgcctgtccctgcggacatgctttttgcttccggcagcggtttggagccttttatctctccggaagcggcggaatttcaattgaaccgtgttgcctccacgcgcggagtgcctccggaaaaaatccggaaactggtgtctgaacacttcgtccggggcggaattttgggggaaaacgtagtcaacgtgatgaccctgaacgctgcgctggatacattgttcccgatgagcgggatgtaattgaccgccccggttcggaaaatatcctggcggaaaaatcgtccggcatcagccggtgccttggttccgcgtctttctccggttaccggggcggttttcttattggatttttgtcagtttggcctaatttgttgaaaaacagagacaataaattggccggcgtgcggtatgctgccggataatcctttcagaatgcagcaataggggggcgacatcctctcgttagttttattaggctgatatgaagtttcttcagccccaaatgcggctgtttacaaatagtcctcccttggcggtgtgaacacatcgacaacctctccgcttcccatcacctcaaaggaacgaggcgtattgtccggtatggcgtagctgtcccctgcatgaagcaacacttcaatattcttctccggcatttccatgttcaggcggtatttgcctgaaatgacgtacccgcattgttcatgcggatgttggtgggtagaggcgaagttgcctttcacatagtacatctttgctgccattgatttctctccgacagcgagcgaatccagtgaaacgcccttgaacactttcttcgatgcgtcttccttgcgaactatgactttattattttttatgatttccatatcaatacgttatcttcagttccatctggatgtttccgcgttcgtatgccgggtgattttccgcaagttccttgaatcccagctttttatatgtgtgtatggcgggtttgagcagggtgttgctttcaagaaaaagaattttcgccttcatgtcctttgctttgtctatagctgcatggcaaagtatttccccgatgcctttgccctgcgcatgagggtgaacggcaagtttcgccagttcataatcatataccgggtcatccattttgcagagggcacaaactccgacgggctttcccctgtaaagggctacaaagataaagcctcctttgttgataatatattcctgcggatgatcaagatagtccagatcgtgcggttctatcttccaatgttgcgtaatccactgtacgttaagtgatttaaacgtattcttgtaacacggttcgtaaggaattaccctgatatgctccctttccctcattttccgggcttctttgacccgttgcagcaggctcttctcagcgagccggtcttcccattcgccgatagctctccacaaatcatggcgcgtttccttggaaatatcctctacggcgacctccacgtctttgcagagctctgtcagcatggcggcaacccttttcccatgtggagacagggcgatgacggtgcgtctcttgtccttctggtcttcaaggcctttcaccaatcctcttgccgtcatttctccaacgatattgctcacggatggatgactgtgccctatttccttagctatgcccgttattgttttctctttcccgccggctaaaacgaaaagcaggggaaaccactttggctttatgtcaatgccgtataattcataaatttgacttgcatcagacgtcacagcatccgtcagcatgcgcagcctgcttccaatggctattttacctgtcctattgaaaaaatccatatctttccgttattaaatacgtaactgattacgtaactaatatgccattatcatgcgagcaagcattttttcacattttagtcttcttgcaggtggggaatatcgctgtatccatcaatggaatggaaaaatccgtctcctgtcagtcgggtaggctgcgaacgtggtatttggcattgccgcccttgcccacgcgattattttggagcatgggcaagggctgttcctgcgtttctatccggtacggggctgccgttctttccggaaatattttccttggcgttcaggattttacactattgccgggataccggatgcgccagctccatgagaaagcgggacaggatttccttgtcagggcggactctccaataatccgttgagcgtgcaagtgatattgcggggaatccggaggggcaaaaaatttttagataacaggaaaaatcctgtttttccattcaacggttggagttattcttatgtctaaaataccaacataccatgcttaacaatctaacaacaaaatttcaggaagcgctgatgcaggcgcagcaaactgcaggccggcttggaaaaccggaaatttcttctctggacgttctggtggcgttactggagcaggaaggcggaattctttcccctattctccgcaaagcctcttgcgatccggggctgcttctccaggcagcccaaagggaggtttcccacgaacctactcaaagcggcgccaccacccagccgcagatggggcgtgacctggctaccgtcatgcaggctgcggaagaggaacgcaaaaagctcaaagacgactacctcagcgtggaacacttcatgcttggggcgttggacacgcaaaacaaagtgcaccagttgacggacacctttgggctgaccaaggataactatctggccgccatgaaggaagtgcgcggcaaccagcgcgtgacggacgacaacccggaaggcaaataccagacgctggaaaaatatgggacggacctgacggcccgcgcccgcgccggtaaaattgaccccgtcatcggccgtgatacggaaatccgccgcgttttgcagattctttcccgcaggacgaaaaacaatcccgtcctgatcggggagcccggcgttggcaaaaccgccattgcggaaggtctggcgcggcgcattgtcaacggcgacgtgccggaaagcatgcgcaacaagcgcattgtatccctcaacatcggctccatgcttgccggagccaaatatcgcggtgaatttgaagaacgcttgaaatccttccttaaggaagtaacggattccaacggtgaaatcattctgtttatcgatgaactgcacaccatcgtaggcgcgggcgccagtgaaggggcggtggatgcctccaacctgctcaagcccgccctggcccgcggggaactgcggaccatcggcgcgacgacactggacgaataccgcaaatacattgaaaaagatgcggctctggaacgtcggtttcagcccgtcatggtctccgaacccagcgtggaagataccatcgccatcctgcgcggcttgaaagaacgctatgaagtccaccatggagtgcgtattacggacgctgccatcgtagcggcggccaccctttccgaccgttatatttccgaccgttttctgcctgacaaggcagtagacctggtggatgaagcggcagcccgcctcaaaattgagctggactccatgcccacggaaattgaccagattgaacgtgaggccatgcagcttgaaatggaacggcaggcgctggcgaaggaagaagacgccgacagcaaggcccgtttggaaaaaatcaccaaggacctggccgacctgaaggaaaaatccggttccatgattgccaaatggaaaagcgaaaaggaagtgctggacgccgtccgcagggaacaggaaaaaatagaagccctcaagctggaaagcgaaagggccaaacgtatgggtgacctgacccgcgcgtcggaaatcacctatggcgaacttccggaagcccagcgcgccctgacggaaggcaaggaaaagctcagtaaaatgcagaaagaagatggagggctgctgaaggaggaagtcacggaaggagacattgccaaagtggttgccacctggaccggcattcccgccgcccgtctgcaggaaggggagcgtgccaagctggtgcacatggaagagcgtctgggcgcccgcgtaatcgggcagaaacaggccgttaaggccgtatccgacgccgtgagacgcgcccgcgccgggctgcaggatgaaaacaggcccatcggctctttcctgttcctgggacccaccggcgtgggcaagacggaactcagcaaggcgctggcggaattcctctttgacagtgagaacgccatcgttcgcattgacatgtccgaatacatggaaaaacattccgtcgcgcgcctcatcggggcgcctcccggatacgtggggtatgaagaaggcggtcagctctctgaagccgtgcgccgtcgtccgtactgcgtggttctcttcgatgaaattgaaaaggcccacccggacgtcttcaacgtattgctccaggtgctggacgacggccgcattacggacggccagggtcgtacggttgacttccgcaacacggtcatcatcatgacctccaacatcggcagccagtacatcctcaatgaagccaatgcggaacagagggaagccaaggccctggaagcgttgcgcggtcacttccgtccggaattcctgaaccgcattgatgaaatcatcatctttgaccggctcacggcgcaggaactcaagggcattgtggacattcagcttcagcgtgtccgcaggcgcctggaagccaagggcctgtttttgcgcatgactccggaagctacggctctggtggcggatcatggttttgatcctgtgtatggagcccgtcctctcaaacgggccattcagcatgatcttctggacccgctcagcctcaagcttctggaaggagacttcccggaaggaacggaaatcgtggtacgggaaaaagacggcaaactggacttcaccaaggagaaaagataattgcatttctcggcatgttgccggaaaaacaatgaagggcgtcccctgagagggccgcccttctgatataaagattcccgcttccgggagctgaagaaaatctgctgcgcggttaaatctgggacagagcgtcgtcagcaacggcggcggcgcaaagcgagtgcggccagccctaggagggaaagcgtagcggtagcgggttccggaaccatgttccagcccatggaacgcattaatcccacttctccatccgtcagggtgcgatgataggtatccggtgagatggaatactgcataagggcgtctggatcgctcgtgctgtcaatgtgggccatgctggacccttccgaccatgtggtggggttatagacagtaagccccgtatcgcccagagacaaagtttcccctagggtaaatgccgtattcccatttccggctttttctacgatggactggccttcttggttggttaacagggaatcatacttggtgtacagcatggtgctgtaggttgtggaagcgcttccggattggacttggaaagtgcctgtctgcgtcgccagggaaagaaaaccaacggcatgccccacttcatgggtcaggatgctttgaaaatcatattttcccgtatgctccgccaataaggcggccccataataaagggaagccaaatgagaggtattgcactggatgtaaatatcatagcctgaggtagtccttgtgcttccatcgcgccatacggcctcggccatggtggaaacctgttgtggcttgtttgacaggtagtagtaataaggggaataagcggaggctagggtggaggaatcggctccgtcgtaccaggtgaggcctacgttaagcgttcttcccggggtggaattaatcagggtattccatgtgttcaacgcccgtatggcggaatctatctgatcactgatccaggtatgagtacttgaagaatcaaaaaatcccttctccccggaatctaggaaggtgcatgaaaaagtggagcctatattaactgtctgtacagcagatgagaaaaaagtgcttcccaagcagaaaacagtgcagagaatgccaatttggaatgaacttttcatagataaaaaataataaacccttgaatagcaaaaaaatcctttctgttcaagtgaaaataaatcaagtctgcttctttttcagggaagacgggtcagacaccccttctttttttctggctcttgttgcataacaacaaaaaatgctgaaaataccggcagggaccctcctggtaaggacagtttccttgtaaaaaatgtaacggcgcaagatagttgcgatatgcgggacaggttgttgcgatatttcgccacttgctgccaggaaaagcccctttccggaagcctgaaaagaggttaaaaaaacgcctgaaaacgggtgaattcgcgtgacttttacccccgaatttgctataaaaaactcaccggaaggaaggttgatccgtaccttgaaccggggctattgccgccgctgccatcagctttattttggcgttgcaaagggagtgcataatttccgccctgcgctcgcgcggcactccataaggccggggattgcctgtcgtcaccatccggaacatccgggcgtataaatcagggggagcctcggcgctgtgccagcaccggcaggaccagcgggaattctccgaaataccgatcgttccggaatctttttgtttaccattcccgggtgtcctccggttcggtcggcatctttccctcaaaaccattattttcggcttggctttggcctcgtaatattgacagcccctccgaagaggggcgatttcatatcgcaacaacctgtcccgtttcaggcagtttcatgttccttcatcacaattacccgtctcttctttccatcgctgtaatttcccgccattgctagctttcaccctatttcaactatactgtcccttttcaaaaaggggaagagcgaggggaaaaagggaagcgttcaaaaaaagacgcgccaggatgggggattatgacaaaagagcatctcattgattaggtgtgtattaagggtggttgcagtgggtatggcctgaataaggatcgggaaaaaatgaaaaaacatctcgaaaaaaattgacaaaaaggtgtgggatggtagatttctcggcacgccaacacggcgacgggatgaaaagcccggcggctgaagggctcggaagagcgctggaggcggctggagccggccacccggagaaacccctggaaggggttgcgataagaagatttcaagggaatgactaccgaaaccgccgagggttttccgagggcgtcgagaggcgccggaggagcaaaaagcccgaaggagcgacctagctctgagaggggtggtttggtagaagcaaggggaaagaaaaaaggtcgtgacgcgcgccgtgcgaggcagagcgaagaggccttcaagagacacaacttgaaggaagagctggctgaagcatggcgcaaatgaaatcgcaagattccatttggtccagcaatttcaaaaattaatttgatggagagtttgattctggctcagaacgaacgctggcggcgtggataagacatgcaagtcgaacgggagaattgctagcttgctaataattctctagtggcgcacgggtgagtaacacgtgagtaacctgcccccgagagcgggatagccctgggaaactgggattaataccgcatagtatcgaaagattaaagcagcaatgcgcttggggatgggctcgcggcctattagttagttggtgaggtaacggctcaccaaggcgatgacgggtagccggtctgagaggatgtccggccacactggaactgagacactatccagacacctacgggtggcagcagtcgagaatcattcacaatgggggaaaccctgatggtgcgacgccgcgtgggggaatgaaggtcttcggattgtaaacccctgtcatgtgggagcaaattaaaaagatagtaccacaagaggaagagacggctaactctgtgccagcagccgcggtaatacagaggtctcaagcgttgttcggaatcactgggcgtaaagcgtgcgtaggctgtttcgtaagtcgtgtgtgaaaggcgcgggctcaacccgcggacggcacatgatactgcgagactagagtaatggagggggaaccggaattctcggtgtagcagtgaaatgcgtagatatcgagaggaacactcgtggcgaaggcgggttcctggacattaactgacgctgaggcacgaaggccaggggagcgaaagggattagatacccctgtagtcctggcagtaaacggtgcacgcttggtgtgcggggaatcgaccccctgcgtgccggagctaacgcgttaagcgtgccgcctggggagtacggtcgcaagattaaaactcaaagaaattgacggggacccgcacaagcggtggagtatgtggcttaattcgatgcaacgcgaagaaccttacctgggcttgacatgtaatgaacaacatgtgaaagcatgcgactcttcggaggcgttacacaggtgctgcatggccgtcgtcagctcgtgtcgtgagatgtttggttaagtccagcaacgagcgcaacccctgttgccagttaccagcacgtgaaggtggggactctggcgagactgcccagatcaactgggaggaaggtggggacgacgtcaggtcagtatggcccttatgcccagggctgcacacgtactacaatgcccagtacagagggggccgaagccgcgaggcggagggaatcctaaaaactgggcccagttcggactgtaggctgcaacccgcctacacgaagccggaatcgctagtaatggcgcatcagctacggcgccgtgaatacgttcccgggtcttgtacacaccgcccgtcacatcatggaagccggtcgcacccgaagtatctgaagccaaccgcaaggaggcagggtcctaaggtgagactggtaactgggatgaagtcgtaacaaggtagccgtaggggaacctgcggctggatcacctcctttctatggagcaagtgcacggaagtgcacaggtcggatctcttcccgaggggagagagagcggaacccgcgagggcccgcaacgaaccaaagatgtgtaaacagccagacgcctggagcgaaacctggcacgacgtgcgtgacgaccttttttcaccgagaaccgcaactgggggtatagctcagttggtagagcgccagctttgcaagctggatgtccggggttcgagtccccgtgcctccaccagtttcgggaaagagacccaaagccgggcctgtagctcagttggttagagcacgcgcttgataagcgcggggtcacaggttcaagtcctgtcaggcccaccaacaaaatcgattattgagggaaagcgaaaattgacatctgcgtggcaaagaaaacgattgctgagaagcaatcgctttccaacaaagtgggtagttgaacaacaactataaaacacaagataaacatgcataccaagcaatgagacaatacagtaagtcacgaaagggctttgtggtattgtggaagtggtaacagcttttgcaatatgatgaagtaagtaagggcgtacggtgaatgccttggtgccaacaggcgaagaaggacgcggcaagctgcgaaaagcctcgggaagctgcaagcaagcgatgatccggggatatccgaatggggtaacctgatcgaggcaatactcgatcgttcatacctgaatacatagggtatgaaacgcgaaacccgctgaagtgaaacatctcagtaagcggaggaaaagaaagagaaatcgattccgtaagtagtggcgagcgaaagcggatggagcccaaaccgaaggtattccttcggggttgtaggaccacgtcatattcgaccatactggatagtagaacagcctggaaaggctggccggagaaggtgaaagccctgtagacgaaatccagagtgggaattagtggtatcctgagtaatacatcacacgtggaacgatgtatgaacccgcgcggaccaccgcgcaaggctaaatactagttggcgaccgatagtgaacaagtaccgcgagggaaaggtgaaaagaaccgctgtgagcggagtgaaatagaacctgaaaccgtatgtctacaaagtgtcagagcagagcaatctgcgatggcgtgccttttgtttaatgagtctgcgagtcagtgtttgtggcaagactaagggcttccggcccggagtcgcagcgaaagcaagtccgaacagggcgcaataagtcgcaggtactggacccgaagcggaggtgacctacccttggccaggttgaagcatgggtaaaaccatgtggaggaccgaacaggtgaacgttgaaaagttctctgatgagctgagggtaggagtgaaaggctaatcaaaccccgtgatagctggttctcttcgaaatgcatttaggtgcagcgtcacgtgctgatgcgcgggggtagagcactgacaaggctagggggcacacccgcttaccaaaccttatcaaactccgaataccgtgcaatggaacgtggcagtgagacagtgggggataagcttcattgtcgagagggaaacaacccagaccagcagctaaggtgcctaaataacgctcagtggaaaggatgtgggattacacagacagtgaggatgttggcttagaagcagccaccatttaaaaaatgcgtaatagcttactcatcgagtgatcctgcgccgaaaatgattggcgatcaagcgttataccgaagctctggactttgccgcaaggcagagtggtagaagagcgttgcatgcgcgtcgaagggcgatggcgactgaccctggagcacatgcaagtgagtatgcagacatgagtaacgttaagccgggtgaaatccccggccgccgtaaacccgaggtttccagggcaacgtgtttcgtccctgggttagccgggacctaagccgaggccgagaggcgtaggcgatggacatcaggttaataatcctgagctcgcaacccttaaactggggggacgcatgagaaaagatgactaggttattgaattccgagttgagtccacggactcagcgcatcattggatcgagtgccaagaaaagccccagcgtatgctaagcgacccgtaccgcaaaccgacacaggtgggtgggtagaatataccaaggcgtaagagtgaaacctggttaaggaactcggcaaattagccccgtaacttcggaagaaggggtgcctgcagcgatgcaggccgcagagaaatggcccaaccgactgtttatcaaaaacacagcactctgcaaagacgcaagtcgaagtatagggtgtgacacgtgaccaatgccgaaagattaaggcaaggggttagccgcaaggcgaagctctaaacccaagtcccggtgaatgtcggccgtaactataacgatcctaaggtagcgaaattccttgtcgggtaagttccgacctgcacgaatcgtgaaacgagttgggcactgtctcaaccaggcgctcagtgaaattgtagtggcggtgaagatgccgcctacccgcagaaggacggaaagaccctatagaccttaactgtaagctgtcattgtttcttcggttttaatgctcagagtaagtgggagacgctgaagacgccctttagggggcgtccgagtcatcaatgagacaccaccctttgaaactggaggatctaaccctgagccgtgaatccggccagaggaccgtgtcagccggtcagttttactggggcggtatcctcccaaagagtaacggaggagcgcgaaggtgggctcagcccggttggcaaccgggtgtcgagtgcatgggcataagcccgcctaactgtgagaccaacaagtcgagcagatgcgaaagcaggcccaagtgatccggcggtagaaagtggaattgccgtcgctcaacggataaaaggtaccttagggataacaggctgatcacgcccaagagttcatatcgacggcgtggtttggcacctcgatgtcggctcgtcgcatcctggggctggagaaggtcccatgggtccggctgttcgccggttaaagcggcacgcgagctgggttcagaacgtcgcgagacagttcgatcctctatcctctgtgggcgttggaaaattgaggggttcagaccttagtacgagaggactgggtctgacgcaccactggtgcatcggttgtattgtcaagtgcatggccgagtagctaagtgcggacgggataagcgctgaaagcatctaagcgccaagcccttcccaagatgagttttccctacaggttcgtggaagaccaccacgttgataggtcgcaggtgtaagtgcagcaatgtattgagccgagcgatactaattaccaattgacttcatcatattacatcactccccgtcgtgaatgacaacttgctcttgtctcatttacctgtgcatgttcatcaaccaccagccacgcagatgtcagtttacgctgaatccctccccacacaaaggacggaaatcttcttagccgccacacacataccctgaaaaaaatccctcactcagaagcccccaaaaaagcagggctcccgggcaggcaggatgaagaaaaaatcacctcttccccctgaagcccggtggccagagcgcagtggtcccacccggtcccgttccgaacccggaagtgaaacgctgccgcgccaatggtagtcggacgataggtcccgcaagagtaggtcgccgccgggatttttttccatcaggccccgccagtcacttgactcgcggggcctgttcttttcttgctcggtcccgttcttctccccctacattctcttagttaaggagttgtccgtagggaaaaaatggttgctatacttcatgaggctgccatgtctgcgtatttggttccggaaccggcgacggcttcccggagcctgctgggtttggcggggctggtcatgcggaggcgcagaaggcaggaagcctgatagaggcgggaaagggaaacaaaaaaactgcccatgcgcctctgcgtcattattttcagaaaattgtttgaagaaacccgggagaaaatgattcttccgggttttctttttcctaatgattcctcggaaaactttgaatggggttttaagactgctggtcttttcctacatctccctgttcatgctcctatgggtaatagttgacggttgaaaaagaaaattccggcagctatagtcgtccctaggcaaatgcaattcaaatgattcgttttctatcctttttatttttcctgtgctttttttccgtgtgttctgcaaaagaattgaagatttttttgctgacgggccaatccaattctctgggggcggtgaagggcagccctgcttctccggagctgttaaaaaagtatgaaccgaaggagactctgtactggcatgaaaattttgggcaaagggaaggcgtgtttcccggcgcttccacatcctgggagcaggtaaggcctgctatgccgcgttataacggcaatttatgcatggggccggaatacgggtttgcctttactctggagaagaatggatggttcaaggatgcggacgttgcggttgtgaaagcttcccgggacggcggcgacaattcccattggcggaaaaacggccaggcttacaggacgctggtgcaggccgtcaagaatgcctgtgcgggtgtggacaggtccaagtattccaaagtggagtttgccgggcttttgtatttgcagggggaaagcaatgccggaacttccgttccggagagcgcttcccgctttctggaatttctgggcaatctggcggcagatctgaaaccgtacggggatacatctgcactggccgcgcagaaagccgtccttggagaaaatgccaattgggccggaaagaatgaatctgatccggaaacgggtaaccttaccggcggcctggaaggacgcgatacggaagttcagggaaagacaacccgccaggtgatgaaggatctggcggaatcccgtccatccctgggctatgcccctacccgagatcttcccaaactgaccgcaggagatcaaatgggagtgcattacagcggccagtctcagatcagcataggagcccgttttgcttatgaagccgcccggctggccgggaaggataccggctccgtgcgaagcggtcgttacgatcttcccctgggttctccggacgcgtggatgaaccggaaaatgccggggaagaacgtatgcgtgtggaatgtggcttcttccgtaaaacccagcctggtgtcaggggtggtgaagttgtttggaatccgtgtggaggatccggccgtcaagactgttatcgtccggagcaagggaagttccggagaccgtttggtaatcgggccgggaggtattcgcctggcggaggggaaaaatttgcagttgaggacgaatgtacagctggcgggccggcagtcctggaatattccgggtggttctgccgtggagattaagccctcgccggttcaggaaaaagccatgcctgtccgtttgtccggccaggcggaggtgcatgtaacccaagcggaaggcggcggagaaacggcggaagcggcccgcgtcatattggaacaggtgctgccctctgccctgaaatgttcctggacgttgtccggaaaggtggagatgactttgaagggtatggaggggaaggccgtgaatttgggcaaagtcttcgtcaagcagggcgctgtgctgaatctgaatggctccagacctgttgcgggcagtgtcgttaatcaaggcggcatggtgaatccgtaatcaatagacctggtacggtccggaatgcttgccgtattttttagtggagggaggaggttaaaaaatacgttttttcctcccggaagggccatgggcttttttcttattcacaggagcggagcggtctggaaaccgaacaggggcatgacctgcggcatttttaccccggtttattcacaggaagttctgcttgggaagcattgatcatcaagtctactgtactatatttggcgtactttttcctttatggatgcgttatgtagtagtatggtcgcgccatgagatgcgttcagtgcggtcatttggaagataaggtcatcgactcccgtatgtccaaagacgggacgaccattcgccgccgccgcgtgtgtttgaggtgcgattaccgttatacgacctatgagcagattgaacgcacggagttgcgcgtagtcaaaagggataatctgagagaagccctgaatcgtgaaaagattttacgcggcctggtaaaggcgtgtgaaaaaaggcccgtcagcatggatcgcctggaccgcgccgtggaagagatcatttccgaattgcaccgcgaccatttgcgcgaagtcccttccagcgagattggcaagaaggtgattgaaaaattgtatgccatagatcccgtggcttatatccgctatgtgtccgtgtaccgccagttttccaatgtggaggagtttatccaggagattacgcagatgcgccaccagacgcttattgatcccctgcagcgcaagcttcccattctttaaattttctgttccatgatcggcttccgaaacaacagaccgttgctcaagcttggtgattgcctgattaccgagtacggggaacaatggctggcggatgctttggagcacgctgcccggcgtgccggaacaacccttccgttcaaggaagacctgctggcttccgtgcgttattatctggagcatgagtgcgatttgtccgtcatgaaggtgtccgagctgtatgcgcgtctgcgccgcatgctcacggaagtgggcctggaacaccttgcaagggagcttagggaggagatgccgcccatgacggtctgcgtcgcggagattgcccgcagcgtgccgttctggctgttttttgcctgcgagctgaaaaagcaggtggaggaattgcgggggcatggcattaccaggtattgcttcacaggcaggaaggaatgcgtgatggctctccggggaaggaagcgctgggaccgttcctgccagtctctgctggaagacctggactttcttctttcccgctatgaggagcaggcggcggattgttaacgggacttatccgtgccgtattggggtattcagctgcgcaattcaacaggttcctctttcccgactgacggagccggttcggagtgcggcacgtttctgcttttcgtgagcatgcgaggctatttcattttaccgggaacgggcttgcggggcccgttgatccatgctcgggcatcctgttttgccggaaggcccaataagagttaacaggccgtattgtgccgcctgattcccggagatgagccggatgagggaatgcaaggggccttccctcattttccccgaggttgttatttctggctgtttgcagcaggagcagcctcacccgtaccggaaggccgtgaataaggcagagtgagatcttgctccctgaccacacggggggacggccgccgttacaggtgtttgggcgcggggccgttgatgattttgcgggcccggttcagggcggcgtcaatattctcgcagatattgtagcgtttcagctcccggtaaaagggcgcgtggcggatgacgtccagaggctggggctgcacgccgcaaaccagcagggtggaaccgtgttcccggcactggtggcagaagtcggaaaggacgttcaggccggtggcgtccagcgcgggaaccaggcgcatgcgcaggataaccaccttggtatcatgttccagcgtttccagaacctggtccttgaattgctccacggcaccgaagaagaagggacctttcacgtcgaaaacttccacaccttccgggatgtccagcttggcggcggagcggttcccatcatcttcctcatcattttccagcagttcgtttttgatggcggaaacatcgctgatttgggccatgcggcccatgaagagcagggcggccagcaccacgcctacttccacggctacaacgaggtccacaaacacggtcagcaggaaggtgattaccagcaccgccgcatcctgcctgggccctttcaacagacggctgaacgtgtgtatttcactcatgttgtagcacactaccgtcagaatgcccgccaggacagccaggggaatctgctgggcatagtgggcaaaggccatcagaatggccagcagggtcagggcgtgaatcataccggaaaccgggcttttagctccagccttgatgttagtggcggttcgggcaatggctccggtggccggaatgccgccaaacagggcggagccgatgttgccgatgccttgtgcaatcagctccatgttgggcttgtggcgccctccggtcatgccgtccgccacggaggcgcttaacagggattcgatcgccgccagaagcgcgatggtgaaagcaggggccgtcagcgcccccagggtactccagtcaatgctgggcagggagggcagggggagcgtattcgggaggctgccgaaggcttgcccgatggttgtcacaggcaacgaaaacgccacggaaacggccgtcatgcccagcatgcccaccagcatggccggtattctgggccagaagcggcggctcagcagggtaataattacggtgccggcggccagccccagcgccgcccagttgatggtgtggaagtaatggaagtaacacgcccatttttcaatgaactctccgggaattttttccgtgatggtgaggccgaagatgtctttaatttgcgtggaaaagattaccacggcgatgccggaggtgaaccctgtggtgacagggaatggaataaagcggatgagcgcccccatgcggcagaacccaaagatgatgaggaagaggcccgccatcaatgtgcagaccagcaggccggatgcgtggtattgctccaggacgcccatgatgatgatcacgaaggctccggtggggccgcctatttgatatttgcttccgctgaacagggagatgaggaacccggccacaatggcggtgatgaggccctgggttggggagagtccgcatgcgatggcaaaggccatggccagcggaatggctactacaccgacggtcagtcccgcaaaaaggtccgccagaaaggtttgtttggtataagttttgagagaggagagaagagcaggtttgaacatggctgccgggatggttggccggctgcggttgtggccgccgccggcggggttgaagcgtccccttcctgcacccggaggcgccccgcggagacggacggcaggctctcttcgtttccgtccgcctccgcaggcggcgttacttggaaaggatgccttcccagtaggcgatgcggcggcgcgtgttgtcggaattgggagcccccgggttggtacgctgggcgaaggcttttgtcaattcaaatacgtcgcgcgcgtctgttccatatgcatttgaaatggaggcgaattgttcgtcgctcagcttgttgagcggcgtacccgtggagatgctcatggcgactgccttcccgaccagctcatgggccttccggaaggggaccccgcggcgcaccagataatccgccaggtccgtggccagcagcatggggtcggacgccgcttccctggccctggccgtgttcaccgtcatggcggctatcatttccgcattgacgtccagggccagtttaaccgtatcaatggaatcgaacaggggttccttgtcttcctggaggtcgcggttgtaagtcaggggaagccctttgacagccaccataacggcggtgaggttaccgtacagccgccccgtttttccgcgtgtgagttccgcgacgtccggattttttttctggggcatcagggatgaacctgtcgtatgggcgtcggacaaggaagcgaagccgaattccgccgtgcaccacaggatgacgtcctcgctcatgcgggagagatgggctccgaccacggccaggtcaaaaaggatttccatgatgtaatcccggtcggcaatcgcatccatggagttttctgtaactgcgtcaaaacccagttccacggcaattccgtggcggtccaggcagatggtggaaccggcgatggctccggaaccgagcggggagacgttcaggcgcctgcggcagtccttgaggcggtccgcatcccggtccagcatttccacgtaagccagcaggtgatggcccatggtgacgggctgggcgcgctgcaggtgagtatagcccggcatcatggcatccgcgtattccttcgccttcatgaccagcgcgcgctgcagatggcgcacttttcccagaatttcatcgatttccgcccggcagtaaagccgcgtgtccgtagctacctggtcattgcgggagcgtgcggtatgcagcttggcgcccggagcgccgatgcgccgggtgagttcgctttcaatgttcatgtgcacgtcctccagttcccggctccacgagaagttgcctgcttcaatgtctttcagtatgtctttcaggccggattcaatggcgttgaattcttcctgcgaaagcaggccagccttgagctgggcccgcgcatgggcgatggatccggcaatgtcctggcggaaaagcctccagtcgtaggagacggattcgccgtagcgttgaaccagatcagcggtgggtttagaaaatctgcctttccacatgacccacatgttgtgccccaggagcttccgttttgaaagcctgaaatgggtaatggaggcagattccgcggaactgggaaaaatccgaatgcctggaaaaccggagtggagccggaaaagagagaaacggagcatggctgtcttttccctgtggcggacgggggcggatatgttattacgatgccgtgcgtatggatgatgaaatgcctctgaaacgggaagatttgcggaaacgcgcgaaggaaaaggcggcggaactggatgcagaggggatggaactgcgccccgtaacggtttccgggcgtaccctggcgaaaaggttctgggggaaggaatggatgaagagcctgtctgcgtgcgaggtgtacgggatgcggctggcccccggccggacctacctgcgctatggctgtgttctggaccttaaaacggttcccggccgcatcgatgctctggtgatgggtgaacatttgtatgaggtttgcatccaggcctcccccccggatgaagaggcgcttgcccggctgcgcgcacgatgcgccgggcagattggttcctggattgatctgctgaaagggaatttgtctcccgagctgctggaaatcctgtgcgctccggaaggcggcctgtttcccgcgccagaagagtggcgtttttcctgttcctgtccggattgggcggatttgtgcaagcatgcggccgcagtcctgtacgctttcggcgtgatgctggataagcagccggagttgttgttcaccctgcgcggaatggattcctccgttttgattccgaaagctccggaacccgttcccggaggagaagacgcactggatgtggatgccagttccctttcggatatattcggcatcagcctggattgattattgccgccgtgattgtggctttgttccggttttgaatagccaggagggaaggggatggccgtcctttttcatgaactggcggcggatgagagtgtccgggcagtcaggcgtgccgttggccgtctgccaatgtttccgcatgatgctcgcccgggtggagaatgttcccgctttttccatgatgcattgcaggttcgggagggcggaaaaaacgagataaagaaccaggagggtccggtatttcacgcctccccggcggagggcccggagaaagagcagggaaaggaagggatagaggacggccggagctttaaagagaagttcattgttcatgatgcccgtgcggaaaaagagactgcctgccatcatgcccagcgtgatgtagtacaacgggtttttccggcattttgggaagaggagcgcccccggcagcaggatccccagggtcagggccagcaggaagctggcgtatttggcggaaccgggatggagcagaagccgctgctgcccgtaatggtagatttccgcatattttgcgtcaaacaggcaggaaaattgccctcctccgtccaaatgggaataaaagacggccatgacggccgtgcacagggccgcgagccagaaaaccggctggcccagaagggaacggagacgggaaagaggtttccgtgccgacgagcggcggaacagggtttcatacgccatatacggaaggagcagaagggcgcccagcggggaggacggcagcagaagcgttcccgcgagataatacccggagggaggcagggagcgcgtcaggacgaatacggcgcacaatagcgccggaacggcgtgattgaatgtgttgaagagttggacgggcatgccgataaacaggaccatctgggcattgtattccgcaaacagggaggagaggggaattcccaggcagtccggcaccgctgccggagagccgaggcagaggaggatcagcgcccagcgggccgtcttccggattccccagcggacggttgccgccagcagcgccagttccagcccaagaaaggtccacagggccagcagccagggagcccatgattccgggcagaaagaagccgccagcgccggaggcagccaatggcccaggtagtagatgaaatgatgtccgtcctccgtgacgaggggccaggaatttgctgcaagatgttcgtaaacggcattgcggataataaaatccgcgtgttgctggcagtggcccgtgaatccgcacaacagcaccagcatcaggcagaagaaggagaggaggcccagcacggccaatccgcgcccgcttaacggaaacctttgtgccggaagatgccgagcgcaggcgtacagcccgcatgccagtgcggcgcaaagcggtacggaaaaagccggatgcacccatcccagcagaaaaaggaggaggggtagcgccaggtacaacaaccccgcgcatagcggaaggcgtgcgggaaggaagaagcgggcaggcatgacgcagagcggaaaacttatcggcaggggaggactccgaagggccagcatggcatattttgtttcaaagaaaaggatgcagttgcctccggagatgaaaaatccccgcaccgcctcgcggcggccggggtttggcgttgcttgataccagttccagcaaaaaggtcagaacaggccgaatccgttgccgtagcgggcggattctcccagttcttcttcaatccggagaaggcggttatatttggccatacggtcggaacggctcaaagagccggttttgatttgtccggcgttggttcctacggcaatgtccgcaatggtggcgtcctccgtttctccggaacggtgggaaataacggcggtatagcggttgcccatggccagctccacggcgtccagcgtttccgtcagcgagccgatttgattgaccttcaccaggatggaattccccacgcccagatggatgccttttctgaggaattccacgttggtgacaaagaggtcatctccgacaagctgagtgcttttgccaagtttttccgtcaggattttccatccgtcccagtcgttttccgcacagccgtcttcgatggagacgatgggatattttttcttcagttccacatagtagtccgtcagctctgcggcggttctgcggctgccgtcggatttcttgaaaatatacagcccggattccggttcataaaattcggaggaagccacgtccagagcaatggaaatgtcctccccgaaccggtaaccggccttgtccaccgcctgggcgatgcaatccagggcgtcttccgcagagttcagcctaggggcgaagccaccttcgtcgcccacggcggtggaaaggccgcggtcatgaagaacggatttcagcgcatggaaaacttccgcgccataacgcagggcttcccggaaggtgggagcgccggacgggacgatcatgaattcctggaaatcaataggcgcgtcggagtgggcgcctccgttgatgatgttcatcatcggaacgggaaggatcttggcgttcgggccgcccaggtagcggtacaggggctggtgcagctgggccgccgccgctttggcaagcgccagggaaacacccagaatggcgttggctcccagtttggccttgttgaatgtgccgtccagggaattcatgagggcatccgccgtggtttgttccgtggcttccagaccgatcagggccggagcaatgacgttacggatgttgtctacggccttggtgactcccttgccctggtagcgggttgtgtcgccgtccctgagttcccaggcttcatgttccccggtggaagctccgctggggacgcccgccgtgcctacggcgcctccttccagataaacgtccgcctcaatggtggggttgccgcgtgaatccagaatttcacgccctgttattttcgcgatgcgcatttctttcataaaaatcggatggttttttccttggaaaccagatattggaattagtttaaactaatttacaaggtttgtgtatcccgtatccggagcggatgcaagctttttctccgggagaaagaccggagttcaatcagtacggaaaccccttggcggcggttcagttgcggtaatgttccttcagccacgttatttcttcgccgtgcccggcatcgtctctgggcgtttccaggaaaaagggcaattcccgcagaacgggatggttgatgatgttgatgaaggcctgttctcccagggaacccttgccgatggtttcatggcggtccttgaaggaggagaagggtgtcatgctgtcattcaggtggatggcgcgcaggcgttccaggcccagcacggaatcaaaatgttccagtacggaatccagcctgttgacgatatcatatccggcggaatagacatggcaggtatccaggcatacgccaagtttgtccttcaggtccacccgctccatgatggcggccagttcttcaaaggtccggccgacttcgcttcccttgccggacatggtttccagcaaaacaatggtcttttgttccggcgaaagcacgtcgtttaattgatccgccaccagttcaatgcctttttccactccctgccctacgtggcagccgggatggaagttgtaaagatttcccggcagatgttccatgagttccagatcctctttcagtacctgggccgcaaaacgggcgacactggggtctgcggaacaggggtccagcgtgtagggggcgtgtgccagcagcgtgccgaatccgttattcctcgctaattccagaaaacgggcaatatcctgttcgtcaatagctttggctttgctcccccgcggattgcgggtaaagaactgaaaagtattggcaccgatggagagggcaacccggcccatggcttcatagccttttgcggaggagaggtggcatccgatgtatggcatggcggtaagttcggaatggaaaggaagtttatcaatgccgcagagaggaagagagactaaaaggcctgcatgacttgatcggaaagaataagaccgccaggaacgtacgaggagttaaaacgatagtgattgttggtaatgaatttaaaccagttgattaaggcggccgtattgggaggggccctgtgcacggcctgttttgcaggagccgggccgaagggctgtttaacgccgttaaagcctgttccttccgcggagcagcttgaatggcatgacatggagatgtatgcctttgtccattttacgattaatacctttactggaaaagagtggggctatggagacgaaaagccggagctgtttcatccttccgatttcgatgcggatgatcttgtcaggacgctggcggacgccgggttcaaaggggtggtgctgacctgcaagcatcatgacggtttttgtctgtggcccacaaagacgaccctccatagtgtagcggcttctccgtggaagcaggggaagggcgatgtggtgaaggaggtgtcccgcgcgtgcggaaagtatggcgtcaggttcggtgtttatctgtctccgtgggaccgcaatgccgcctcttacggaacgccggattatatccggatgtaccgtcagcagttgaaagagctggcgacgggatacggttccattttcctggcttggtttgacggagcgaacggaggggacgggtattacggaggagcgcgggaaaggcgttctatcgaccggagcgcgtattacgactggaaggcaacttggggtgagttgaagaaacggcagcccggagccgtcatcttttccgacgtagggccggatgtccgctgggtaggcaatgaaagcggctatgcgggttatccctgctgggccacatacacccccgttccgctgcaagccgggacggaacccgcgcccggcaccgtgcgctaccggctgggcacggaaggcaccatggacggcaagtactggattcctgcggaggtggatgtttccattcgtccgggctggttctggcatgagcatgaaaattaccgcgtccggacgccggaaaatctgctgaagttgtattttgacagcgtaggcagaggggccaatttgaatttgaatgtgccgccggaccgccgcggccgcattcatgaagaggataaaaagtctctggcgggcttccgtgtgctgctggatgagttgtattcccgcaacttcgcctccggcgcacaggctgagtcctcctcttcctggaaggggcacggtgcggaacaggttctggaccggaaacggacgacgtactgggtggccgctccggaagataagcatccctgcgtggtattaaaattgccggagcccgcggcgtttgacgtcatccggctggcagagcccattcaactggggcagagggtgcgcaaattccgtgtggaggtgcgtgagaacggccagtggagcaaatggacggagggggccagcataggggccagagttcttctgaaaggaaggcccgtgacggcggatggagtgcgcgtggtgctggaacaatcccgggccgttccggccctgtgcgaggtttctttatggaagtatcccgtcatcctgaatgctccggcggtgaattatgaccgcaatggacgggtgaccctggcttccgcggagaacgtagtgatcaggtacaccacggatggaacggaacccggtccgcagtccgccatgtacaggaatcctttctttctccctgccggggggacggtgaaagcggcggccgaatatcgcggcagaaaatcttccgtaaccactcagattattcctgtccccacgcgggactggaaagtggtagccggggaaagaagcgccgccgctccggaactggctatagacggagattcttcctccctctggcatacgcatgccgcccagggagagttggcgcccccgcaggcgctggagatcgacatggggcgtccggttaacgttgccgccgttatctatacgccgcgcagggattccgcaacgggaacggttgaccgctatgccgtctatttgagcatggatgggaacacatggggggctcccgctgcggagggggagttctctaatatccgcgccaatcccgttccgcagcggattgacctgaaagcgcctgtcaaagcacgttatctgcgttttgtaggcaagcgggtggtggaaggcagccatgttgccgttgccgagctgggcgtattgggaaaataagcggtttcctttttttattatcgtagtcctccggcgttttcttgacggatggagggaagaggggcaagatggcacgcatggaacaagtcagtctcatggagttgggcaagctggccgcggaaggccagattgaagcggaagtttttgcccagattgcccagtgcgcgcagaagatgaccaagggcaacaagccgtatctggatgtgtcttttgccgatgcggaagggacaatgggactgaaggtgtgggaggataaaccctggttccggacgctcgcttctctgcccctccgcagtttcgtgagcctgcgcggccaatgggccaagggagggttcggcatggaagtttccgatctggacgtgcggttgctggacgaacaggaaaaggaaagctttctggccggttccggaaccttgaagaaaaagcaggaagctgatctgaaggaaatttgtgtgctcatcaagggcatgaatgatccgcgcatacgcgccctgtgcattgaattcattgagcagttcggggaacgcctccagcgcgccgccgccgcccgcacctaccatcacgcccgccgtggcggactggtggagcacgtagcggggatgatgcgcacggcctctgccgtctgccaggcaaatccggggctgaaccgtgatcttctgctggccgggtgtctgtttcacgactgcgggaagttgtgggaaaattgctacccgaaggaggattttacgatgccctattcggaagccggagaactgctgggccatattccgctgggcattgaactggtcaacaatttgtggaagcgcatcatgtcccttccggaagcggattcctggaagacgctggaccctccttccccggacgtgcgcatgcacctgctgcacctgattgcgtcccaccacggggaacttgccttcggctcccccgtgtttcccaaaacgccggaagcggtggccctgcattacatcgacaatctggacgccaagctggaaatgttccgcggagcttatgagacaagcgaggccctggctcccagagtgctccagcgcaaggcccccctgcctgccaacgttgttcttccgctgccttccgtcctcccgctggagccggatggtgcggatgccatgccgtaaggttcaccctgcatggaagaagttcggcgtgttctgcgtccgtggccggaacggatgacggcatctgctcccttgctgattccggctttgtccctgctgtgcgcctgcgcggcaatggatgtttccctttggttctggattccatgcttctgcctggcgtcgctgccgtgttttttacgtgcgccctccatgggggtgcttgccgttgccctggcgatgtgggccgccgtatatcttttcgcgtatgaacgggaatacgcaggcgttcccgtggaagcggggagagtcatggttatggaaggctccgttgaggctgtttccggaaaatccgtgttgtttcgcccggatggttcccggtggctgtatgcggtttcctcccgtgacggggcctgccctctggaggcaggggaacgctaccggatcaggggagaggcgtatctgcttcaggcgccgtgcggctccggcatctttgaccgggagcggtggggatacctgcacggcatcatcgccggaatccggctggatgagtattgccggaacgggccgggagactggcgcagccgtttccgggctttttccctgcggctccgggaaagggctgcctccctgctcagggagggcgcccctccggatgatgaggcccggcaggtgatggtttccgccgtgcttggggacaagacggacgcgaggccggaaacgatggcgaagtttctggaaagcggctgcatgcatgtattcgctgtcagcggcatgcatgtgggcgtggccgccatgctggttctgggtatgctgaggcttttgcatgtgcacccccgtgcggcccggctggcctgcatccttttgctggcggcgtacgtgttcgtgaccgggatgtccgcttccgccctgcgggcgttcatcatggcgacagtctggcttctggcgtttgtgctgcgcagaaagggacatccggccaatattctggcgctcgctttcatcctcctctgtttaatgaacccgctccaggttttccagccggggttccagctttctttttgcgtttttgccgtcattgtctgcctggcggaatggctcagccgggaaaagcccctgtggtcgccggacccgtttattcctccccggatttatcatgcgcgggaaagattcctggtgcggctggaaaaagcatgccgcggcgcgctgatcgtctccgtgggggcgtggctggcttccattcccttgacggcatggcacttcggaacctggaacctgtatgctcccttgaccaatttgtgcctgagcgtacttgtctttccccttatgggcatttccctgtccgggctgatgttcgcgtggtgcccgtggatgctgcatgtctgtaatacggtcgcttcctggctggcgtccgccatgctgtccatagccgggggagtagcttccctgccgtacagttatctttcttccgcaccgccttccggggaaaatgaagctgttattgttcccttgcagaaggatgcctgggctacagtcatttccaatcccgcattggttgtgggaagcggaacggaagatgcggtgcggtacaccctccttcccgtgctgaaggcgcgcagcgtccggccctacggcatgctgtcctggggaaacggcaaagcggaacgggccggagagaaagaactggagaaggaatatcccggaatccggaactggggcgcggagtccggggaatgtcccgtccggcaatggaggttacggccgggcaatgcacttgtgctggaagattttcctgtcccgttgcgcacgggaatccgtcaggatcggaaccgggtgttgtcatgggaatgccgcgggcggcggttcctgatgatagggaataccgggttttcttccctggcgcgcgcggagaaaacaccgcgggcggacgtattgctcatcgggcatcatccgcgcgacccggtggacagcgcggcgtggatcagggccacaggcgcccgcgcggtcattttcacgacggagcatgaatgccccgtaccggagggaacagccgtataccgtctccgggaaaccggaaccctctatctgcggatggaagaaaagagcgtgcaaatcatcccctggaggggcatggaacgccgtacagagtaaatcccgtgctttcctcaatgcggatgggaaggatctctcccgccaggtcaggggcggcatccaccatgacgggcttgttctgggaggtccggccggagaggcgcgccgcattcgttttggacggcccttccagaagaacttcctgcacggtgcctaccagatcccggtttttccggatagctatttcattgactacggccagaagatcctggttgcgcgcttccttcacttcttccggaatctgattttccatcacggcggcgggtgtgccgcggcgcggggaatagcggaaaatgaatgcgttgtcaaactggacctgttccacggcctgcctggtcagcaggtaatcctcctccgtttctcctgggaagcccacaatgatatccgtggtgatggacaaatccgggcgtgcctgcttcatccgggagcaaaggtccagataggtttcattcctgtacggcctgcgcatcattttcaggatgcggtcgctgccgctctgcatcgggaaatgaatgtggctgcacaacttgggaaggtaggtgaacgcctgcaccagatcctggcggaaaccgatgggatgcggggaaacgaagcggatgcgccggattccttccacttcatgcacggcttccagcagctggacgaagccgcccttgccacctgccgtttccatctgcctgccgtaccggttgacgatctggcccagaagcgtgacttccttcacgccggcgtccgccagcatcttcacctcatccaccacgtcccggatggggcggctgcgttctgcgccgcgggtgtagggaacaatgcagtaggcgcacttcatttcgcacccctgcatgatggagacatacgccgtggagcgcacgccgggattcagatgatcccggattcggttctgggaatccgcctcttccgccacatcgcacacatgcgtaccggaaaaggcggtttgcaactcatccatgcggcgttcctggcgcgcgcgcagaatgccgtccacatgttcaaatacgcggtggtatttctgggtgccgaccacgagatccaggcgcggcagttccttgaacagttcctcttttttactttgggccatgcagcccatcatgccgtacactacatgcggacgatgccgctgctgcttggccagaagccccatttttcccagagccttttgttccgcctgttcccggatggaacaggagttgaacaggatgacgtccgcctcatcctcgcggtccgtcatggtgtagcccttctgcacgaacatgcgggccacctgttcggagtcccgttcgttcatctggcagccgtaggttttgatataaagcttgggcatggaaaaaatcaggtattttttttcagggtgaccacgcattccagatgcttggtctgggggaacaggtcaaagggctggacggcggtgacggaatacccggccttgtcgaattccgccagatcccgtatctgggtggcgggattgcaggaaacgtaaacgacttttccggggccgaaggcaaataactgggccaaaaatcccgcactgcatcctttccggggagggtcaatcaccacggcggttttttccgcggggaaatccacccgggcaaaaatggctccggcgtccgccgccaggaatcccgcatgttcaattccgttgctgcgggcattgctgcgtgcccagtctgcggaagtctcgctgacttccacgcccagcacttttttaaatttcttcgccaggctcaaggcgaacaggccggaaccgcagtaggcgtccaccaggaattcctccccgtccatactcgcctgttgggccacgtaatccgtaaaaagcggaagaatgaaaggattattctggaaaaagtctcccgccagaaaatggaattccaaattgcccacccgttcgcaggcgacggcattgttattggtgatgacggttccttccgaggcccggagcagaatggtggctccccgcttgaaccgggctgcggcctggtaaacgcttttgcgggccaggggcagggcttcattgatgcactccatggcaatcgggcattgcggcacgtccactacgtcccttctggagcctgctttcaggaaaccgatggccggcttgcctccttccttcggcttgtcaaaatggggcgtaatcttggagcggtaatggtattggcggggggaggctacggccggattgacgggcagttccagccctgcctgcaagcggagcagatccgctacctgccgggtcttccagagaagctggcggtcataggaaaaatgctggtactggcatcccccgcaggttccgaacaggcggcagcccggttccacgcggtccgggctggggttaattacttccaccagatcggcggaggaataattcctgtcattacgccagacgcgcgcctttacacggtctcccggcagggcgaaggggacaaaaaccacccatccgtccacgcggccaatgccgtcgcctgcattggaaagggcgtcaatatccagttcaagctcctggtggtaggaaaaaggttcggggtggaaacccttgggaatggtcgcagtcatggtggtgggaaaagattatggggcggaaggggtaatcaacttgccgtccagatcgtacagcagggtttccggcagccggggggtgcgcagtccggggcggaaatcgcccggcaagacagccggccccggtgcggattcttcattctcatcctctggaagaatctcctgttgcgccggagcgggcgcccagggtgcgggctggttagctgaagcggtttgttccggctgaacggcaggaactggggcggggtcctgaggtgccgtttccttgttggaggcgcaggaagaagtccaggccagcccggcaatcagacaggagcggatcaggagttttctcatggcgcggattcttacagcttcatccggacttggcaagtgaatagccctgctatggatcgtgtaaagggcatttcttttttacttggaaaccggggaatgcttgctgtttgactcttccaggatagtgtttatagtaggagcacgtatgagattttttctttctttgtgttgttccgctgcggtttcagggttgtttgccccacaggccggcgtggcgcaacagcttcctcccattttcgggtttgccaataaagacaggatacctgaagttaataagtcgggcagtcccgtttttgacaaactccgtaatgaagctatgaagaaaaagctgccgctggtaatttatcttactggttcttcgtggtgttcccagtgcaatatttttacccgggaatatatcaaaaaaacaaatttcaaaaatgccgccgggaaaaaatttatattttggctggtggataccaaacaggtgccgggcaattctccggggacgtttaaatttaaaatggttccggaagaagccgcaaaaatcgtggggtgtgtggattctccccgcgcgccgtatgtggttcttgaacctcccgccgtgtttatcattgaccctgtttccggagaattgatcaagagcctgttccctaagagtgaagtggataagtatggaaagcctcttgacaaaattattgaagaaacctggaataatcggataaaccggaagaaactgaattgaaatgcttaatggcaaggtatttgctaagctaaataatgacagcggcaaaaatcgggcaacgcgaaggaaagcggaatgatgaagcggaacgatttcaaacggttatccgttgaaaagtgatttttgacatgtagcgccgggaatggcagcttgtggtttctgttggtttatcaagtcctgacgtgttgatattttaactttgtaatctgaattaagaatattttaattaatatgaccagtataaaacaaagagatgaattgcaatctactatttggaaaatcgccaacgaagtacgtggcgccgttgacggctgggattttaagcagtttgtcttaggagctcttttttatcggtttatcagtgagaacttcaccaacttcattgaaggcggtgacgagagcgtcaactatgcgaatatgtcggatgacgttatcacccctgagataaaagatgacgccaccaggacaaaagggtatttcatttatcctactcagctctttgtgaatatagcaaagaatgccaacaacaatcctaatctgaacacggacttggccgctattttcgatgcgatagagagttctgccaatgggtatccgtccgaacacgacataaagggactgtttgccgattttgacaccacaagcaaccgtttgggcaacaccgtggaggagaaaaacaggcgtttggcggcagtcatcaaaggtgtggaaagtctggatttcggtaattttgaggataatgagatagatcttttcggagatgcctacgagtttctgatttccaattatgctgccaatgccggcaaatccggtggagagttctttacgcctcagaatgtatcgaagttgatagcgcaattagctatgtcgggattgacttctgtcaacaagatttatgatccggcttgcggttcgggttcgttgctgcttcaagcgaagaaacagtttgatgcgcatctcatcgaagagggttttttcgggcaggaaatcaaccacaccacttacaacctggcgcggatgaatatgttcttgcataatatcaattatgacaagttcgacatagcgttgggcaatacgctgatcaatccccaatatggcgatgaaaaaccatttgacgccatcgtctcaaatccgccatattctgtcaactgggtgggaagcgacgacccaacgcttatcaatgacgaccgctttgccccggcaggggtgttagcgccaaagtcaaaagctgactttgcttttgtgcttcacgccctcagctatctttccgccagagggagggctgccattgtctgtttccccggcatcttctaccgtggcggtgcggaacagaagataaggaaatatcttgtggacggcaactttgtggaaacggtcattgcattgcctcccaatctcttctatggaacgagcatctccgtgaatatcctcgtgctgtccaggcacaaggctgatacgaagacgcaattcatagatgccagcggagaagatttctttaaaaagcagaccaataacaatgtcctgacagatgagcacatagaaagaatagtcgatatattcgccagaaaggaaccggtggaatatgttgcggcattagtagataacagcaagattgcggagaatggctataacctctctgtgagttcatatgtagaggcgaaagatacgcgcgaggtgattgatattgccaggctgaatgccgaggtgaagcaaacggtgaagaggatagatgcgctgcgtgcggatattgatgcgattattaaggagttggaggatgaataatgcaccagcaataacaggaacggcttttctgaccgatgtagtcaagcagatgttaaagggaggtgacataaaatgagtagactagacgagcttattcaagaactctgtcccaatggtgtcgaggataaggcgttaaaggacattttgaccataaagaacggaagtgactataaaacatttcctgccggagatattcccgtgtatggttctggtggtatcattgcttatgttgatagattttcgtatgacaaaccatctgttttgataccaagaaaaggttcgattgataaactgtactatgctgaaactccattttggaatgtggacacgattttttacacagacattgatacaagcaaggttttgccgagatatgtttatcattgtctgaaaagagagcatttagagaaactgaataccgcaggtggtgttccaagtcttacacaagctgtacttaacaaggttactattcccgtgccaccacttgaggtgcagagtgaaattgtccgtattctggacaatttcacggaacttacagcggaacttacagcggaacttacagcgagaaagaagcagtatgagtattatcgcaataagttattgtctttcacatggatgcctttaggggttataggagaaattcgtatgtgtaaacgtgttcttaaagaacagacttctgattttgccgagatacctttttataaaattggcactttcggaaaggaacctaatgcctatatttcaagagaattattcaatgaatacaaatcgaaatatagttatcccaggataggcgagattcttatttctgcaagtggtacaataggtaaagctgttatattcgatggacaggaagcatatttccaagatagcaatattgtttgggttgaaaatgatgaaagccgagttttaaataaatatctattttactgctatcagatagcaaaatggaaaatagcaaaagggggaacaatacagaggttatataatgaaaatctcaagaaaacgcttattcccattccatatccgaatgacaaagaaaaatctctcgaagagcaacgccgcattgtctccattctcgacaaatttgacgcgctgacaacctccatcagtgaaggcttgccaaaggaaatagaactgcgtagaaaacagtatgaatattaccgtaaccaattattatcatttcccgataataaagcaacagcctgaatatgggaaaaacgttgacaggtatagctcaagagctaaaaaacagagaaaagaaggttcagcttatctatgcctttaacggcgcaggaaagacgcggctgtctcgcgcattcaaagaattgatgtcgcccaagcatgaggaagaagaagcgcaagacggggatactgatgtaaaagtattgtattataatgcttttactgaagatttgttttattgggataatgatttggaaaaagatacagacaggaagctggtgatatgtcctaatgcctttactgactgggtgcttcaagatgaaggacaagagagtaatatcataacatggtttcagcattataccaatgataaactaactccacgtttcaatgaaggttataatgaggtttccttttctatagaaggcggcaacgaagagcgaattgataatatcaagatatcaaggggtgaggaaagctgttttgtttggtgcgtgttttatagttttctgaaggaagtagttggagtattacatgaagagccagaaaaccgctcgacaaataagtttgatgatttggaatatatattcattgatgatccagtaagttcgctggatgaaaatcatttaatagaattggctgtaaatatagcagaaattataaaaagtagtgattctgatttaaaatttatcattacgacgcataatcctttattttataatgtaatttataatgaattaaaggctaatgcaggctatatgctaagtaaatatgaagacgggacttttaaacttgaagaaaagagaggggattcaaacaaaagtttttcctatcatcttttcctcaagcagactatcgaagaggcgcttgattcaggcactgttcagaaataccatttcacgctactgcgcaatctctacgaaaaaacggcaaacttcttaggatatccaaaatggtctgatttgttacctgatgacaggcaaatctactataacaggattattcagttcacaagccactctacattatccaatgaagctgtggcggaaccgacagaagcagaaaagaaaactgtgagatttttattagatcatctgatagataacaggtactggaaagagagaaagccatgacacagtacagcaccattgcagaattgcaaaattttatcgttctcgacaactacaccaagagttccatggtaagcgagccgcccgcaggttatcagacagaggcggctttggaacgtgaattcatagaagacttgatatcacaaggttacgaatatgttcccagccttgttacgcctgacgccctgctctgcaatgcgagaaaccagttgcaggcattcaacaatatcgtttttaccgattctgaatggggtcgctttctggaggaatatctggacaagaagagcgacagccctgttgaaaaaacaaaaaaaatacacggtgattacatctatgactttgtgtttgatgatgggcatattgagaatatatacttggcagacaagacgaatattgcccgcaacaaagtacaggtgattaatcagtttgagcagttcggggaacaagcgaaccgttacgatgtcacgatactggtaaatgggttgcctatggtgcaggtagagctgaaaaagcggggagtggctatccgcgaggcttttaaccaggtgcatcgctacagcaaagagagcttcaacagcgagagttcactttataaatacttacaggttttcgtcatctccaacggtacggacacccgttattttgccaataccgtaaagcgcgataaaaacagttttgactttacgatgaactgggcgaagtcggacaatatgttgattaaagacttaaaggattttacggcgacatttttccagaaaaatacgctgctgcaggttcttttcacatattcggtgtttgataccagtaacacgctgctcatcatgcgaccctaccagattgcggcaacggaacgcatcttgtggaagataaaaagttcttatcaggctaagaaatggagcaatccggagggaggcggatacatctggcacaccacggggtctggcaaaactctgacgagttttaaggccgcacagcttgccacgcaacttgattttatcgacaaggtgttctttgttgttgaccgcaaggatttggactatcagacgatgaaggaatatcaacgtttctcgcccgatagcgtcaatgggtcagagagcacggcaggattgaagaggaacatagggaagaataacgacaagattatcgttacgaccattcagaagctgaacaacctcatgaagagcgaaagcgacttgcccgtttatcaaaaacaggttgtatttattttcgatgagtgccaccgttcccaattcggagaagcgcagaagaatctgaaaaagaggttcaagagatattaccaatttggctttacgggtacccctatctttcctgagaatgctttgggggcggagactacggccagtgtgttcggccgtgagctgcattcgtatgtcatcacagacgccatacgtgatgaaaaggttttgaagttcaaagtggactataacgatgttcgtccacggtttaagaatttggaaactgaaaaagatgaaatcaagttaaatgcggcagaaaatcaaaagcttttgcttcatccagaccggatcaaagggatttctcaatacatcctgcagaatttcaggataaaaacccatagaacgcaagggaataacaagggctttaatgccatgttcgcagtaaacagcgttgaggctgccaaactgtattatcaggaattgaacaatctgcagaaagaaagtgacagtcccctgaaaattgccaccatattttctttcgccccaaatgaagagcaaagcgctaagggcgatatcaaagatgaaaattttgacccttcggcaatggacagcagcgccaaagagtttttggcaaaagcgattggcgattacaacgtgatgtttaaaacaaacttcggagtggatagtaaagagttccaaaactattatcgcgatttggccaaaagagtaaaaaaccaggaggttgacttgctcattgtggtcggtatgttccttaccggttttgatgctcctgctttgaatacactatttgtagacaagaatctgcgttatcacggtctgatgcaggcgttttcacgtaccaatcgcatctatgacgcaaccaagactttcggcaatatcgtcacattcagggatttggaacaatctacaatagatgcgatcactttgttcggagataagaacacaaggaatatagtacttgaaaagagctacaaggaatatcttgaaggatttaaagatattgccaccggcgaggtgagaaaagggtatgtggaagttgtcagggaactgaaagaaaaattccctgcccccgatgggatagtgacggaagcagataaaaaatcctttgttaagctgttcggagaatatttgcggatagaaaatattttacaaaactacgatgagtttacgcagctcaaagccctgcaaaaaatagacaaagcggatagtgcggctcttgaagcgtttaagaatgccaacttcttgactgatgaagatattgcagccatgcagggcattgatatactgaaagagcgaaccgtacaggattatcgttcggcgtacaatgatattcgggactggttcagacgtgagaggaacggtaaagctccggaagattcaaaaatagactgggatgatgtggtctttgaaattgatctgcttaaatctcaggaaatagatctcgactatatcctcgaactgattttcgaacacaacaggaaaacgaaggacaagcctgcattggtagatgaggtgcgccgtgttatcagagcgagcatcgggaacagggcaaaagagagcctcctggttgattttatcaatgaaacagatttggaatcgatgcgagataagactgatattattgccgctttctttacttatgcccaggagaaacagaaaaaggaagctgatgctctgattacggaagagaaactgaacgaggaagccgcaaagcgatatattcaaacatctttgaaacggaagtacgccagtgagaacggcgccgacctcaatgctattctgccgaagatgagtccgttaaaccctcaatatctaacgaagaaacagagcgtctttcaaaaaatcgtcgctttcattgaaaagtttagggacatcggaggtcaaatttaatacctgaacacgtgcaaattgcccgattttgccgctctcattcggcatcatgaggtgttactcttctaaaaacggtaaatgcaacgcagccatggctggggcgtgccggaatagtagggataccaccggtgtccggggtggtgcatggtgcggccccattcatcctgacggcgcgcctggggcgcatagaagagcagcttccactcccggctgacgaaggaagaaggctctgtttccgaagccggaggcgccagaaactcctggagggcgctggaagaacagcaataatagggaatgttgaaccggggcgccattccgaacgccagcagaagccatatccagacgcggaaaccgggatgccgcgtccaggaggaagccagaaaggcaagcaggcaggccatgaccggaacgcttcctttgcaaagcaggtcattgacgtctccgttcacgtaaaaaaaaggcagaatcaggccggttgccagcgtacagataaagaggggattcctccggaaatcccgccagcagaacagggcgtacagcaggaatgaggtcgccataagcgggaaatcccccggatgcgtataaaaaggccgcatgcccatgtgggaggatggcgcgtttaccgtcccataataaaggaggaaacacgctcccagcagaacggaggccgaaaaggagggatggagcaggacatcccggagaggggggacgcctctccactgacggtaccactggcaggccgccaggggtagccctccgagggccgcgaggggggaataaaaggccgtggctgcgaacagaaggggtatccagggcaggggcatgcgtcccgaagccaggaagatgaaaaagagcagaactggaatggaagcgtttgcgctgcacatgatttgttccgccgtgccgaagtaatgcaggcggaacaggtccagccccagccagcactggaaattcagcagagaaccgaatgccgccatcagcagggcgagcagcagggagcggcgtccggagaaaacgcagagccacagccaggcaagaaacagcccccaggttccccacagaacgacaaacacgcgtgcggcgtccagccccgccagttttcccgccagggctgggaccagccagaaccccgtgttgtaaaccagcatgttcccgtccggaaagatgacgggccatgggctggctaccaattcacgcaggcaggcgtttctgacgatatggtcagggtgctggttgacccattccccccagccggaaagcgtcatcagggcggcaaacgccgccagggcgagaaatgaagagcgggtgaacagggggaaggcgggaagggaatcccttgtttgcggttccttgcattttcggggcgccagtcccgcagccgtcaggagcatgagggggagagcggcgtaccagtgcatccacccggccaggaatatcaggacgggcagcagaagccaggcgcaggtgtgccacttcagcgcagttgcgttgaacgcttgttccgggcacggggcatcagcggcagaggcaggcatttcccctgaaccttaatggggctggcccgcgggggcaaggaggaaactcgcaggccggaatggaagggggcgtttgtatgggtatagtggcaggaatgagggtgcgccgttgccgctttaccggaaaaacgggggcctcatactgggaggcctatgaataaaacacaatttatccgggagctccagcgtgagctggggaatgacgttacttcccggcaggcggaacatgcgttgaacgcggtgctggagacgattgcgcgggcagtccggaggcggtcgctggtgaaattccggggctttggaactttccgcgtcaagcggcgccgcgcccgcatcgtacgccatccggaaaacggcggcaggctgctggtgcatgaatcgaaaaccatgaaattccgcccctcttcccttctgtggaaggagtaggggaaacgctcgggaactcctgccattttgccattgacttccccgtccgtggaggcccttaatgtggataaggcaggagcgtttttgcctgcctgaataagtaactggccctttccgcatttgccgatcatgattccggattccgttcatttgctgacccgttcctctcagatgaccctgtacaaagatgaacagggccgtgtgcgccgcgcctattacggaccgaagctgcgtgaaccggaggatgctctggaaaacgccgcggatgctcctctcctgtattcctccctggcggattccgtaacagggcttcccaatgcgtccggcgagtactgcatttgcgtaacccaggcggacggggccctttccctgagcctggaatgcctggattgggaagtgctggaactggatgacgaccgggaagaagccgtcttctatgggaaggacccttcctaccctgtgcgggtggaaatccacgtgcgctcccacagggaatcggacacttttctgcaatgggcggtgattcggaacgaagggaaagaaggcatccgcctgcaccgcgcggcatccgcacagctgggtttgcgcgcagaacggtatttcgtcaccagcttccgcggcacctggggcggcgagtccctgatgagtgaggaagaagtggcccgggggcatgaacttgccctggtatccggaaccggcacccgcaccgctcaggagggaagccccggattcatcatctctctggacgatccggcacgggaggattccggggaggtggttctgggggcgctggcatggtccggcaattaccggatatggttccggcacagcccgtatcattacctttttgccggagcggggctggatatggctcccgcgccctatctgctggacggcggcggtgtgttcaagacgccgcccctcattctggcgcacagtaaaaacggcaagggagaggcctcccggcgcatccaccgctgggcgcgccgttacggcctgcgtggtggagaatcagagaggccgaccttgctgaattcctgggagggggtgtattttacctttacggaaaaagtgctgcacggcatgatgaaacgtgcggcagacttggggatagagcttttcgtgctggatgacggctggtttggcggccggttcccccgcaatgacgcccgtgccggattgggggactggcaggttaaccgcgctaaattgcctcatggactggaaggcctcattcgccaggcggaaaaactgggaatacgcttcggcatctgggtggagccggaaatggtgaaccctcattcggagctttatcagaaccatccggagtgggtcatcggtctcccgcatcgggaaaacaggctggaacgcagccagtatttgctggacctgagcaatcctcatgtatgcaggtacattcttgatgccatgcggaagctgcttggggggcatccgggtatttcctatgtcaaatgggattgcaaccgcaaaatttccgaccccggctctccctggctggatgcctgccgccaggggaatctgcccattgactacgtgcggggctatgaacgtattcttgagacgctggcggcggaattcccggatgtgatattccaggcctgttcctccggaggaggccgcgccgactatggaaccatgcggaagcatcatgaattctggacgtccgacaacacggacgcatatgaacgcgtgtgcatgcagtggggcataggccacctgttcccggctatttccatggccgcccatgtgaccgcctcccccaaccaccagacgggccgctccgctccgctcaaattccggtttgacgtggccatgtccggccggcttggttttgaactccagccatgtgacatgacggaggaggacatggttttttccaaacgggctctggcggaatacaagcgcatccgccccgtagtccagttcggtgacttgtaccggctttcctccccgtatgaaagccgggtggcctccctgatgtatgtatacggaaaacgggctgtcgttttcgcctggctgatggataaatggctggcggattcccctccgcccctgcgcctgaaaggcctgaatccttccgccaggtacctggtgcgggaaatcaacatgaatgaagacggctctctcacggatgttcacgaacgaaggctgggaggcgactttctgatggacgccggtatccgcatccgctggaaaaaggccttccagtccgtctgcctggaggtggtggaaacaaaccctggtgctccggcttcatgataaaaagctgtagactttttgcctgcagcctgatgttttttttcatggtgggaaccggtgtttggcgcaggtttcatccccgctttgttaatattgtgagttatgcggccaacttgccattctgacgccgcttcttcataaggggtagatggcaggtgtaaacggtacgcccgtgacggaatgcatgatccctttccggcttttcagctgaaccggatattggggcagttgcgttaaggggggcactaacatgaaggcggcaataaaagaattattgccgcctttattctttattgagttcctgtggatttgctggcagtcctagatgcccaccacgccgccgatggtctggatgatgaccttggcaatgatggtcatcaggataagggccacggggtaggcggtggcgtagctgaccacgggagcctgggagtccgttttgctggcgatggcccccagagccggggtggaggtcatgccgccgcagatgccgcccaggcattccagaatgttcatcttgaagaccttcatgcccacgaagtaaccggcaaacatgccggagcaggtgacgatgacgcccatgatgaagacggccgcgccgtgggtggctaccgtatccaccaggtccgctccgcccttgatgccggcgtcagccaggaagaagaccagccccaggtcctgcaaaagaaggcgcgtggggcgcgggatgtagccgacgatggggcccagccgtccgaagtggccgagcagcagggcgacgatgagggggcctcccgcaatacccagggagattcccgcgccgttgccgaggctgaagttgaccaggccaagaatgatgcccagggagaggccgaagcccagggaaagcaggtccgtctggttcatgtcctggctgcggtggccgattttgtccccgtatttggtaaggttttccggggtccccaccacggtcagcacgtcgttgcgttccagcgtggtttcccccgtggggacgaaagtgaagcccaggcgggaaatgcgggagataatgataccgtccgtacgcagggttttcaggtcgcggagcttgtgcccggcatagttcttgtttgtcagaatcagtttgcggcgctccttctgggagtccatggggtagggattgtcacatacttcccccagaaaggcgatgtcgtggggcatggtgtcgctgttgcccacgatgaggacttccgttccttcccggaacgtgtcttccggagtcaggggcatcagcctgtcgttgcgaaccacgcgggtgaccatgcagtgcaggccgtccagcagcttgcagtccgcaatgttctggcctatcaggttgggctgtgtgacgcggacaaggcgggaaatgatgctgacctcctgtctggaatgcatggctttggcctctttgttgaggtcaaagtgcagcaggcgcggcagaagctggacgaaaagaaccactcccaccacgccgaacggataggcgataccgtaaccgatgctgacgccgcttccggaggctcccggcaggctttccgtggcggccgccagcgccggggtgctggtgcatgcgccggcaaagatgccggaagagattcccgcgggaactttgaaccagatgccgaagaggcaggtgaataaagctgacactcctacaatcaccgcagacatgatggccagtttgctgccctgcttggcgatggcggaaaagaagcggttgcccgcgctgaggcccacgcagtacacaaagagcgccagacccagctgccctacgccgtcgggaatggccaggcgatagtggccggcggccagagccacgaaaagaacgccggaaaggcccaggttcagtccgtatattttaatgctgccgagagcgatgccgaaaaagatgattccaaagagaaccagggtgttatgatggagcaggatatcaaacataaagacggttagcggttttgtttccttccttgacgaagggcgggggaatgcccgtcacggatgagagtgcgtgcgttgaaaaagtagagggtgcggcgtatgccttccagccccgtcagtttctccgcaggtaatccagcagagtgccctggtccaggcaggacatatagggcatatggtcgatgcccttgtccatgatgaacctggtcagcagtttgcgggcggtcgcaaggagaacggcgggatcccagggcttttccagatagttgtcaatgtgtgcgtcattgacggcctggatggtgtccgcgtgggtggcctggccggtcagcaggattttgcgtgtcccggcaaaacggtcgtctttggcgatgcctccaagcaactctactcctgaacctcccggcatgacgtggtcggaaataatcagtcccgtcagttctccgtcctggtcgaattcttccaatagctcgcggcattcggatgcggattccaccccttccaggcggaagcaggaattcagcggacgaaggtcgcgcaaaacgctgtccaggacttccggctggtcgtccacgcaaatgatgttaattttttccatgattgttgatggttggtatgactatcgtaaaaacggtatggcccggaacgctctccaggcggatgcggccgccgtagctgtccacaatgcgccggacgatggtgagccccagccccaggccgaaggaaagacctttctttttggtagtgaagttgggacggaaaattttttcatgcaggtcctttgggacgccggggccgttgtctgtgacggagaccagaatttcacgggtggtatgggatgtctggtccttgctgctgattttttccacccggcattctacgtggatggaagggttgggggtattttctattttcagcgcgtcgcaggcgttctgaagcaggttgatccaaatttgaacgagctccgtcatatctgcgaagatgccgggcacggagtctctggggggcagggccatttcaaaatcaacgccgcgcagactggacttgaccagagcaacagcttccgtaagggaatccgtcacgtttacgccttcttcccgtctggtgttgcctcctcccagcaggcgaacggaacggacaatggctgtagcatgcctgacagccagtttcatgtcatgcaggtcgtgtcccaattcccaataagggaggttttgttccagctggctgaggaatggcttgttcagcagctccggctgattctgtatgtccggaatcagggccagggccttggccacgtcctgggaaagcccataatttttttcaaactggcgcgccagcctgcgctgttcggaagtggatgcggaggaagccccttccaaccctttgttgtacagggtgtagcggaaggcgttttcctggcggaacatgttgtccagggtttccagaacaaagtctgttttacgggacaggactcccagggaattgttgagctcatgagctattccggcggataattgccccagggtggcggccatttcagaacggtggagcatccgcagcgcttcttccttttccgcagtgcggtcaaagacgcgggtattgcgcgccgccagttcatggacaatggcgggaacaaactgttccaggagcgtgccgtagtgttccacgtccacggcaggggtggcggtgtcgatataggccagttccaaatcggtttccgcaatgagatcggaggagctgcggaaccatccggaaaagaaactctgcactcccaaataatctccgggaccggcccggaacgccttgtagattttgtgggaagtggaagctgtttccgggtcttctttaacgacgtggcggtaggaaaccacgctgccggataaaatcaggtaaagccttttgttctgttccccctggcggacgacgctgtttcccctgctgatggcaataatgcggtccggatcggagaagtacgccagattgatgcgttttagttttttctggaattcttcctgttcaatgatcatagggcgcttttcccgttgatgttggccatgccggggcaacatgtcccggcatggaacattaccttacttaaaaagcatggcattgggcaagaatcatcatcatgacgtaggttaaaatcatgcccaggatgcccaggatgacgccggaaatggccattcccttggagctgaccaggccggtggcataggccagggcgttgggggggtgctgatgggaaggctcatgcccagggaggaggcgaaggccacggataccagcagggcggtaacgccgcccaggggggccaggttgtcacccatgttgacgccgacaacggcaataatcggaatgagcagggaggccgtagccgtatggctcatgaaggtggccatgaacaggcagatgattcccgtacccaccatgagcgggaagggggaccattcggcaaagggaatggagccgatcaggttttttgccagtccggtgtcttgcagggccagccccagggcaaagccgccggctaccagccagagcacgtcccagcccattttcttcaaatcttccttggtgatggtttccgtaatggcaaagacggcaatgggaatcatggcgatggtattggagtccagaccgtgtactcctttgcccgttacccacagcaggacggtaacggcaaaggtgacgtaaacgataatggccttgggggttctcaggaatttccctcccacctgcagttccagtttcttttgggagatggggaacagccacagcaggagaagccatgcaatcagaatcatgacgatgacgaaaggaatgccgaacatgagccatttgccgaaggagacgtccagccccataccctgcagcgccttcagcgcgattgcgttggggggcgtgccgataggcgttccaatgccgccgaggttggcggcgatggggatggccagggcaaaggcggcgcggcctttgtcttccggagtgaacagggccagcaccggcgtcaggatggcgagcatcatggcggccgtagccgtgttgctcataaacatggagaaaagagccgttacggacatcagccccagaagtacgaatttgggattggtgccgaagggttttaaaagtactttggccaggttcatgtccagcctgtatttggttgcggccgcagccaggaaaaagccgcccaggaaaagcatgatgatgggatccgcgaaggtggccatcgtggatttttgctgcatggtgttgacaaattgcagcccctggatacgcgcggttatttccttgctgtacaggcgcccggccgcggtcttgagctgggcggctatggattcctgcccggcggcttcttccgtttttccttcacgggacagttcctgtgcgttcaagtctattttttcataagcgtccatgagctggaaccccagggtcatcctcacttcttccgcgtccagcttggttttcttatttaaccggttttcgacattttccttcaatttgccgactacctccggattgatccctttgcctatggcgtcatccagaatggaggataccgccgccttgtcatagcgctccggcatcaaaaatgagagagagccgttggagacgcacagcagggacagggtaatgaccatcacggaggtgatccagatagggatgggttccaaaatccagaagagcgccgccatgacgaacatggcgatgacgcggatttcaatagggcttaattggattccccatgaagcgaaaggcaggaagaagacgactcctgcggcggccaggctgatagctgccttgagcagcttgttttgggtttcactcatgaataatagctggtaatatggttggcgggcggaagggtacttcccgattttacaaatagaaacttttatttaaaaaaattatgtcagaggggacggctgccgtttcccggagctggagccgggagctttctccgtgatgggaaaattgcgcaaccctatggggatatgcgtgtttagcagagataagtcaatcatccgttcgggggcgccgatttggccgagtgtttcctctgtattaaaaaaattctgaaggtagtaggttcctctatagccgcgcgacgtcaaatccccgctgatctggttgatttccttttccccgagaaggccggagtggattgtcgttcgaacctcaaacgggaaattcctgttgatcagataatccagcgtttgagtgaagcaggggaataaatccggacgcccggtaatggagccgaacagtttttccggcgctttgtaatccagggcaatatagtcgcaaagcccttcctccaccagcgttttcaccacgccgggccgggtgccgttggtgtctatttttattgcgaagccaagctgccgtatattgcggcagatagggataaggtcgggacacagcgtgcactcgcctccggacagaaccaccccatccagaaatcccacccgatctctgagaaaatcaagatagtccgtccggtctccggcaggagaatccgttcccctgaccagggagacgttgtaacagtactgacaaaacaaattacagcctctcagccagaagatgcaggccaccttatttggaaagtccagcaaggtgagcggcgtgatgtctgctatgccccgacccgttcccatcgacttcgcatatgttgttgggagaattatcgcggctgttccgtttgggcggagcaggagcaggggcggcccggttccacgaagtggacgcggtcatggaactcgccctgtttgccggcgttgaaagtttctacagggcggtgatagcccatgacgcgcgtgtaaacggtgcagcgggtggccttctgtgcgtatttgcttaatatttcctgtttggtcattgtcgtattaatggttgggtttgaagtcgggagcctattggaaaagggattttattcatgcctgtggatgtggagcagctcttcatcgcagaaggggcagtattcgtgctccccgcgcagatagccgtgcttctcgcaaacggagaagagcggggtgacggtgaggtacggcatgcggaagcgggtcagcactttgcggacaatgtcccggcaggcttccggggagctgatggcttcgttcatgtacatgtggaagacggttccccccgtgtagcagcattgaagttcatcctgaagctggagcgcccggaacaggtcgcttgtgtggtgcacgggaagctgggagctgttcgtgtaataacgctgccccacagggccggcctggatgatgtcaggatagcgtttctggtcttcgcgggcgaagcggtgcgtggtgccttccgcgggcgtggcttccaggttgtacaggttgccggtttcctcctggtactcctgcatgcgcaagcggatgaattccaggatctcttcagcaaaggccctgccttcttcagaggtaatgtccatcgtatcgttggagaaattgcgcaacagctcgttcatgccgttgacgccgatggtggagaaatggttgcggaaggtgggcaggtagcgtttggtgtaggggtacaggccgcggtcatacatttcctgaacgaaggcccttttcttttccagacaggatttggccaggtccagcagttctcccagcctggcgaacagggcctcccggttttgcttgaacaggtagcccagccgggccaggttgatggtcactacgccgatggagccggtcatttccgcggagccgaagagaccgccgccgcgtttgagcagttcccgcaggtccagctggaggcggcagcacatggaacgcacggcatccggcttgtaggcccgttcgtcaggcacgcgttccccgtgttcattgacggtgtactggctgccgatgaagttctggaagtaagaggaaccgattttagcggcgttttcaaacaggagaggcacgttttccccttcccagtcaaaatcttccgtgatgttgacggtggggatggggaaggtgaagggctgtccggtgctgtccccttccgtgagaacttcgtaaaaggccttgttgatcaggttcatttccttctggaaatgcttgtaggtcagttccgtcagcttgtttgccccgcgttccctcgccagggcgagcaggttcgcgtcttctattccttcaaagaggtgttcccctccgctgaagggggcctgatcccgcaggtcgcgcggcacagtccagtcgatcgtgacattggtaaagggagattgcccccagcgcgagggtacgttcaggttgtagacaaaactgcggatgtctttcttgatgcgggggaagtccgtctggtccttaaaaacgtagggcgccaggaaggtgtcaaaggagctgaaggcctgggcgccggcccattcgctttgcagaatgcccagaaagttcgccatctggcccagggcttcccggaagtggcggggcggcctgctgttcacgcggctgcgcacgccgttgaatccttcattgagcaggttgcggaggctccatccggcgcagtatccggtcaggcaatccaggtcatggatgtggtaatccccttcccggtgcgcggctccttcccgtgcggagtaaacctggtccagccaatagttggcgatcaccttgcccgccgtgttgttgatgagccccgcattggaatacgtggtattggagttggcggcaatgcgccagtcgctttgcccgatatattcctctaccgtctgcttgcagtccacataggtattgccggaataaaggccgccaagctgttcgcgctgcattttgtgcaggaaacggtaggtgatgaaggccttggccgtgtcaaaatatccggaacggaacagggcgcgttcaatcatgtcctgaatctcttccacatgcgcgctgtcctgatggctcagcttggcttccacctcttcatagatggaacggttgtaggcggtcccggaactgtggaaggcttttctaatggcctcttcaatcttatagccctggtattgctcctttttcccggaacgtttgatgatgcttgttgccatgatgggtgtctcgcttggaaagggtggtgaccgctcatccgcgagcctgggcaaaagcctggaaaaaccataggcaggggccaaccgcatgcgcgcattcccggaaaaggggggcatgccgaagacctgtgcgtatgttcatcctgtccgcgggatgggaatacggcagcatcaggtcgtcttctggcttccggtgcgacatgtgatggggacttcccggctgcctgggcagccagtgtccgatccatcgtctaccggttacagcggcgcgtccgcgacggattttcaccgtcttccgttacctgcgctggaacgcaatgaaccacagaaagagacctcccgcaagaaaaatgtataaataatgtgttaaataattattcatatgctatatatagtatataacggtagaaaaatgattgataacacagctttcttttccgtcatggcaccatatatgcccttgcgcccctttcccggtctggaggagcgcgggaaaagaagaattcttgttgcaagaaaattccagccttcttttcccgtataatataacatgcgtttctttgccttttcaaaaaatggatggaagaaatactttctgttgccggtcctttccatgctttccgcaggaacttccgtttccggggcttccgcagactggaatgagaagaccatccgggacaatcttcagctggtggcggaatggcaggcgaagcatcccaaaaaacgttcgccgctgcattggacttacggtgccttttattccggcctggtgcaatatggcctgtccgttccggaagggccggggctgccgttgctgagaaaagcgggagaagagcaggggtggaagaccctgaaccggcattatcatgcggacgaccatgccgtggggcatgcctggatggagatggcgatggaagacggcaatcccgccgcagctgaaaagatccgcgccgtgctggacaaggtgatgaaccggccttcctccgcttccctccaattcctgactccgggctgccaggaccgctggagctggtcggacgccctgtttatgtcccctcccgtgttcgtgaaactggcggcctataccggagaccgccgttatctggagtttatggatagggaatacaagcttacctgcgactatctttttgaccgggaggagggcctgtttttccgggattcccgctattttaccgttccggcggcaaatgggaaaaagatgttctggagccggggcaacggctgggtgattgccggattgcctcttattttgcaggacatgcctgcggactggccttcccgccccttttatgaagacttgcttaaacgtctggcggcagccctgaaaaaatgccagtcgcccgacggttcctggcatgcgaacctgctggatccggacgaacctcccttgaaagagatgagcggtaccctttttatcatgtacgggatgctgtggggagtgaaccagggatatctggatgcggatgaataccttccctccatccgtaaggcctggaaagccgcctgtgatgcggtcagcaaggagggcgcgctgggctgggtgcagcctattgcggacaagccgggccattattccgggaaagatacggaggtgtacggcgcaggggcctacctgatggccgggagtgagttgcgtaaatatgtcattggccgggatcatccgcagaagaagaccgtgaccgttacgaatcccctgggcaggttccgccctgctgagaccgtgtcggttccatggccgtccggaggttccggtgatgccgccggccttcgcgtttttgacgtccgtcacggacgtgttatcccgcatcagctggcggatacggatggtgacggaacaacggatacccttttgttccagagtaatttccggcccggaacggttcgtgatttctggattctggagaattcctgcctgggcgaagcgccttccgcggatgtctgtttcagccgtccggtaccggagcggctggatgatttcgcatgggaaaatgatcttacggcgcaccggatttacggtccggccgtcgccaggcctgcccctgagggagagggcctggtttccagtgggacggatgtatggagcaagcgcgcgggcgctcccgttatcaatgaattttacaaacggggggattaccaccgggatcacggtcggggactggatatgtacaatgtaggtccggggcggggctgcggcggcattgccgtgttcagggatggaaaaccgcatgtgtccggaaactgggccagcgcccggacattgtacaatggcccggtccagaccgcttttgaggtggtttatgcaccgtgggacattggcggcggcgtgcgtgtggcggagatgcggagggtgacgctggatgcgggaaaccgtttctccaaagtctgcagcgtcttgaacgtccggggggctgaaacggtgaaggccggtgtgggaatggataccggaaagcgcagaaatgattgtgaagcagttatggaggaccgggagtccggcggcctgatgaccgcatggagcaggcctcggaaggatgacggatgcctgggaaccgccgtaatcgtgccctgggttccggaaggccgtgcggtggatacggaaggctgtacctacttgctcaggaaggtcgcgaacggagaaccctttgaatggtacatgggggcggtttgggacaaggcttctcccattcggtccgctgccggctgggaagcggaggcgcgccgtgtccgggagtgcatcggccatcctctgcaagtccgggtgcggtaggagccgccgcatcctgttgtttctcgcggagcgcgtggcggcttccttttgctacggctgcggcggtgcgggaatgggctgccattccgccagcgtttccggctggaggggggccggagtttcccgcgcgtccggagaagccagattcaggtcgttcctgacgatttccgaccggatggaagccagggaaagaagggtatggaagatgtggtcgtgggagacggctttcagccggttggctttcagggcgcgcaccatgtccggatagcgtgaggcgaaggcgtccgaataccagatgaacatggcaggccggtaaacaggcggcaggatatggccctggaacatttttccttcctctcccagcgctacgccgtggtcggagcagtaaaaataaatggcgggcctgttcttcaacagtgcaatcatgcggtgaatggaggcatccaggtcgacgatggaattgtcataggcattgacggtttcttccagacgggccttggggtcgtccatattgcaggatgccggggtaaaacgttccgcctgcgcgggatagctgaacgccatatggctcccgttattgtaaatgatataaagctgcctgttgcggccgaagtttttcagggattcctccatgaccagggaagttcgttcctgcatcattccgggcgtctggtgctggagcggcgtctgtctccgttcacggcagttccgtgtcaggatgcccagggaataatcatgaatggaatctccgctcaggtccatgatacggacggtgcggaatccgtgtttgttgaacaggtcaatgaaggaggaatgaccgggagtgcggcggcacagttccgcatccgtaaacatgccgatggcggaaattctggtcacgatgccgaaggaagtggcatgggggaaggaaacgacgttgggctctctggaaagccggggcattgtgttccgatggtaaccgttcaggggaagatggtccccccggacactctcccccatgtggaaaaccacggccaggtcgtctggggcttcgcactgggaaaggggctccgcgcaggacggaaggttccgcaatgtgttgaaacgccccgcatcctgggtgatgtattcgttcgccagtttgcacgtcattgcaatatccacgagaggccagcctttggccttgtcagacgtgtagtaaagataaaggggttccgagctgtaggaggctgccggaatgttcagcagcagaagggccgcgtacaggccccaaatgcatgccagtgcgccccacgtggctttttggcgcagggaacggcggctccagtagatggccaggtagataaacccggccagaagcagggttcctgcaatggaagcgggggtgcagaaggcgcaggcttcctggaaattggtctccgccatgctggaaagcacggaaaggttcaggaccaatccgtaccgcatctgcatcatgtacaggcccgcattgaacagaatgatggcgggaagaaggacataggcggtgaagcggtatttcaggcagagaagaatggtgccgcagagcagggatgcggagcaggcgatgcccatgctgctcatcagcaggctttggccatcgttgagcacatagggattggccgccagcgccgccgcaagcccggctgcccacaggcagcgcatgcggcggggaatgaacgcggcgcgcagagcctggcagacagcggccgacaggccgtatgcggacggataccgttctgcggaaccggcggatgcatggggagggatcatcgcaaaggagggataaagaatgcttcctgcttaaagcgaagaaaaattataagagttttaaaatgaatcgcaagcagaatgttggagaagctttttccagtgtgggccgcctccgtaaaaagggaagggttttcttccatggactgctgcggcaaaaacagaaaaccgcccggaatattccgggcggttcctgggtgccgtggacggcctccggtgctcaaacggagtttatccgataacgaggaatttttcagccttggtgccgcagagggggcacgcatccacgccttccagagatttgaacgtgtctccgcaaaccaggcatatccagtattgcctgggcagggaactggtatctccgctttccagggccttcagggcgacggaataaaaatcggcatgttctttttccgcttccgtggcccacgtgaaggaacggacggcggctttctgcccttcctcttccgccacagcgatgaattccggatacatgctttcaaattcatgggtttccccggcaatggcggctttcaggttttcggcggtggttcctacatggatctggatatcgatgggctccattgttgcccccagcttttccagaaccttgttgtggttggcggcgtggacggattccgccttggaggcggcttcaaacaatttctgaataaggggctgcccttcctgggcggctttggcggcataggccgcgtaagtggcggaggcggtgctttcgcccgtaatggcagctttcaggttttctatggtcttagtcatcggaaataaatttataataattctaaaaagatgcaactgaaaaaatccttcaagggaggaaaaaacgcaaattcctctttctgcggcatcacggggagccgttacacaatgattcattgacgcgtgcatggcgagcctgtacaacggaaacgttatgaagagcattgtaacaattagttcggcatgtgccctggcatttgcaggtatggcttccgcccaggatgccccggctccggcacccgccgctgaaactcctgccgcgcccgttgcgccggccgctgaagtttccaaggaagcgaaggaagccgctgatcagatgctggcgttgatgaaggaaatgtccgccacgctcagcacggtgaaggacaaggccactgcagacgcggctgcggaaaagatggcaaaaatcaatgaaaagggggaagccctttccaagagcgcccagaaggttcaggctgaaatggatgccgccatgcaggcacgccaagccgagcttctgcccattttcatgggcatgatgactgacatgcagcgtttgcagcaggccgacttttacggaagccaggccctgaaggacgccatgaagcagactggcgctgccggtccggaagaagatgtggaagtggaggaagatgtggaggtagaagcagttccggcccccgctcccgcccagaaggaagcgtccgcccccgccgccaagtaactttctttttcaggattgtctctcctccggcattgcgagatgccggaggatttttttatggaagggccatctgaaaaagcctccggggggggtgacgcaggaacctgcggtatgcctggccgaatgggagaggacggtgtccggagtttgccggaacatttgaaggaggctgaaaacaggcaggccgcctccgtttccggtgcggcctgccgggtagtgatgaatgaatggccagacctgttatttggcctttttcttcttggcagcggctttggcgggcttggctgccgtttttgcggccttggcgggtttttccgccgggcattcgttgacggagttccaggaccagtcccatttgtccacgttcatggcgcaggcggtcagaagcgctacggaagcgtccaggtcgtctttgtgagccatttcaataacctggtgcacattgcgggtgggaacggaaatggccccggcaatggaaccgcccggaacgaatttctgcatggctccggcatccgtgcctcccgccggcagcatttccgtctgccatttaattttgttggcgtctgccatggccttcatgaacttgaccatgcggcggtctgcaatgacggaaccgtcatacagcttgatggcggcgcctgcgcccaggtgggaaacctggtcgtgcgccggagttccgggaatgtcacaggcgatggtgacgtccagggcaatggagaaatccggttggatgtccagcgtgccggcctgcgcgcccctcaggcccacttcctcctgaacggtaaaggcggccacgaagttgcaggagggtttcttcctggaagccttgatggcgcggagggcttcaatcagcacgtagcatccggcgcggttgtccagagatttgacgttcacgcaatcccccatttccaccaaatcccgttcacgggtaacggagtcgcctacggaaacgtatttttccacttcctccttgctcatgcccaggtcaatgaagaagtcggtcacttccggcagcttggtgcgttccgccggggacatgacgtggatgggtttcacgcccatgacgccgatgaggtcttttttaccgtggacgatgacgcgctgggccgtcagcgtcttggcgtcaaagccgcccagtggcaggaatttgatgaaccccttgtcgtcgatgtgacggaccatgaacccgatttcatccatgtgggcggcggccatcatggttttttccgtgtttttgccttccacgatggcaatcacgctgcccatgttgtccacgcgcacggcgtccaccagcggggccacttcctggatgatgaaatcgcggattttgtcttcaaaccccggagcgcccggagtcacgcaaacctgacgaagcagttccaaattcataatgccgtcaatgtaatggttttcatgaaggttggctagcccataatgcggcctccggaaggaggcgccgcaggaccccgtctgccgtgcttaacggcgttcccgcgtaatgacggcctccggctgtgcgggggctccattgtccggtcttttgtaattgacgccgcgggcgtccaggaagggaagctggcggtcgaggcgtttacggaaatctttctcattttttagctcctgcggggtccaggcaacttccgccagcgccagggcgcgggggaagacatggtattcccatttcggcaggttcgggatatattccgtccagatgttcgcctggcagcccagcacctgcttttcccgttcccggggcgttccctgaggaaccggttccagtccgtaaacatgctgccaggtcagctgattgttgttaatcgtctcgtattcgggggcagcgggttttccgggcccctggtcatagtcaaagtacaggtggcttttgggcgtcatcacaatatcgttgccttgagccagagcttgtgcggcgatgtgcggcattttgctgcgccagaccatcatggtagcggtgggggaaaggcccccttcctggatttcatcccagccaatgagcctttttccgcggttattgatcattttttccacgcggcggatgaagtagctctggagctcgtgttcattggccaggccgttgtccttcatgacccgctgggccgtgggggactgtttccactggttcttgggcgcttcatcccctccgatgtggatgtaggggctgtccgggaacagggcgcatatttcatcaatgacgtcttccagaaaacggaaggttttttccgtgggggagaaggtataggagtgcacgccccaggtttcctgcaccctgggcgcatagcccgggatgtccgtattcccaagttccggatatgcggcgatggctgcggaggcatggcccggcatttccacttccggaatgacggtaatgccccggtctctggcgtaccgcaccacatcccggatttcatccgcagtgtaatggccggagtaggggatgccgtctcccttattgcggttgccgatgacgggggattgagcccgggcgcctcccacggttgtcagcctggggtacttggcgattgggagacgccacccctggtcgtccgtcagatgccagtgcagggtgttgaatttgtaccgttccatcaggtccagcacttttttgatgtcccgcacgggcatcatgtggcggcagctgtctaccatcaggccccgccatgaaaagcggggctggtcttttacgtccatccggggcagggccggagctccgtttttgtcggcagcgatgctttgaacgagggattgaagggcatacagggctccgttcacggaaccggaagcaatggagatggaatccggcgttacggcaaggcggtagccttccctgcccagggaagcgtcttccgtaaagatgatgtccgcgttgtttttaaccagggccgtgttgatcccgttgtcgcggaaaatccgttccgcctgcctggaaagaggatttttttccgggagcctgacgccgtttttcagggaaaacccgctttctccggtttggacgcgcatggcggcgggcaggggaatgatatggggcgcttcgagaaccggagcggatggggcgccccagcaaagggaaaacaggctgaaaaccgtggcggaaaaggtacacttggaaatcatagcgtacgtaaatacgcggcattttccgggaaaattccgtttcgaggttatttttgcaaatgcagagaaaaccggcacatgaaaatagcggttgttccgtccgggcgcctgtgagagtattcccgcgctatgaatggagccgcttccccccgcatcaggaagacgatggtatttgtgctgctggcgctttttctgggccagttcggaagcggtgtgtatgatctcgttttcagcaattttctgcgtgatgcccagcatcttgacgtggagatgcgcgggctgattgaattcccccgggaattgcccggcatcctgtctctttttgtggtcagcctgcttttcatgtttaatgaggtccgcgtggccggggtggcgtgcctgctgatgttcggcggcatgtacgcgctggctttctgcggcgccggaaccagcctgtgcaccctgtccgcatggattctgacggtgagcctgggccagcatatcctgatgggcatgattgataccattgtcattcatacggcaaggccggaaaaccgcagcctgcggcttggccagatgaaggctctgggaacggctgccgcgctgctgggggcgctgtgcgtgtggatcaagtggaaattcaaccagtcttttgccgtggactttttcgtcacggggggcgtgtgcctgctggcgttcctgttcctgagccgggtgaagacgcccgtcttcccgcagcggcgcggctggaggcaatgtttcgtcttcaagcgcaggtatgccgtttattatgggttggaaattctgcacggcatccgcaagcagctttatctgacctttggtttctggctgatggtcagcacgctgggccagcctcccggatatatcggaaaaaccctgctcatggccggtgtcatcggactggttactcaaccccttatcggctggagcatcaagcgctacggggaacggaaggtgacgattttcgacagcgtggcgctgtccctcctgtgtctggcatacgccttcgcgccggagctgctgcccctgcattgggccgtgggggtagtgaccgcctgctttgtcctggacaacctgctgttcgccctgggtatggcccggagcacctacgtggcccgcatctgcgagaagccggaagacattacgccaagcatttacaccgggctggccatcaatcatgtggcttctatcgcttacggagtgctgggcggcgtgatctggatgaatacgggcggcccgcaagcggtgttcctgataggcggcgtggctaccgccggggccgggctggtggcgcggcgcatggacaggccgcagccttgacagggtatctaacgcacgggtttgcccgcaccttttttaaaggcatccatgatcttgctgaagatggccgtattttcataaatgccggtgaaagcaccgcttcccgcgccgaaagcgtacaccggaacagccacgccgtcatgactgccggaaccgaaccgggccgttatttcccccttttcccggctgccgcccgtgagcgcgaatgcccccgtattatggtctgccgtgatgacgaccagggtgccggggtgtttggcggcccagtcaagcacggctcccgcagtccggtcaaaatcaaggagttcttccatcatttcttccaggttgctgctgtgggctgccttgtcgatgttgaatccttcaatcatcaggaaaaatccgtcgggattccgggaaagggtgtccagggctttcagtgcggcttggcggaaaacgtctccccgcttggagggcgggggaagattccccggagcggtgacggccagcgtttttccgggaggcaaggcgccggcttcttcccaggtgcgggcgacgcggtatccctgcgcctgcatttcctggaagatatccctgccgtccggcctctgcgtgaagtatttgccgccgccgccaaagatgaaatcggcacgggaacgggggtaatccccaatgatgccgtaggcatctgatcttttttcattattggcgcagaaagatgccggggtggcgtcattcagctcgcaggtggcgatgacgccggtggatttgcccatgtccgccgccttgtccaccagggaatccagcctgttgcccttggggcatacggcgactcgatggtaaagcgtcttggttcccgtcgccatggcggtgcccgcagcggcggagtccgtgaccagcttgtccgcgcaccatgttttggaaatgcccgtaaccgggcagttttcaataaataagcgtcctctgttggctgcccatgcggcggaaaggtggtggatgcccatgccgtctccaatcatcaggattacgttggtgacgggaaggctgcggtcaggttccgggatttccgccaccggataggggcgttccagaatgaagcgctggttttccgccgccggaagcagggacggagcaagaaggagggcaaatgctaaaaggcgcagcggagaagtcatgcaatcactttcccgtctgcggcggaacaagtaaagaggaaaaaatatgccggtcccgtatggaaccggcatgaaccgttcaaaagggcttatttggcgtccgcctgtttttgcaggatgtcccggatctgttccaggaggacgacgtcatccggcttgggagcaggggcggccggagcttcttcgctcttgcgcctcagggctccgatcagcttgatggctacaaagacggagaaggcgataatgaggaagtcaatggtcgcctgaagcaattccccgtattttaattccacatcgcccagcttcagcaccaggtatgccaggttgaccccggaagtaaggtagccgatgatgggggtgatgatgctggagacgaagacggagacgattttgttgaatgcgccgccgatgacgacggccaccgccaggtcaataacgttccctttaagggcgaatgccttgaattcttccagaaagcctttgaggttgaaaaaatgagccatagtggattattgctggttgcggcggttattctgccgttaaaatgataaaagaaaagaaaaatgaatgggcggcggacaaagatgtgactgtcttccggggtaaaatgcggcaatcatgacgtggttcccaaaaaaatcatttacagacggggccagaagagcaaactacgcccatattaccttaacttatgaacacagaagaaaagctcaaccagtacgtactccattcctatggccgttatcccatggctgccgtccgcggagaaggctcccgactgtgggacagcacggggaagtgctatctggacttctgtgccggcattgcgacctgcgtgctcgggcactgccatcctgcggtgacgcaggccctgcaaaagcaggccgccaccctggtgcactgctccaacctgtaccagatcccccagcaggcggatctggcggaattcatcgtgaccaaatgcgtggagcgcccgggaaaagtctttttcgccaacagcggtgcggagtccaatgacggtttaatcaaagtagcgcgccgttacgggcaccgcaagccccagccggacggcaagccccgttatgaggtgcttacgttcaacaaatccttccacgggaggacgctgggcagcatgtccgccacggggcaggataaaatcaaaatcggctttgaccccatgctgccgggattccgccatttgcctttcaacgatctggaaacggcccgcgaagccatcaggccggaaacggtggccttcatgctggaaaccgtccagggagaaggaggggtcaactgcgtgactccggaatttctgcggggcctggcgcagttatgcagggagcatgatcttcttctgctgatggatgaagtgcagtgcggctttggccgctgcggcgacatcatgggatggcgcgccgtagctccggatgtggaaccggacggcatttcctgggccaaggctctgggcggcggtttccccatcggcggcttctggatttccgaccgcgccattgacggccagggtacggagctttcctccatcatggatcccggctcccatggctccacgtatggaggcaacccgctcggcactgcggtaggcctggccgtgctgcgggaagttgtttcccaggggctcccggagcgggcgcggcgcctgggcgcggaaattcgcagggaaatagaatcctggaacctgcctgttgttcagggcgtgcgtggcctgggcctgttgctgggcattggcctgaacccggaaatggtggctgcgccggagggcaagacgatcgcctccgtagtggtggaggccctgcggcaggaagggttgctttccgttcccgccgggccggaaaccgtccgtctgctgccgccgctgaatgtcagtgaagaggaaatccagcaggctctggccatcatcaggcgcgtgcttaaaacgtacgccaaatagaatacagcccttatttgctttattgttatgaaggaagaagccattaaagcccccggcagcacgataaagcaatattccatcatgctccagaaccgggtgggggccctgaccgccctcctcggcctgctggacatgcacggcattttctgtctgggattcagcatgcaggactgccatgaggcgactattgcgcgcctgattgtcagcgatccggaaaggacgtcggaaatttttctggagaaaggtatttgctatacggagtccggggtgctggtggcggtgctccgccatggccccgcagacctcaaaaaatgcctggatgcgctgtatgccgcggaaatgaacgtcaactttctctatcccctgctgccttgcgtggggcgggggtctctggtggctcttcacgtggaggatctcaacttcgggcgcaccgtgctgaattccagcggcatcaaagtcctgttccagcagggcctcagccggtaggaacagccgtttcccccttcttctccgctgccctgttcaggagcgttttctccaagcgcctcaaggggttgccctgttttttcgccttgacgggaggggaaaacatggtatggtacgggccgcatggcaaaagtacccgtaatcaatcttcgcaagggacacgcggtcaattacaacaatgacgtttgcgttgtagtcagcatggagcacaagtgccccccccgcatggcttcctatgtgcaaatgagcatccgcagcatttccactaaaaaggtgtataaccttcgcctgacttccaatgaatccctggaaggcgtcaacctcgcccgtgaggaatatgagttcagctacattgacggcatgggttatcacttcatgaatccggatacatacgaagacatcaccgtgtctccggaaatcgtggaacccgtcaaggattatctgatggaaggcaatatctacatcctgcttttcacggatgaaacggtcgtttccgtagaactccccgccgccatcaccatggaagtggcggaagctcctgaaggcgtcaagggcgacagcgcgaacaatgtttacaaatccgccacgatgaccaccggactggtggtgcaggtgccccttttcatcaagcccggtgaaaagatttccgtaaagacggaagacggttcctatctgggccgcgtaaactgagttgcccctctttctgttctttgaagagccccgtccggtttgtccggatggggcttttttcatgccgcaatgcctgacctttttcctgtttccggaagagggcggttacttttccgcgcggtatggaatggttcctttatggggggaatcctttttctggtaaatgcgaacgtagtctatttcatatttctggggcagcggcagtttgtccagatctccgccggtggcgcccagggccaggttcaggatgatgaagtgaggctgccggaagggattggcgacttccttgtaagaggcgttgacggtattatccaggggagtccggttcagcagaatatcgtccgcatacaggcgcacttccttttcatcccagtccatacggaagacatggaagctgtccgcccagtccgcgtgtttttcctggagccatttgagcggcgtgtaagtggtactccatttggccacgtcctttttgggggagccccagcagagattggccagataggtggactggtagtactccatgatgtctatttccccgcacatgggccacttttccttgacgcccaaggtccagaaagcaggccacatgccttcccgcgggctgaatctggcccggatttcaaaccgcccgtacagccaggaaaatttgccgcgcgtcgtcagggaggcagaggtgtattccgcctctttccgtgccgtctgccagttttttccctccggatcgtaatgggggttggcatgtttttccttcctgccctcaataatcagcatgccgtctttgcaataggcgttttccggctggtaccattgcgcttccttgttgcggacgaaaccgtgttcgtaattccatttggcagggtccggacggccgtctttgtcgaattcgtcgcgccagacgagttcataatcggaataatccgctttttccacgactctctccgtttttttgacgccgtcaccatggagggtgtaaagctgggcgtggaggggggtggacaacaaggctgcgctggccaggatgttgaatagaggaggaatgttcatggaagaaagtaaaggtgtttgttactggtacggggccgcaggcgtttttttgtcattttttatcagagggggctgaagccgcgaaagcggcttgaggaacggaataaatgtgttaggttcggctaacagtatggggtcttgtctggatccggaacatcaaacattccgttttaatgacaatggaagaaaagaactatcttgtttccggtatgcattgcgccgggtgtgccgccaaggtggagcgcgccgtggaaggattggagggggtggagcgcgtagagctgaatttgctgacggggaagatgaccgtcttgtttgaaaaacctgattcccctgccatggagcggatagctccggtggtggagaaagccggcttccgcctggcggactggaaggaggagccgcttgccggaacggagagggaggaaaggctggaacaggaggaaacgggcggctcccgcctcgtttggtccattctgctgctggttcctttgatgtatttgtccatgggccccatgtggaactggcccgtcccggaagggagttgggggctctggatgaattggtggacacaaggcattctggcgggcgccgtcctgtggctgaaccggcattatttgataaacggcgtgcggcagcttgtggcgctgtctcccaatatggattccctgattgccatcggttccggctccgcttttctgtatgggctgtatttgctggtagcggggatgtggcagggtttcagtgtggagggaatggagctgtattttgaatctgcagccatgatcgtcaccctgatttccctggggaaataccttgaacgccgctcttatcggaaaacgaatgccgccgtaaaagggctggtgaagctggttccccaggaggcgctggtatggcatgacggcgcggagcgcgccgttccgctggatgaaattcgttccggggacctggtggtggtgaaaaccgggcagcggattccggtggacggcatgattgaagaggggcaggcggctctggatgaatcggacctgacgggggaaagcatgccggtggacagggcggcgggggacagggtgatcagcggaacgttcaaccgggccgggtatctcaaaatccgcgcggaacgcgtgggcggggattccacgctggcccgcatgatccgcctggtggaacaggccagccagtccaaggcgcccattgcgcggctggcggactgggtatgctatttctttgtccctgcggtcattgccgttgccctggtatcgctggttgggtggatggctgccggggaggggttttccttcgccctcgccagggcaattgcggtgctggtgatttcctgtccctgtgtcctggggctcgctacgcctatcgccattatggtggggacgggcaggggcgcgcggctgggcatcctgtgcaagtccgccggagctctggaagccctgagccgcgtggataccgttgtttttgacaagacgggcaccctgacggaaggggagccgcgggtagtggccgtgctgccggaggaaggcatggatgcggacgcgctggtggaaatggcggcagctttggaacagggttcggaacatcctgtgggaaaggctgtttatgaacacgccaggcttctgaatttgcctgtccgcgccgtggcggatttatccgtggttcctggccgcggcattgccggaacggtggatggggtgccttatgcggtgggcaattccggattcatgcaggataagggaatttcctggaaggaggatgaaagccgcctgcgggagttcatgcggcagggcgcgtccccgctgtatgtgggcaggggcggatgccctgccggcgtcatcatggtggcggattccctgaaaccggacagccgtgcggcggtggacagtttgaagcggatgaacctgcgcgtcgtcatgctgacgggggacaacgccgccacggcgcggcacatggccggagaactccacattgacgaggtggtctccgacgtgcttccggatgaaaaggcctcccatgtgatgaagatggaggaacgcggggacaaggtggcgatggtaggggacggcgtgaacgacgccccggctctggcctgcgcccgggtgggcatttccatgaagtccggaacggagctggcgatggaatcctccgacatcgtgctgatgaaaagcaaccccgcaggcgtggcggaagctgtccagctgggccgcaccacgctgctcatcatcaggcagaatcttttctgggctttcttttacaacatcatcggcattccgttggccgccgggtgtttatatcccgccttcggccttacgctgaatcccatgattgccgccggggcgatgagtttgagttccctgtgcgtcgtattcaattccctgaggctgcgggggttcaccccacgcctggggcgcctggggaaatagggcggcctctcccccaccggcgtttcccgttcaggagggctgcagcagggcctgggccagcgtgcgtgcgtggtctccgccgccgcccagcatgcggaccagttcatccacccgttcttcatggctcacctcccgcaggcaggagatggtgcggttgcccgcggatgctttctgaaccaggtaatgatgggaggccagggccgccacctgcgggaagtgcgtgatggagatcacctggtgcctgtttccgagctgctgcatcttgaatcccacagcccgcgccacttctccgcccacgttggcgtctatttcgtcaaataccagcaggggggtggcatccttgtgggccagggcgcttttaatcgccagcatgatgcgcgccagttccccgctggaggcaatcagacggagaggcttggagggttctccgggattggggccaaacaggaatcccaccgtttccattccctgtgagcccggttcctgaaggggggagaggctcacttcaaagacggcctggcggaatcccagctcccgggagtgcctgacgatggaagccgccagcctgggcgcggagtcctggcgcgctctggtcagagcctgcccggcggcgtccatctgcttgcgcaggacggcgatgcaggccctcagctcttccaggcgttccgtgcggtgttcaatgcggtccaggcggctggccgcctcctccctccgggagcagacgtcctcaaaggaggggccgtatttcattttcagagattccagcaggttgatgcgttcctccagctggaaaagttcccgggggtcgcagtccagttcggcggaataatccgccaggcgtccctcaatttccttgagttccaaattcactcccgccaatggagccagccacgcggcggtggaggcgtccatgcgttccagctcatgggccgcccgtgtcaattccctcaattgggtccccaggccgggcacatccgtttcctccagcatggaaagcattttggagacctgttcccggagccgggtgccgttgcgggcgcgctgccagcgttcttccagcgtgagcacttcttccggagtgaaggcggcggaatctatttcatccacctggtggcgcagcagttctatttcccgtgcggtggccgcttccgcatgttccaggtcatcataggcccggcgcgcatcctgccattgcctccaggcgtccgaataggcgtgcaccaggggagcgtgctccccgaaggcgtccagcagggaaagctgcctttcctgggagaccagggagcggtggtcgctggggccgtgcatgtccaccaggcaggctcccgcttccctcagcagattcagggtgcacgggctgtcgttcaggaactggcggttggccgtggaagagatgaggcgcttgataatcaggttgccgtcttcgcagggcgggacgccatgctcgttcagaatggcgtgcacgggggaggattccggcagatggaacacagcttccacgctgcattgctgttccccggagcggatgagcgtcttgtccgcccgttctcccagcgccaggcgtatggctccaataatgacggatttccccgccccggtttcccccgtgatgcagatgaatccggaactgggttcccagagcagctgatccacaagggccaggtttttaattttcagcaatgtaagcattcgggctttggattttgaatgcattatggcatcatttgccctaaacgcaatcatgacctctgtgatgaacattctctttttgggcacaggaacgtccaccggagtgccgcagataggctgctcctgcgcggtctgcacgtccccggaccccagaaacaggcggttgcgttcttcaatttatgtggaggccgctggcacccgcctcctgctggattcttccccggatttgcggcagcaggccctgcgggaaaatatcacggatgtggatgccgttctttatacgcatgcccatgtgcaccacgtgggaggttttgacgatttgcgcgccttctgctggcgccgatccggcggcctgcccatgtatgcttctcccatgacggtggacgccctgcggaccatgtacggctgggcgttcgttcctaaaccggggcggagcgggtacgtcaggccggagcctcacgaggtgacggctccgttccgtgtggggaacgtgctggcgacgccccttccggtgctccatgccggggtggagacatatgcctatctcctggaagcggaaggccggagcctggtttacatgccggatgtgaaaagcatcccgtccccgtccctggagaggatgaaaggagtggatttgctgattattgacggattgcgttatcatctgcaccccacgcacatgtgcctggaggaaacgttggccgccattgccgccgtccggccccgccgcgccgtgctgacccacctgtcccatgatatggattacgggattctttccggcaagctgccggagaacgtcatgcccgcgtatgacgggctgaggctgtccctgccgtaatgctcacgctgcatgttctcaggccatgactattccagacaattttgaccgtcccggcgcgcggataccgtgcgaaaccagaaacgtattcggcttttccgtagccgtcagttccgtggaagagatgtccgctgcgctggcggaacgcgcgctggaggcggaagctccgtttctggtggccgcggcggatgcccatgtggtaaccctcggcgtgcatgaccgggattacgggaacgtgctggaacggatggacgtgatttgcccggacggtatgccggtagtgtggagactgaaccgggggctttcttccggggaaagggaagcgtgccgcgtgagcgggccggatttgatggaagcgctggtgcgttcgaatgtgcagtatccgggcttgcgccattttttgctgggcggggatgagaagctgctggaagccctgtctggggcattaaaggaaaaataccccggttttcaactggccggggcgtattcccctccgttccgcccttggacggaggaagatctggaaaacatgcgggaggcggttgcttcaagcggggccaatgtggtatgggtggggttgggctgtccgaaacaggagcggtggatggcggagcagagggaattgctgccccccgcggtttatgtgggcgtaggggcggcgttcgctttccatgccggtacggtgaaacgggctccgcgatggatgcagaagaacggtctggaatggttgtaccgcatttaccgggagccgggaagactgctcaggcggtacgtgaagcacaacagcctgttcgtgtggtacgtgctgacgggcagatagggcctttttccggtgtgcgtcccggagtagagccgcgggttattttatccttgtgccgttttcgtgcggccctatcatgattccgtttgaacctggacggaaatggtgggcgctcttccctccttcgtctttaaccttgtttttcttatgttctttcgccgtattccccggaaaagctggtatgaaaaaactgtggaacgcgttttcagggacaggaagctgtgcgtggaaaagctgctctccttcggtttcgttcgtgtggaaagcggttttctgcgcagggcggcattgctggacggccagctctgcatggaattggaaatacacgcggatggttctgttcatgcaacggtgcatgatgcggacgggaagaagatccggcatgctgacccgggaacggaagacaggttgcggacaagaatgctccgcagggaatatgaggaagaactgtggcatgtggcggaatgctgctttgaacctgattttttcaaggcggctcccgcccggagcctcatcgcgcacatccgtaaagcttacggggaggaactggaattcctgtggaggaagtttccggggaacgcagtggtgcggcggaaggatacggaaaaatggtacgccgcttttctggctgtgccgcgcttgaagctggggggcagttccaaggaacgggtggaggttttgaacctgcgggtttgtcccggtgagtccgggattcttgcggataatcgcagccgttttccggcctaccatatgaataagaaaaactgggtgagcttctgtctggatggaaccgttccctttgaggaactggctgcgcgcctggaaaccagccggaggcttgccggaaagtgagctcctccggcgcgggagtgccgggagaaaccgtcttcccgcccccggatggacggccggaaagggggtcttgacccggaaagaggcggagcctacagtaagggcatgaacatagaagaaaaagctctgtccaccttccgcacggcgccctggcgccacaactgcgcccaggccgtctgcgcggccctgggcagggaggatttgctggaaaccgtttcctcctgcggtaccggaaaggctccagacggactgtgcggcgccctttacggggcgctgctgtgtacgcccgtgcagtccagggaggagctgaggcggcggtttgtggaaaagctgggctattcccattgcagggaattgaaaaaagagggggccgtgccatgccgggattgcgttgcctctgcggcggttctggcttttaacctgagggagtgaacgcagaatgacactgccggattcatggtttttcatgaaaaaagagtctattggaatgaaaccagatagaataacatcatgaaaaaattgatctatatgatagcggcagcggccgttgcgattccggtggtggccctggcccagggagcctgcggcagcggctcctgctccaagggagacaaggacatggctgaagccaaagagcacatgaaagagggcgccaaggctgccaaggacgccgcctccgaaaaaatgaaggaaggcaggcaggctgccagggacgcctatgaaaagggcaaggaaaccgccagggatgcttatcaggacagcagggacgccgttgaccatgcggcggacagggctgccgataaggccgaagccgtcggtgacgctgtgaaaaacggttaactcaaacgatgaacaataaaaatatttgcttattatgtgcgaatccaaggatcatatgaataagggctgcggatgtgcgaacgatgccgcttccggcaaaatggaggaaggcaagcacaagatgaaagacgcctgcgaaagaggcaaggaagccgtcaaggacatggctgaaagcgtgagcgacaaggccaaatccatcatggacaaggataaggattcttagtcccggcggcggttgaagcaagccgtttcccattcttcctcccgtgcgcgggatgacctccccttgtccggatttccggacgaggggatttttatgcgggccggttttccggggaaggggtgtcctgttccacgggctggagggcatgcaggctgattttatgccttttgcataattcctccacccggtcgcgttccagcaagatggttttgcccgcttccagggcgatttgcctgacgccgcattccgcgcacgtttcaatggtgacggggccgactgtcgggatgtcaaagcgcatgtcatgccccaggcgggccactttggccagcgtggccggtttgccgttgcccagttcccctccgcggcgtatgcagttgttggtgccttcaatcgcttccacggcgatgacggtgccgccgtgcacgatgacggactgcccgatgtggagacggctgatttccttggccgtctgcatgccgaagcgggcatcctcccattgttcaggcgtgggaggaggtccggcgatatgccccggctgcggcatgtgctcctccatgtaggtggaggccgggaggatggtgaagccttccttttccgcttccgtgatgacggccccaagcagggagtccgcatttttttccggcatgcgcatcaatacggaaagggcgcgaaggtccggacggagggaaagaatgttcttcggattgatgccgccggccatgatgacgttccttacgccgtgctttttcaggaaagtgaacggcttgcttatctggcccacgctgaattcctggtaagcgtcgcacagggggatgacggcggggttggtttcccccttgaaccctacggccacgatacgcaattccggcgtccggcggcgtgcgccccggacaatatattccggataaacgccgtctccggctaccaggcctaatacgggcgggtctgttgtcatgcggcgtgaagctggggaacggggctggttacaggtattccgggcgctggagcaattccgccacgcgcttgagcaggcggccgatgtccgctccgtccaccacgcggtggtctcccgtagccacgatgttggccttggagatgggaataaatgcctccacttcgtcactccagaccggggttttggtgacggcccccacccccaggataatggattcgctgggcatgggcatgggcgcggcaaaggtgaggccgaagccgccgaagttggtgaccgtggcgatgccgcccgtgctgtcttccggagccagcctgcggcggcgcgcctgggcaatcagcctgttatagtcttccagcagttcttccatcgtccgttcgttcacgcggcgcagcacgggaaccatgacgccgtccgccacctgggcggcgatgccgatgtcgattgttttgggagaaagaatgttttcccccaccaggtagccggcgcattccgggctttccgccagggccagggccagggcgcgggcaaagtacagggtgatgccgggccgcagcggggaattttgcctgtgcttgatgaggggctccatgaatacgggacgcccggcggaggccagcgggcgcgtccagctgcggcgcatggcgtccgccacggccagccgcatggatgaggccttgcggtgcggccattggctgacatattccaggaattcttccaggtcgtcaatggtgacgcgtccgcccgccccggaaccggagatgaaagcgatgtcggaggcgctcatgcccaattcatccatgcgcgccttcatccggggggacatgtagtgcgcgcccttcatgccggcgggtacggggaggccgcgcacgctgggctggactttcaggtccgttccgttttcctgataggattcccccgtcaccccgaagtggacgcctgcgggtttttcctcccggggaggggcggagggcgcggcctggggaacggattccggactggctggaagggacggctgggtggaatctccggccggagtcgctccggaacgctcaatttcctcttccgtggcctcaatcatggccatgcaggcgccgaccacgacggattccccttccttgatgaacacatcgctcaggatgccgccgcacatggtggtgactcccatggtggccttgttggtttctacctcaaagatttcctggtcggcttctacggtatcgccctgggccgccagcaggcgcagcacagtggcttccgcaatggaatccccgagctggggcatcagaatgggtactttaggcatgatggaaactgggttgaatcaaatggatagaagatggcggatggaggcggcaatggattccagcgtggggcggtgcgccttccagaggttggggtgctgggggatgggggtatcccgtgcgttgagcctctggggcggggcatccagcaggtggaagccttccgcgacaatgcgtgaaacaacttccgccgtgacgcctccccacggaaaatcttccccgacgaccaggacgcggccggtgcgcgctacggaggcgataacggtatccatgtccagcgggcgcaccgtccgaagatccacgacctccacttcatagccgctttccttctcaagcaggtccgccgcgcgcacggcttccggcaccatggcgctgtacgccaccacggtggcatgcttccccgtgcgggcgatccgggccgtgccgaacgggatgaccggggcctcccggtagttgtcctccgccttcagccagcggtacaggaacttgtgctccagaaaaatgacgggatccggaatttccacggcctggcgcagcatccagtaagcatccgctaccgtggccggagtcatgacgtgcaggcccggataatgggcgaacaaagcttccaggctctggctgtggaaagggccggtgccgggggttcccccgcagggcaggcgcaccgtgatgttggcgggaatgcccgtgcggtagtaatgggtggccgccatgttgacaatctggttgaaagcgatcgtgctgaagtcagcaaactggacttccataatgggcttcttgcccatgacggcggccccggtcaccatgccggccatggcgtcctcactgatgggggcgtcaatcacccggtccgggaacagctccttgaggcccttggtcgctttgaatgcgccgccgaaaacgcctatgtcctgcccgtacagaaagacgtccctgtcttccgtaagcaggtctttctgggcgtcgtggatggcatcaatgtatgttacgctcatgggaatattccgtttgctggcttaataaggtctccataccgtggcgttccagtcttcccggaaggggtccggttccggttcccgctgcgcggtggctacggccagctggacttcatcggcatactgttttttcaaagccgccgtttcttccggcgtgagccagccggctgccagcagctgccgttccgcgactgccacggggtcttttttttcatattcctctttcagctccctggggatgtaggaggcgtcgtcatgttccccgtgcccgcacatgcggagggtcttggcaagcacccactgggggccccggccttccctcgcgttattgacggcggtccggaaggtttccagcgtggccatgaagtccgtgccgtccgtttcatgcacggtgaagccgtagccgcggcccctgtccgccagggaggcttctccgaattccctgatattgggggtggagtaggcaaattgattattggttaccacgagcaccagaggcagccgctccacgttcgccatattggcggcttcgtgaaaagcacccgtggacgtggtgccgtcgccgcagaaagctactcccacggggccgggcagtttgccgtccaggcgcttggcgaaaaggcagccgatgacgaaagccaccgtgctgcccagatggctgatgggagccatatagccttccgctggcaggccccggtggacattgccgtcccgccctttcatatatcccagggcggaacccaggtaggcgcgtgccgcttcaataatcggttccccccaggtgacgcgtgccgcctgttcccggatgaacggggcgattacatcgtagccggcagtcagaaagacgcctccgcatgcggcaatcgcttcatgtccgcggcccaggtaaacgccccccgtaattttgcccgctttgtaaaggctggaaattttggtgtcaaaagcccgcgccagcaacatggccttgaaagccctgacggcattttcctttaagtccggttgtgtagtgtcgcaatgtgccaccccattattttatatgctgcataaggaaatgcaatgccatttcatgaaactgcctgagactttgtgtccgcaggcgcggggccgctccgcagggcggcggaggttcgcggggggcggttcccggctggcgggagcgcttttgcatcttccgctcccgccggcggatgcgcggaaatttccggattcatttcccacccggcggcaggctgcatctcagttcgaatttgggatttgccacatcgtaatctccgggaaacaattccgtctccataatgattttatcatattcctgcgcaaaaaggtccggaaaaacgccgggcgcctccgcaatgccgctttcctgcctgatgacgcagagaaaggaggcggcgggcaggcgcatgatttccttcatccgccgggcgtctctgccggccgcttccacctccacatacaggaactgctccgtccctgctttccggtggaaggaaagcaggccggcttccgcgcccagccgcagctggcagcggttaatatcgtcaaagatgcgggtgataagaatgttaaattccggagtatgctgttttcccgcatagggcgccacccagcagtatttttccggcaatgcgtggatggcctgttccccatgaagcagaagatcttcttcccggcccatctgtttccggaatttttccagcaggcgcagcttttcctgaatatccctgattttccggtgtgccagcatggtgccgtgggagaaaagtttcttataatggatccttcgctggtccctggtcaggaagccggtaaattccttcaggggaatatccaggaaaatgcaggcgcggatggcatccaccacgggaatctgggaaagagtgtagtaacggtagccggtgtccgggtccgtataggccgggagcaaaatgcccagttgttcataataccggagggatttgacatgtacgccggtctgtttggacagattgccgatggttagtaaattctgtttgtccattctgtattgcggttggtgggagggaattgattgtttccgccggaagagccccggcggaaacgggagctgcgcgcagaagaaacctttctgaagacgaagttatttccgtcatttataggagttttattgtcaataatttacaataaatgacaaagaccttccccacttaatttttccattgcctcttgactctcccattatgggatactttacatcatatggcaattgaaaaatccccggtcttgccggaagtgcggttccggggtttcttgaggttccaaacagcatgattcctgatgaaaataattaatcttttattctgcatgcccctgctggtggtttgcttctcctgccagcgggagggtgaaagccaggcagccggattgcccggcgaaaccgtgccggaagtgtctgtcatgacggtacgcagtactcaggttcccgtaaccgccaatcttcccggccgtatggaagcgtatctccaggcggaagtgcgcgcccgcgtgacggggattattcaggaacgctgctatcaggaagggcagacggtccggccgggcgatcttctttttaaaatagacccggctccgcttcaggctgtcctggatgaatgcaaggctgcagtggctcgtgccagggccgttctgtcggatgcggaggacaaggccgcccggtattcctccctggtcgccaagggcgccgtcagcatacgtgagcataagcaggccagggcggaggaagagcgggccagggcggaatatgccgctgcggccgcctctctggagcaggcgcgcctgaatctggaatatacccgggtggaggcgcccatctccggccgcgtgcgccgtgccctggtgacggaaggggcgtttgccaaccagaatgaattcacccacctgaccaccattgaacagattgaccccatttatgtccgcttcagccagccggcctcccagtacagcagcctgcgccgcgccgtcgtatccggattgtggaagggagtgccgctgggcgaaatcaaggtgcgcctgctgctctccaatggggaggaatacccccattccggcaggatcattttttccgacatggcggtggacccgaatacggatactattgaaatgcgggccctgttccccaacccggatcatgaactgctgcccggcgcttatgtgcgcgtggtatttgacagggcggtgcgggataacgtcttcgccattccccgggatgccgtcatccgcaccgcgcagggagcttccgtctttgtcgtgggcccggaaggcgtgctggaagcgcgccccgtcagggcggatacgctgaacggccgggaatggctggtttcagaaggcctccgggatggggacagggttgccgtcagccacacgatgtccctccgtcccggcatgaaagtccgcagcgccgccgcccggccgcaaccccatgcccagcaataaaccgccatgcctgatttcttcatacgccgccccatttttgcctgggtagtcgcactcctgatttccctgatgggccttctggccattcccagcctgcccattgcccagtatccggacatcgctcccccggtcatcaccctgcgcaccacatatccgggggcttccgcccgggatacggaggaagccgttaccgccgtcattgaaaaggaaatcaacggagcgcccggcctgatgtacatgtccgccaccagcagctccgacggagccgtggaaatagccgctacgttcacgcagggcacggatccggatattgccgccgtagaagtgcagaacaggctgaaaatcgtggaatcccgcctgccggaatccgtccggagagaaggcgtgttcgtggaaaaatcatccaacaatattcaggcgatgatctccctctcttctacaggcagcctgaatgatacggagctgggggaatgggcttccgcccgcatcatcccggaactgaagcgtgtgaaaggcgtcgggcgcgtggagcttttcggtgcggagacatccatgcgcatctggccggacccggaaaaactggaggctctgggcctgacccccacggatattgtcaatgccgtggctgcccagagcgagcgcatcattatcggggacatcgggggggcggccgttcccgaatccgcccccatcaacgccggcgtggtggcggaggacgctttccgtacgccggaggaattcgcctccattgcgttgaggacgctttcagacggttcctccgtcaaactgggggacgtggcgagggtggagctgggcgccaacagctacgcgttcttttcccgctgcaacggccagacggccaccggaatggccatcaagatggctcccggctccaatgccgtggaaaccatgggcctcctcaaggccaagatggatgaactgtccagggatttcccgcccggagtctcctaccagattccctatgaaaccacccacttcgtggaaatctccatccggaaagtcatttcaaccctgctggaagccgtcctgctggtgttcctggtcatgttcctgttcctccagaacttccgggccaccctgattcccacgctcgtcgtccccgtagccctgctgggaacctttgccgtgatgtggctctccgggttctccatcaacatgcttaccatgttcggcatggtgctcagcatcggcattctggtggatgacgccatcgtggtggtggaaaatgtggaacgcatcatgatggaagaaggcctggatgcccggcgcgctacggtgaaagccatgaagcagatcggcggggccatcgtgggcatcaccgccgtgctcgtggcggttttcgtgcccatggcctttttcagcggagcggtggggaacatttaccggcagtttgccgtaacgctcattgtgtccatctccttctccgcgtttctggccctttccctgactccggcgctgtgcgccgccatgctgaaaccctcctccgtggagcaccaggagaaaaagggttttttcggatggttcaaccggacgatacaccggtgcactgaccggtacggccgtgccgtatccggaatgatccgccgccctgtgcgctccctgttcctgtatgccctcattattgcaggggccggctatttgtaccttacgctgcccacctccttccttccggaagaagaccagggtaacttcatggcaatggtgtccctccctgccggcacccttcagaaggaaaccagcgtgcggttgcgggaagtggaggattacctgatgcggcatgagccggtggagcacgtttactccgtgggagggttcagcttcatgggttccggaaccaacatggccatgctgtttgtcggtctgaaaaactgggacgagcgtcccggagaaaacagttctgtccaggcgattattgaccgtgtcaatgcccgctttgccggagacggccagatgatggtcatggccctgaacatgccggccctgccggagctgggcaattcgtccggattcgacttccggctccaggacaagggcggcctgggatatgcccgcatggcggaagcccgggacgagctcctggcccgtgccaacgcggaccccaatctggcgggcgtttatttctccggccaggcggatacgccgcgtctgcacgtctccattgaccgggaaaaagccttttccatgggagttcccattgcggagatcagcaattctctggcggtcatgttcgggtccagctacgtgggggatttcatgcatgacagccaggtgcgccgcatcatggtgcaggcggacggaaaaagccgcctgaacggaaacgacattgaggacctgcatgtccgcaatgaccaggggaagcttctgcccctttcctcctttgtcaggctggactggacggcggggcctccgcagctcacgcgctacaataactatccctccttcaccatcaacggctcttccgcgcccggcaagagcagcggagacgccatgaacgccctggaacggattaccgcctccctgccgcagggcgtggggtttgaatggacggggcaatcctatgaagaaaagctggccgggccccaggccacgctgcttttcggcctttccatcctgattgtctttctggtgctggcggccctgtatgaaagctggtccattccgttggccgttattctggtcgtgcccctgggactgcttggagccctgctggccgtcttcctgcgcgacatgcccaatgacatttacttcaaagtgggcctgattacgaccatcggcctttccgccaagaatgccattctgattgtggaagtggccagggaattttaccgggagggcatgaatgcggcggaagctgccgtcgccgccgccaaactgcgcctgcggcccatcctgatgacctccctggcgttcggggcgggcgtcattcctctggcgttcgcccatggggcggcggccggagcgcagcgcgccgtgggcaccggcgtgctgggcggcatcattacggccacgctgctggccatcttcctggtgcccctcttcttccgcctgacggccggaaagagggggccggatcatctggaaggaatctgaggcaggattcccgctgcggaaaatttttcgtgaacgccgccgaagcgggttgccggagcgcgattatttttcctgtggcaaaagccgcggaaaagagaattattgacaggcgcatttcgaatccgctgtcaatcctattattttagtaggaaatatattttttcaatgccgacatggaaaccgcatggtttgcataaatggaaatatattgatgataaaatagttgtatttctttctcatagttctccggatatcgactgccgctgttctccgggggggatgacgtgtgcctgccgtttccggcaggatctattttggaataagcgggatattttctaaagctttctctgtcaaaacgccatttaaacagcggattcgaaatccgttatttagcggcttctccaatattaacgattcttattaaaagatatgagacttactcttccatggccgttgcgccgttttctgctgggggctcttctgtgttccgtaacgatggcgaccgccgcttccggggcggaattcgtggtggacgccgcccaggcaacagacccgtccgggaatgtgtaccgcacgcttgacgaattggcctcttccggggcgctgtcttccggggataccgttatcctgtgcaatgatgattcttctctgacctcagccctgaaggtagctgtccatttctgttccaatgatccggcactgtcccgcaccatcagcggctcctcaagttctttgtacagatttaacagaatgcccatcaggcccggctcccagacaagtcccgatatatcgggagtacttgatgaaaatggagctgccattctgaaaatggattctatcattctgaatggaatgtcgataatgacattggatccattttctccctgtgtaaaaataacgggcaacgtccagtttgagaattccctagcacatgccatctcctcctccagagttgacttggacggagccgtctcgatggcgttggaaggccgctttgttttcttaaataataaccatgctctccatgttgtagacagaacaaacttggtgataggagacaacgctctgttccggggaaattatggcaacagggtgcatgagggaggtgcgattatgagttacgggggacatgttatcataggagatcatgcggtattcgacaggaattatgtttccaacgtggagggttctttgggtggtgtattttatgattgcgtttttgcaggtgcaataactgtaggagcggatgccgtttttatcggtaactttactttcagtaccgacggaaatgctcttgggggcgcgatggcggttaggaaggatggagtgcaatatgcagcagaaacaggggcaataaccatagggcccaatcccagtttcatcaataattttgcttactccggaagggctgatgcttatggcggtgtgatttacagtgatggggacatttctttcagcgacggagtcacgtttatcaacaattatgccaaaacttccgggggagccattacgatgggtgggaaatgcgacctgctcgctctgacgaaggacgcgcttttcagcggcaacatgaccggaggcgtcttcacccgccatgaggacggcaccttctccgtggaaaacggcgtggccaatgccattgacatgaacggttctttgttttcttcactttatacgcccaatctgacgcttgccgcggaagaggggcgtgaaatccgcttcaacgacccgattaccagccggaacgaagaccccggccgccctatgaccctcacgctcaaccgctacacggacggggaggggaatgttcgcgacacggatggaacgatcgtcttcagcggcgaactctaccagggagaagatacgcatcttgccgccagccggtacaacagcttcctcgcggatgccaccctctatggcggcgccctcctgctggaacacgatgttgtcttcggcaggaatcctgaggaaataacggataaacgatacaactcctccctgacggtggaaaaaggcgtgctggaaatcaccggaggaagcaaggccaacgcctccagcttcaccctctccggccctggcgccgtcctgcgccccggggagagcgccttcatcaacacccacaacgccgacctttcccacggcttcaccttcgatatgcgccaccagctccaggccgggccggtcttcggcccgggcctgatgctctccgccctggactcctttacggccggggggtacatcggcgtggcggacacgggagccaacgccccccggttctacgcggaccgctcctggaagcaggaccgcgtcttccacgtgctgacggatgtgcagcacatccatgagggagactttgacggggccgtctcccaggccactggaacggcccgggtggatgacccctacgcctacacgggaacctggagccaccggtggacggacgcggacggcgacggctacgccgaacagctccagctggtctggaaagcggacggaacccccatcagccgcgttgacccggaactggccggggaactggccgtcaactccctctggagctcggcgtccaacgcggcggccctgggcggcaatgtcctctcccgtctgagcgtgccgcgcctgaccgacaggcatgcccgcaacctgtggggcatggggctgggcgacttcgcccggcagcgcagccggggaggcgtggacggctacgactacaacggaggcggctactccgtgggggcggacagcggcatgggaggggaggacgagggcatctgggggatcgccttcgggcagctctacggccatgccagaagccgggacttccaggggcgcaacacgcaggacacccggatgggctccctgtactggggtcgcctgatggaagaaagcaacagggcgtactggatcttcaagggaagcctcacgtgggcggaaacgcgcaacaacatgaccagccgcctgagcggggcgccggcctccaggggcaaatggaacaacgagacgtggctggcgcaggcggaagtgtcccggacggcggactgtgcgggagggtggaggctgacgccgttcgtgaggatggaattcacgcacggccgtcaggacgccttccgggaactgggagggtatggccgtgacttcggaggggcggcgctgaaacgcctgtccattcccgtgggcctggaaataggcaggacggacgaatggaaggggaggccgtgggcgcagtcgctgcgcgtgtcctatgtgggggacgtgctgagggacgtgccggaagcggcggtgtacagcccgtacagcgacatgggctggagaggaagggcggtgagcccggaacggcacggcctgcgcgcggagtacaacacgttcctgcagtgcaatgagcgctggagcgtgtacgggggctacgggctggaagtgaggggaagctcctgctaccaccgcgtgaacgcaggggtgtcccggagtttctaaaagaaagcttcaggaaacggaatgaaaaataatgatatgattattcgatgaatctgcgcaaaaaactggcatttgccgtcatggccctggccattccttcatcatgggcggatatcccggaatcctccgtatcctccgcggccgtctttgccgttaaaaaagcctggcccagggccggcttcattgaatgggagctcagcggatcaggaaaactttatgaagctgaattcaacatcaacggttttgaatttgacgtcaaagttgaccctgaaggaaagatactccgggtcaaggaggaaatagcggtatcggcccttccggggccggtccgcgcggccgctctgaaaccatatccgggcggcagaatcaaagaagcggaaaaagtgacggaaggaggcgtcatccgttacaaggtggaagtggtggatcatctggatgattacgatgtcctgctgaccccggagggcgatattctttacgtggaccattaaacggcttgaaccgtctacagccggaaacgggcgccgccctgtcaggtaaaaaccctggcagggcggcgttcttccttttcggaatatccagtcgtcccgcggggctggatgatgcccgtttttccattgccccccggcgcggcgcatgcgctcaagcggaggtgagggccaggaggcccggactgttccggattgagcgtcccggggatgtttcctccgccgtacggcgcgggattattccctgccgcgggcgttcaggaaaatgaacacgtaatacaacagcatggccagggaggaaagcgctcctaccacgtaagtcatggcggcccagaacagggcgctcttggcccttccatggtcgaaatagttcatcaggtgggagcggtccagccatttcagggccctggcggaggcgtcaaatcccacgggaagcgtgatgaacgcgaaggctgtggtcacggcaaacaggccgatgcccagccccagcacccacggagagccgcccatggccagcagcacaatgccgatcatcagcacaatgcccaccagattggaggagagctggacgatgggaaccagcgcggaccgcaagcccagccagtggtaagcctgggcgtgctgcacggcatgccctacttcatgggcggcgacggcagcggcggcaatgctgttggaattgtaaacggactcgctcaggttgacggttttgtccgccggattgtaatggtccgtcagatggccgggcgtggaaatcaccttcacgtccgtaatatggttgtccttcagcatctgctccgccacctgcctccctgttacgggaatgggaatctgggaatattcgctgaagcggctcttcatgcgcgcgctgaccagccagctcagaagcatggagcccagcagaatcaaccagtaaatggtataggaatgcgttggagcggtttccgccgtctgtaccgtataagaaaggagatcgatattgaataactcaatcattgcaaatttgaccttatatcatcaggctttgttgaatccagagggcgccgtgtcagcctccgggggagtcccccggcttctgtcatacggaaatgtgcggaaaaacggagaattcaatcatccgttttttgggagaggagcttgccgtccggcgaataataaagctccactttgcgcacggcgggggattcggaccggcagtccacccggtacttcaggactccccgggcggtaatctgcctggcgcggcggagggcataccccgggaaatcgcgggcgatggccgccgtaacgggggctggaagatgctggagggaaatatccgccttaaccaggctgacagtgccgtcgggatacaatttcacctcgtattccagtccattgaggtggaattcggcttcatagacatcttcgtcattgtcgaaatcccattcaatggcgcctgcgttcggatactgcttctgtacctgctctttcacaggggcgggaacgcgggaggccgggatatccgccagggcgggcaaagtgaatgccgcggcaagagtagctgtaaggatgcgtgaaatattcataaatacggaataattgtatttattaaaaaaacaagaatcttttgcggatgttttgtgacaatttagccatcaatgaaatgaatccgggcatggcggggtttcttgtcgccaaaaagcggatggtggagttgaatggcggcatgcaacagggtattgtctatttgcttggagcggggcccggcgaccccggcctgataaccgtccgcgggcgggaactggtgggaatggcggaagtgctggtatatgatgcgctgagttcggcggaaatgctgaactgggctcctgctgcatgcgaaaggatttttgtgggcaagcgggcttcccgccacgccctgccgcaggaggaaatcaatgccctgctggtcaggctgggccgtgccgggaaaaaagtggtgcgcctgaaagggggcgacccctacgtcttcgggcgcgggggggaggaggcggacgccctgcatgaagcgggcatcccttttgaagttgttccgggcgttacttccgccattgcggggcctgcctacgcaggcattcccgtgacgcaccgcgggtactgcacgcagtttaccgtatttacgggccatgaaggcgagaacaagaaggcgtcttccctggatttgaggggaatagccgaggcgcagggcacgaaagtcatgctgatgggaatgcggaaactggcggatgtatgcgaagccctgatcgggtacgggcaggaaccgtctgtgcctgccgccgccgtccagtgggccaccacgggcattcagcgcacggttacgggaactgtgaaaacactgcccgccagggtgcagaaggccgggttgggcgctcccgcagtagttgtcatcggggatgtggtgaaagaacgcgagtccctgaactggtttgaaaaactgcccctgttcggcaagcgcatcgtggtgacgcgcactcgtgcccaggccggggaattgagcgcgcgcctgcgccgcctgggtgcggaagtgctggagatgcctgtcatacgcattgccccgccctccaacaggagggaatttgcggaaagcgtggtgcatgcccacacatatgactggctggtgttttccagccccaacggggtggaacgcttcttccaggcgttttttgccgtgtacagggacatccggagcattggaggagccaggattgcggccatcgggccagggacggaggcgaagctccgggaatacgggctggccgtggatgtcatgcctaaaaaatttgtggcggagggcctcgttaaagcgttcagggacgcacgcgaagaaataggaaccattgaacacagcacattcctgtgggtgcgcggagaagaagcgcgccgcgtgatttacgacgggttgaatgcgctgggcgccattgtggacgaatgcatcgcctacaaaacggaagcggaaacggaggatgtggcgggagtccaggcggctttccgcgaatgcggagcggacgtcgtgacgttcaccagttcctccacggcggagaactttttcaagctggggcttccgtggccggagggatgcagggccgccagcatcggcccggtaaccacggcaaccctcaaggagctggggcatgccccttcaattacagcgaaaacacacgatatcaacggtctggtggaagccatcgtcaaggccgccggcaaatagggaaaacggcgcggacggcgtgaaacgccgggccgggcagatgggaaatacaaggcggggaacgccgtttaaaagccattgacggcttcccagccgatgactttcccgtcttcaaacaggacattgcaggagacgggcgggcggctgcccaggggcatcgtgacgcctatcccggtgcctatgccggaatccctgccccggaatcctcctccgcccaggcccagggaccagcccgtgccgctccgcgtgtaaatccaccgttccgtattcttcccgttcatcctgcccgccattttctgttcgggttccccccatgccagcagaaccgccatgggagacattcctttttccagctccccgcgcgccactttggcctgatgctccttcgggagctgttcataagccggcatattcttcgcaatgcggtcggacggtgcaggggagcaggctgccagcagcacgaggcaggaaggaagaagaacgaaagaaaaaccggttttcatcatcccgtaaatagcacggcggcggatggcaggcaaggtggcagagcggcttttcggaaaaatggagatgagggaatccgttattttgacataaaagtgcgcttttcccgtaaatacataattggttattgacaagcatggggggtaggggagtaggaattcagctccaaatgcaacgccccctttcccgtgcgggcagcgtcgcttttattgttcagcacttttttccgagccgccgatatgtccaaaacgttaattatagcagaaaagccgagcgtcgccactgatttggcgagagtgctcggcaaagagcttggaaaattcacccgggacaagtccggggcattttaccagaatgaccgggccatcatcacctctgccgtaggtcatctgctggaacagaaaaaacccatgacggaagaaggaaagtccctgccgtggaaattcgactatctgcccgtcatccccaggaagtttgaactggaacctatcaagcagtcggaagaccgtttgaaaaaggttcttcagcttgccaggagcaaggacgtcacggaaatcgtcaacgcatgcgatgccgggcgtgaaggggaactgatctttcacaatctggtgcgttacggaaaatggaccaagcctacgcggcgcttatggatgcagtccatgacggatgaggccatcctcaacgcatggcatggcatgcgcagcgaagctgacatgaagcccctgacgaatgccgccgtctgccgttccgaatcagactggctggtggggctgaacagcacccgcgccctgactatcctgcaatcccgcggcggcttcaacgtcacccccgccgggcgcgtgcagacacccacgctggctattctgacgcagagggaattggaaatccaggcgtttgaaccggagccctattcggaagtatgggccgaattcgacgttcagtccggctcttactccggccgctggattgactgtgactggaagaaaaacgatcatccccactcccgcgcggagcgcatctgggatccggaacaggcggccgtcatccgcgaccgttgccgcggcaaagccggcacggtgacggaagaaaagaaaccggtcacgacggtcgccccgctgttgtatgacctgacttcccttcagcgggaagccgccaaccgctacggtttttccgccaagcgcacgctgcagctggcccaggaatgctatgaaaagcataaggtgctcacttatccgcgtacggactcccgctacctgccggaagattatctgggcaaggtttacggcatcgtaggcacggtggcggagcagaacccggaattcgccccctttgccagggacattttggacaacaagcgcatcaagcccaaccggcgcgtgtttgatacaaaaaaggtgagcgaccactttgccatcatcccgaccgggaagatggagaagcttaccggggacgcgcagaaactctttgaaatggtcatggcccgtttcctggccgtcttcttccccgctgccgtgtttgaagacacgcggagaaccacgctcattacccaccaggacggcgtgacggacgctttcctgaccacgggccgggtgcttgtggagccgggctggcaggccgtttacggacggaaggccggcacttcctccaaggaggagctggtgcccgtccgcgacggggagcaggccgccttgcgtgagattgaaatccgcaacgccatgaccaagccgcccgcccggtacaacgaagccacgctgctggccgccatggagggggcaggaaaactggtgcatgacgaagaactggccgccgccatgagcgaacgtggcctgggcactcccgccacccgcgcctccatcattgaagggctgatttcccaggaatacatcgtccgggacggccgcgaacttctggcgacgcgccgcgggattgaactgattgccctgctggaacgcatcggcctgaaaacgctcacctcccccagcctgaccggggaatgggaatacaagctcaagcagatggaacaggccgccctgccgagggattccttcatggagggcattaagaccctgaccggggaaatcgtgaagagggtgaaggatttccgggaagcccagcagcaggtggaactgccggaaatggaattggactgcccttcctgccatgcccacggcctgaaaaacacgctggacgccgtttcctgccgttcctgcaagttcagcatccgcaaagttatctccggccgcgacatggcggatgaagaattgaagacccttattgtggacggcaggacgggaattctccacggatttacctcccggttcggcaagccctttgaggcggggctggaactcaacgacaaattccgggccacgctttacttcccggcgcgggaggaagatgaagccgcaggggtggaggaagccgtgaaagtggcttccgtcgccattccggacatgggagagcatgatgtgatggaaacggccaaggcctggaaaattccttccctgacccttggaaaggaacatgccgccgtctccgtttcccggactatcctgggacgtgaaatcccgctggaccaggtattgaagattttggcggaaggaaaatccgatctgatgaaggggttcatttcgcagcgtaccaagcgtccgtttgacgcttatctggtcttcaatgcaaagacggggaaaataggttttgaattcccgccgcgggaaaggaaatatcccgctaaaaacgctgccggaaaaacggaaggcaaggcggagaagacgggccggaacgccgccaaaactgccgggaaagactccaaatccgggggggctgccaaaaaggggcgcaagcaataacggcagcggaaacattccgccgggaacgaagattgggaaaagagccgggaaaaagcttcttcccggctgttcccgtatgttagcttgaaagcgcacccctggattcctgacgatgaaatgccttttatttgctgcgctggcgtggtgcggcgcggtttgtgcgccggcggaggaatatgcctttccgggggaacgggaatggatttccaaatttggagatgtggtgaagggcagtttccattcctgcacaggggccggggcagttctgaaaatagggcgaaggcatgtggaaattccgttaacccgtctggatgaggaagacgctgcgcttgcggcttctctgacgggagcggaggcgcgccggaacctgaaactggccgcgatgctttggcctttcctgatgaaggaactgcagaaggtgacgtggacgccggcagaaaagaatatctcgccccggtatcatgaaatggcccggaagaagaatgccggagctttaacgggaaccagaaaagtggatggactagtttgtgccacatcgctttccatcattcaggggcctccgttccgtatccgggaatacttccgtccgcaggcgcgtccggaaagcggcagggggcagaagaatttcgatgtggttctggagcaggggagccgctgcgcttattatgatatggataagggtgttcttattccctccaaatgcctgtctgaggaacggacggaaatgcgcgctcccgtttcctctctgcttcctccggcagaacagcttgccgcgagagaatcaaaaaattacaggaatgcggattactccctgcttgtggaaaaccgccccgtcaagggagcctatgaaacgtgcaagcccaattctctgggaagaaaaaagctggtcatgtactggaatacggagggtgaaatggtttgcggcgtcatgaagctggactacgacaacatgcgcgtggccgcgttattcgatggacggcggaagctgatgaacgcccctgggcttggatatgccgtgattctttcccggctggataaaaaaggcaggggcttgaaggagaaaggccgttactaccatgtggcgctggctgcagacggcctgcccgtgtattatcatgagggcccggaagatgaggccgccatgaacccgctgctttacgggaaactacgcgattccgagaaaaaggcggctctggcggaggagaaaagacgtgaacagacattccgggccaggcgggaagcccggcggcgcctggtggaatccgccaggaagcgtaatacctgaaaatagttcctgtcttttcgcgacgggtatccttcttttctggagagcgttcgtgaatgttcttctcaggagcgctgccctggcgtatttccggattttccagtctttcagaaaggctgattatttattcctgccggggaatttttcagaactatccgaaataattaaaaaacgctgttgttatccgttatctgagagttccacggtgcggaacaaatccatcacacggattcggctggctctttttccagcggtttgtgatcttctatcaatcttttgatatctttccttgtttttttatctctcgattttcctagctttctgtaaatatcggtcatgtcaaagtagattaatttttcctgaccctgatcatttctaatagaaataatctgaatatatttgccatcatgcatggtatatatgtaccctagtatgccatatccctcatagtgtttcctgatatattccttctgagattccctgatatcgtctgttttcttgattcctgtaagaataataggattgatgattgaattttccctgtcaattttctgactgccgggaattacatcctccgaaccggcggcattattaatgcaaaaacaggggaagcaggctatcgacaaaaaggcaattttcagtaatggtttcatatcagtttatttattaatcagttttatttatttatgttgtcattgcagccgacgcaggtgcagcctgcttcgttgcagttgccgcattgcaaaccgcattcttctgtcaaacgcagccgggccattgcgatgactgtgctttctccttctgcatatgcctcggctttgccctctttttcatcatctgtaccggttactaccggggtaattgtctttcgcagcggtattggcccccctgtctcacccgtgtgatgaacacttgtatacttacaggatatatagactgtgtaagtgcgtttggcgttggctaccctgactggctctatgtttaaattttttaattcgtattcacattttaattcctttgcattcccataattgcaaataacaaaggtcaaaatgcccaataactgcaatatctttttcatcctaaaattatgggacaattttgatatatgtaaacatatttttaatatgttttacataattattgcttgatagatagttacaaaaatatctaacaaaataatgattatccgggaaagaccccggggaggatgaggcgctgaataggagtgtccggcgttccaacggagaaacaacgccttcgcatctcgggagaagttgaaaatgcccggattggctttaattccgcccgaaggcgtggattttaccgggggcatgccgccatgctgcggcgttcagcaaaggcacagttgagctgcgggccctttatatttatccgccatacgggataaaatgggagattctggtatgccgaggggccgggattccactaaaatgccatgtttctggcatgaggaggctgttttctctggagcctttcagtttgagttcctgctggttttccatgaacatggtgccggattgttccctcaatgcttccatatggcgggtaagaagctgctggcttcgatggttcgcatctgagcatcctgtgaaagcgcttcatggttttcaagtttccctgttgatgttgagtctcccgcagtctttttcgctccatccggagaggatggaaccggtgaatcggattcaggtcaaataacctgttccggggtggttcaggaggcatcaaaagctttcagcactatttcttattcccggtccgtgtcccggattttgatgttgatgaagattgttcccggacgggtgttatttgccgtcttttacggccgtgtacattagccgtatcaatggaggcggatcctgctttccgcgagccggagatgcgctgaattcccggtgttcagccaatgcatattttcagggaaagaagtgattcctgttctttcctgaaacatttcctgccttctttatgccggaagcggcaaaggggcgtgcggcatatgcggcagtattatcttcctgcctggaggcagcggtagtaataatccacgcgggaaatgaaccagctccatttgtacccggggcgcccattagtcatcagcggggcggggcaattcttgccggaccagtagttgtgaggcactacgttgcgcagggggacgttgtagcgcatcatcagcagcgccgccagcttggccgtcttgttgtagatgacgacagggttatgcgtggtgcattcacacatttcaatggctacggagtattggtctcccgatccggaatggtccgcatggtggccggtttccgtagtggggatgtgctggtaggcgccgaattggtccacagtaaagtgccagttcagactgcgggatttgccgctgttcaggtaacgggagtgggcattggcgtctcctttggggttggcggtgctgtggatggtgatgaagcgggggcgcatggaggatgcgcgcttgcgggcatacgtgtttttgggcatgtaggaaactttaatgcctacttcacggcccatctggccgggtgtgcggggaactaccggcgccttttgaattttaaaggagacggccggcggcctcattttgtcgttctgcgaacagctgcagaacgtcagggcggcgaatacggcaaaaaagcccgtccagacaaatctatattccatgcgtttgttctaggaacagcctggaaggattgcaagaagaatttggaattagttcggatgaactaatcaggccgtgccgtgaagttgcaggtatatctggtgcggatgaggcggacgggccgcgccttcgggaggaaggggcccgtccgcgaggggaagccgtaccgggaacgcccggcacatatcccgttatctgaggatttgggtaaggacatattgcaggatgccgcccgccagatagtattctttttcaataggcgtatcaatgcggacgatgacaggcacgtcaaatgcttccgcatccgcgggctgtacgcgcagggtgacctgctggcgcggagcgatgccgttgttcaggcccaggatggagaaggtggcgtccttcaacggagtgatgcggtcataatccgccttgtcggcgaagttgaggggcaggacgcccatgccgataaggttggagcggtggatacgctcaaaactcttggtgatgacggctttgacgcccagcaaattcgtgcccttggccgcccagtcgcgggaagaacccatgccgtagtcttctccgccgatgacgatgagcggaacgccgtcctgagcgtaggccatggccgcatcatagatgaaggcgggcgttcccgcggcagggattatttccttgtccggggcgggaacggcgcggttgccgaaatacagcgtgtaaccgccttccgtgccgtttaccatcaggtttttaatgcggacattggcgaaggtgccgcgggtcatcacgcggtcgtttccgcggcgggagccgaaggagttgaaatcttttctgtccactcccatgccctgcaggtacagccctgcgggccctgtttcccggatggctccggcaggggagatgtggtccgtggttacggaatcgccgaaaatgcccagggggcgggcatccgtgatatccgccagtgtgcggggctggccgttgaagccgctgaagaaaggagggtcctgaatgtaggtggattgttcattccactggaagacagagccttccggcgcgtatacggccgcccagcggggattcttgtccggcgtgatggtgtaaagctcccggtatgcttccgggttgcgggatttggcaacggcttccgcaatttccccggagctgggccagatgtccttcagaaatacggggttcccgctgcggtccgtgcccagcggttccgtctggaagtcgatgtccacgcggccggctagcgcaaaggcgacgaccaggggaggggacatcaggaagttggtcttgatggaggcatggatgcgggcttcaaagttgcggttgccggacaggacggaagccgctacaatgtcattgtcccggacggcctgttccagttccggatttaacggcccggagttgccgatgcaggtggtgcagccgtagccgacggtttcaaagcccagagcgtccagggattcctggaggctgttggttgcaaagtaatcggaggcaatacgggaacccggagcaatggacgttttcacgtgcggaggcacgttcagcccccgttcaaccgcttttttggcgagcagcccagcggcaagcatcagccccgggttggacgtgttggtgcaggaggtgatggcggcgatgaggatgctgccgtctttcagcttcacttcctggctgaagccgtccactggaacggggacgcccgccggggagtgcatggaaaccgtgacctccggagattccttcttgccgtaacctccttccgccacgggcatgctgacaagcttgcggaagctgtccctgatggagttcaggcgaatgtgttcctgcgggcgtctggggccggagacggctggttccacggcagacaggtccagttccagctggtccgtgtagtccagatctccgttgcggggcattccccacaggttctgtgccttgaagtagttttcgtacgtagtgatggcttcttcgctcctgcctgtctggcgcagatagtcggagcagcgttcatccatggggaagaagcccatggtggcgccgtattccggggccatgtttgctacggtagcccggtctgccagaggcagggccgccgccccgtctccgaagaattccacaaatttgcctacgacgccgtggctgcgtagcatctgggtgacatgcagcgccaggtccgtggcggtcactccttcgcggagttctcccgtcatatggacgcccactacttccggcaccaggaacgtgacgggctggccgagcatcccggcttccgcctcaatgccgccaacaccccagcccacaacgcctatgccgttaatcatcgtggtatgggaatccgttcccaccagggtatccgggaagtaaacgccatccttttccatcacgccctgcgccaggtattccagattgacctggtggacaatgcccacggacggaggaaccacggaaaaagtctgaaaggcctgctggccccatttgaggaattcgtagcgttccgcattgcgctggaattcaatgtccaggttcttttccagagcatccgtgcatcctgcccagtccacctggacggagtagtccaccaccaggtccacggggaccagaggttcaatgacggaggcgtcttttcccaatcctgctacggcggagcgcatggccgccaggtccaccagaagagggacgcctgtcaggtcctgcaggacaatgcgggctaccgtaaacggaatttcataggaaccgggattgttggcattccaggaggctaggttgtccacgtccttttcagtcactttcaggccgtcgcaattgcggagcagggattccagaacgatccggatggaaacgggaaggcggttcaggcggggatagccgttttccgccaaggctggcagtgaataaaactgtcccggggttccggctcccgtgatgaacgtactcttggcaatcttggtcatgatgcggaatagagggttaactgtaaacaggcggctgccctcctggcagtcgcgggtactatacaggccaaatgtgataaggcaaggactctgtgtgacggagggcggattttcccccccttccggagccggggaaatttttctctgaaccggggctgccgctttttccggcattttttctccatgcacgccgcaggaatcatggagtgcgtcatggaacattgaaaatgagttcgcagtattgtccaaccctgtgaaaggtttcaagatgatgaacgcaaaaaacatcttatcaatcatagcgggagcgttggcgctggctgcctgttctggcccgcaggaagagaatttgcgcatagttcccctgaccgtgcctgcaaccgtacccatgacctcctacggaccgcacgcgagggtggtcgtagcaggaattgattatacggaggtgcacgacgaatggatgaatcccgatatcatgaaaaaggccaccccgggcaatacgcgcgtggtgatcagccgcggacgccaaaggggccagttgatggtgggggatgaggtagccatggattttcccgtttgcgtgggtaaggcttcccaccgcacgcccgtgggccatttccgcattacggaaaaggcagtgcatcatgtttccaatttgtatgatgcctccatgccttacttcatgcggctgacggacagcggcattgggatgcacgtaggccctgttttccagacgccgcagtcccatgggtgcattcgcatgacccgttcttcctgcgtgccgcttttcaaaaccgttaaggtaggcacgcccgttacgattgtacagtaatgcccggaaaatttccgggcgcttttccggaagaaaaattccccgcgtttttaaaaaactcatttttttaaacaaaaaaacgccgcccgccgctattttgataaacggcatgtagataaacggtacttgccgcaagtcgcattgcctcagcaacccgaaccctccatgccgctgccgactgtatcgtattcattcatcggcagcggcatggagggaagccgtctgcttgaccgcagaacttggggaatgaacgggctgcccgtatttcgtgaagaggacatggtgcttgttctcccggggccgcatttgttcctccgtgttgtaaaagattaatggagaagaaggattggcctcccctgctttttctccggattatttttccgcagctttcctgtctgttccttcccggtgcagcaggggaaggtattttccataaccctgtgcttccatgtcctgttcaggaatgaatttcagggaggcgctgttgatgcagtagcgcagtccgccctgttccttcgggccgtctgtgaaaacgtggcccaggtgggcgtctcccgttttgctgcggacttccgtgcgcctcatgccgtgggagaaatcctgtttttcctgaatcagttcttctttgatggggcgggagaagctgggccagccgcagcctgaatcaaacttgtctgtggacaggaataaaggttcgcctgtcgtgacgtccacataaatgccaggtctgtcgttattgaaatattcattgcggaagggaggttccgtcgcattattccgcgtgacggcaaattgctcgcgtgtcaggacgcggcgcagctcttcgtccgattttttccggtaaacaggttcgttttcgcgggcctgggacgcttcccggaatttggcgggtggaatatggcagtatccgccagggtttttatccagatagcgctgatgatatttttccgcccgtgaaaattggcggaggggctgaacttcaattgccagaggctgcctgaagtgctgctggagccttttcagggacgtttctataacaggtttgtccttctcatccgcgtaatagatgcccgtgcggtattgaattcccctgtcgtttccctgtttgttgacggaaacaggatcaataatggagtaataccgttccagaagaaagggcagactgagttcttccgggtcaaatactacttttaccgtttccgcatggcccgttttcccgctgcatacttcttcatacgtgggagaagccgtggagccgttggcatatcccgcttccgtttccttaacgccgggcatcagggagaagtacttttccactccccagaaacagcctcccgccaggtaaatcgtttttaaatccttgttgtccatatgaggtttgtcattactgcttgactggcctttttccccgcaggaaaaaaaggagagcatggcgactgcggccaaaatggcgcatgccagtccggccagtgtccatgatccgtggtaaatacgcttcataaacgctgtatggagtcgccttccggtgcgggagcagcggctccctgggccggggaactgctgtcccccggcttttccggaaaggtaaatgattagacaacagcgggttcattccgttcgatacctgtgtccatatttccttatttttcccgtttttccatcttcatcctgtttttcagccactggtaaatagcccggtcggaggcatccggttttctgcttgtctgcatgctgaatccgtatttggttcggaagttgaaaacggccagagaagggctcaggccgatggaaagcccctccatccgtatttccacctcttgcgggacatggctggagaagtcgaggcgtccggcattggtgacggtttccacatagtgtttcaggaaaggctggatgctggccaggaaggagggttccagagccatgcggcagcgttccggggaagaattttccctgacaagaatggcggaaggagctgcgatggcgtgggcgggccttaacgtattcagcggaacattccataaaaaggaaaacagccccgtgcccaggagaaaaagaaggacggccagagcgccaagccatttgacccgtttgtttactgatcgatgacagggccggccttcgttcatggagagaagcatggcataatattccatggtgatccatgaaagaatttgccaggaagcagatgggaattcccgtccccgcatgagggaatttttgtactataacatgaaaagcatgaaaaaaaacgctggaaatcatgtatagtatcattaaatattaatgtagtgtatgagaaaagatcccatttttctttccatttttttatttttcctttttctgacaatctccgtaaataaatccctcgcggaaaaatatccttcgctggatgttccggaagacattttgctccacgtgaaagaagctgcttcttcccagtccccctattccggcaatcattccgtaaagcaggctgtggacggctctatggaatccgccaactggcatgttcccggagtgcatcatgtggagggggaatttgtgtttgaagtgccggagaccattcattacatcattttttccggagccaatttcaatgaaattgccgtgtccgccatgtccggctcgtcttggaaggaccttggaaaattcgatatcggcggctccaggatgatcagatttaaaaagcctcttcaaaaggttcggaaaatcaggttgacggttgattatcccgaaggttcctctccgtcttttaccgtacgggaaatcagcttttacaaaagggtggagtccgcacttaaccggaaattgctgaaagtatttaaggacacgagctgctcctccatcaatcccaggtgtaccctgacggacctcaaggctcttccggagtttttacagatgattgcgaagaaaataaaatccggcgattatgaagacaaagaattccgcattgcttcctataaggcttacagccatccggagtttgctgcgaaggtgagaaatatcaacgccctgaacaaatttgacaatcctaccggaatagtcgcggagaaaggagatgaaattcttgtgttcgtaggacctacccatggagaagatattgggctggcctccgtttctccagcgggaatagagtcttcctcctatcctttgaacgaaggggtaaacaaaattagaatcaaccgttcgggattgctttacgtgatgtatcacaccgatatcagcacgcccaagaagccgataacggtgcatattcctgtgggaagcggcatagtgaatggatattttgacgtgacgaggcacacggataaggactggaagcgtatgatcagcaacgccccgcatagcatgttcgatatcgttgggcggaattccatgatgattcttcacacaaagtacctgaaagattacagtccggattccattacgaaatccgtcagggtatgggatgaaagcgtcaaggccatgtggaaaatcatgggatttgacaagtatccccagccgcacaataaccggcagcttggcgtttccgtagaaggaggagcccatatgtttgcaacctggtattactgcggctacagtattggagatcaaggaaatacgctgaaaaatgaagtgctcgcgcctggagttcttcagggaaaccgcctttggggaatcgggcatgaaatcggtcattgctaccagcatccgttcaactggcgcagcatgtcggaaagttccaacaatttttttgcccagctgattctggatcaggtgaccaatgccattaatggcaatgagcaggcctccgatatggaaaacccgtgcaaatacctgctttcagaagcggtaaagggcatgccgttccatgatttgaacggctgggccaaatggggttttgctcaatattccttctatctgtatttccataagctgggaatcaatcccgaattttatcctaggctgtttgaatcattgcggcgcaagccgctttccaggcaggcgtatgaggtttccgaagcccatttggccttgtatgaacgcatttgcaatatcagcaggacggactttaccgatgactttgaaatttttaattggtttgtcccgattgaccgcaaggggcatcaatatggggattacagttttaaaatgacagaggaaatggcccgggcatccaaggcccgcattgccgccaaacggtaccccaaaccgaaattccgcattgccttcctgcatcagcatggaaagacggtcaatttgtgggggcagaatctgcatgggtcccagctcaacggctattggatcaaatacaagcagaacgcaaaactcagcccgtctgtaagcgcctccaaaaaggataacatgattattgtgcggaatggggaaaatgcagccgctttctgtgtagtgaccaatggaaaggtggtaggttattatgaccgtcagaagtttgacgtttccggcgtggaatggaatgatacctctaaagtgtacgccatcccgattcagacggcggaaccttataagttgatttatgctgccgggcgttcctgaccgtgttttggaggtttgggaaaagcctcccggaaaatcatattccgggaggggcgggtattgggacgcctgctattcgggtgccttgaagttatatacgggcctgatgcgttccacgatttccgccgtttcatggatgttgtccagcacgctctcgccatccttgtaggccattggcgcttcatccagcgtagcgcgggaaacgcaggtggagaaaataccctgcatggaagcctcgaattcctccagggaaagattggctttagcctttttgcgggacatgctgcggcctgcgccgtgcggagatgaggaattgaattcttcatttcctttgccgatgcagatgacggagccgtcacgcatattcaggggaacgatgagtttttctccgcgtccggcccggacggctcccttgcggatgatttggtcttccgcaatgtagttgtgcacggtgtcgaaactttccagatcagctgcatcatccagcagttcatgcagtatcacgcggcggttcagggctgcgaagcgctgagccaccttcatatcccgcatgtagttcagcgtattttctccctgaaggtagcagagtcctttcttgcgttctttaagataggcgtccggacaagtatccacggcgattttctggtagcgttccgcaatcttcagaccgaaattgcgggaaccggagtggatgcacaggaaagcgtgctctttcccttgcgctatttcaatgaagtggttgcctcctcccagagaccctacggagcggcggtgcctgtctttgtccgttctcagcacgtccatgcagatgcgggagatttcttcatccagttccgggtcgtccagcaaggcttgatgaacggagggacgggcatgcatcccggacgggacgcgctcgcgcaggcgtgcgtcaaagctggaaaaatccggcagtccggacagtctggcggtaagcactccgcagccgatatccacgccgatcaggttgggaattaccttatccgttttcaattccgccgtgaacccgatgacgcagccggctccggcgtgcacgtccggcatgatgcgcacccggcttccttcaaaggcggggtggttgcagacgtccctgatctgggtgcgggccaggtcttccagttcatccgtgaacacgcgggcttccgtgtattttccgtcaatggtgatcatggttttattcttttggttgaggggcgcggagatatgcggaaagcgccttcgcgccctgtgaccttgtcaccataacgcatttgttgactcttgcattatataagtattcatattatataactataaagttatgtttgagcatcttttcgcagaacggggactgtccctggaccgattgaaaaccttgatagaagtggccaaggctgggagcattgccgctgccgcccggggggatagtgcgcggcagagcctgtattcccggcagattaaggaattggaggaattcttcggtgtggaactggcgagccgccgcgggaaagtgctggctcttaccggagccgggtgggagctggtgaggctggccagtgaaagcctgtgcctgctggatgattttaaaagccggagccggaatctgccctaccggttcactatcggagccggggacagcctgcatgcttgggtggtggctcccgtgctggcgagtatccagaaacgggggctgccgtggcttttcgcgctggagaacctccgcaacagtgagattccctctaagctccagaatatggatatagacttcggcattgtgcgtaccagcgcgctggaggcggaagggttggaaagtcgggtcatttgctccatggattatgcgctgtacgttcctgcagccctggccgggaaaaaggcgcgggggaagaaggaggattttctccgcctgctggaaatgtttcccctggcaacgctggggagcggttccgggtttcatgtgttgctgaaaaggaattgcgctgagttcggcatcaggctgcgggtgcagtgtgaaacgcaatcttttccttttgcggcccgcatgttgaagagcggagcgttcatggcaatcctgccctgcatggcggaaaaagaactgggggaaggatttgtcaaggttactcatccggcgctggacgggctgtcccgcagtatttccctggcctggaatccgcggttgttgcgcgtgaggccttcagccaaacgggtaattgatgttttttccatcccggaacgggagtgatggaaggaaaatcaatcagaatccacgcccaatttatttttacggtagtggtccagggagatgcggtaaaaatatacgatcgccagcaaattcagcagggctcccgttccgaaggcccagttcaggttcaggtacgcgtaaattttgcctcccaggaacatgcctgttcccaccccgatgtcaaaagcggtgaaaaatgtggaattgacggctccccggtggccgcggtccgccatgttcagtttcatggtttggaacgtggggatgaaaatgccgaagccaaagccgatgaggatggcggaagcgtaatagatccattccagcggcgccagcgccagcgcgccgaaactgacggtcaggatgctcagggagatgacggaaagctccgccacgcgtccgcggtcgatttgcctgcctaccatgaacctggagaccagcatgcccagccccatcagcgcgtaaaacagcccggcgtatttgaacccgtgcatttccccgtacagggcggaatacacggccaccacgccataagagaaggtggcgatcatcacgttcaccgccagcggaatgcccacgcgcagcacaagacggtccagtacctttttaggcgtttcatacacgggctcctgaacagggctcctgggaacgcggatgagagatgcaatgcccgctccggccaggcacaggagcagggagctccaggtaatcacgtaaaagccgtactgctggtatacctgaaggccgatgacggggcccaggcacatgcccagcgtcattgtcatgccgaagaagcccaggccttccccgcggcgggcaggggggatgatatccaccgccattgtcgggccggaggtggtcatgcctccccagatcaggccctgtatgaagcgcgtcaggaaaaacgccagggcggtggcggccgcagcataccctgaaaaggacagggccagcataatgtaaaccgtgatgtaaatcttcttgcggtctccggtatccacccggtgcgcgaaccaggggcgggagataatggcggccagaacataaatggacatgatccagcccagccagccagaggagacctgcaattgtcccgtcaggtacagtgggaggacgggcaccagttcatagaaggccagccccgtcattaagttggcgcaacaggccaggatgtagtctcgcgtccagagaggcgctttgacggatggtgcggtttccgccgccaattcatctcttgtccgagtcatgcaggggttgtacagccgttgggaaaagtttcaaacggcctgacgtgtcatgatgatgagcggggggaagaaggccctgatgaatccttgttgggagaagttattcattttcacgggaaaaggttacgcccaccagcgtatctctcccgtcaatggcattcagataatcgaatacttctccgcagggtgtttcattctcaatgaagaaaatgaatgctctgcgctggttgatatgttcatttgccatattggcgaaaacctgaaggtcgtttttccgggatggaccggatggttttttctggatacgccagtaaacaagctggtagttccctctttccgggtaaggggaccggatgaatttcacgatgggataaacgggtttccgggaaggtgttttgttgaaaacaagaaagtcatcttcacggaaaggatgttccagaacggcatcgtcgggaaggcagggaatgtccgggttcatgtctttttcagattctggatcagattccggggccatatctgtggagacgggaagatcccagcaaattccattttcaaaggcggacgcgatggcatcccctcttttcaaacggagattattcacgccatgcgcataagcttccgatatgccctcagcgatgcggaaccagggaagggacggattgtccagattgatggtcaggcatctttcacaggccgaatccgtcttccattcctgtatggggccgggcagttccgatgcgttcacgattatttctccgggcagcaaggcgctttcctttttagagcatgccccgaagaggaagctgatgaagagagggaggaaaacggcaggaagacgaagaagaagcatttattcattcttcttatatagtttttattgcatgtcaaaagaatagagagtgcggtacatgccgggaaagatggcgctgtctcccgctccggaatatgccttcttttttgcgtgcaggacggcgcgggcatggtagggtacatggtatgagcgtaatcaccaagcgtggagacagcggagaaacggacctgatgttcggcaggcgtagtcccaagacagcgccgcgcattgaagcttacggaacggtggatgaattaaattccctgattggcgtggtgcgccattccggggtaagctcccggacggtggagatgctggacggcgtccaggctcgcctggtgggtgctatgggggaactggccacgatggaggaggatttgcccaaatatgacgccaaggggtacgcccgcattaaggcggaggatgtggcatggctggaggaacaggcccatttgctggaaaaggaatgcgacatccgtttcaaaggctgggcccgcccgggcaaggaaggatcgctgggctccgcgtatttggacctggcccgttccgtctgccgccgtgcggaacgccgtgtggtggcattgaagctggatcatgccctgagcaacgtgaacacggccctgttcctgaaccgcctttccgatctctgctgggtgctggcccgttttgaggcgctggccgcaggggaaaagacccaggcctgagcaggccgtttccgcccgtcctcctgttccggcatgttgcgtatctgcgcgattcccgtgtcgggagaatctcgtgaaagaatggttttgccgcagatccatgtccgggtggcaattccccggaatagttctccgttgtttcctggggacggctttccggtcagtccagcggcaggatggaagtaaccagcattttgaatcgttcccgggcaatgacggaatgaggtactccggcgggaatcaggaggctctttccttggggcagattaacttcttcattgcctacggtgaagtaggccgtcccgtccagaatctgtatcagcgcaggatcgggcgtctggtgggtaggaaggagttgctcgctgtcaaaggccagaatggtcatgttgactcctttggagcgtacaagggccagactggtgatttgcccttcgcggtaatcagtcaggtcggcgtaattaaagggagtgcgttcggggatgtgctgaatggctgtcatgtaaattggacacccttgttggcccttcccgtttcttcatgacaggcttccgggaaaaaggtccgctccagacccgggagcggaccttggcattcagcattcatatggtgcttacttacggagtcagcgtcctgaattcataggcgtgaggtcggattcacaagtaaacaacggtcattctatacatgaaaaatacaatttacttcaagaaaaattgtgtaggaaaatgcagatttgattctgttgcagggagaatcggatttgacttccggatgggattgtttccatatacgggcgtattgccgtcagcggttccgccgcccgcggccggatatgcccttctcctgtttggcggggaaggccgtttttcccgtttgccgcggtttctcccgtgagacgatggcgaaatccgcccactgctgctccctgtccactttcacgggaatgacgggaacgcgcagccctgcgcacagcacggaaccatggtcgtttttccagcggctggcaaacgcctcatacacccagcgcccgccgggaagcttgtccggtttgaccagccccttaatctggagacgcgggatttccagcaaaacgccgaagtggcgcgtttccgtaaccagagcttcgtgcacttccggatgatccgtgtagcactggccttccagccattcgaagagcttcatccggttcgcgtccttttccgcgctggcggaaatgcgttccgtttctgaaatgtgttccgcgtcttcctccagcctgcctgtactgcctgctcctttagctcctttgggagggttggccagcaggggattcagggagcggtgaaccaccagatccgcgtaacggcggatggggctggtgaagtggcagtaattgggggtggccaggccgtagtggcccaggggctccgtgtcgtacctggccctcatcaagcttttcaggagcgccagcttaagcaattgctcgtctggggaacccttgatggatttcatcagttcattcaggtactggcgttggccgatatcgtgcacgggatgcccgtacagtctgcacaactggcagaattcaaaaagtttggcggaatccggttcttcgtggacacggtagatggtgggacggttcccgtttttcagggccagggccacggcttcgttggcggccagcatgcactcttcaatgagctgatggctttcatcgtactcttccgtgatgatgcccgtcacgcggccgtccttgtccataacggctctcacttccgggaagtccagatccagggctcccttggcgtagcggttgcggcgcaggatggaggccagattccaggcttcccgcaccgtggagggaacttcccctttgtcgtttcctttcagcatgccgaaggcctcctggtaggtcaggcgcgccttgctgcggatgaaagcgtcagcaaagcgggcacggagcatcttcccctttttatcgaatttcatttcgcatacttttgtcaggcgcacgacatccggccgcaggctgcacaaatcgtcggaaaggcggggcgggagcatcggaagaacgcggtccggcaggtaggtggagttgccgcggcgcagggcttccccatccagcgagccgccgggcttgacgaaatgggagacgtccgcaatgtgaacggccagcgtccagccggacggagtggccgtgatggaaatggcgtcgtcaaaatccctggcgcttgccgggtcaatggtgatgacggtacggtccgtccagtcttcccggcgggcgagttccccgggggaaggtgtttgaggcagcgtttccagctcccggagcacggaggcggggaattccacggaaaggccatattttctgataacggcttccatgtccacgtgaggctcgtccggatagccgagcacctccacgattttcccgcgcggggctttcttttcctcaccgcaggttacgggctccacggaaaccagttggccgggaagcacctccatggcgggtttttccgccagttcaatggatgacggagagcttacgccgtcccccagcacgcggcccggcttgttttttccggtgcggaagacgccaagccatcgggagcgcgcgcgttccgtcacttcctccacgcgggctttcatgtcggcatccggggaagaaaagcgattcctgaggatattcctccgtcccctggctgccttgcgttccacgcgcacggccacccggtccccgtccagggcggtgctcagatggttgggtttaagttccagttccggaacggcttccgtgtcccatcccagagccgcagcggcgggatccccttttctggggagaaaaagaatcttgccggagcgcaggatgcggatcatgccatgcaccaggttccggcgttcccgttttaaagcgtacctgcccttttgcagacgcacgagttttccttcctcctccatctggtgcaccagggcgcggaaatccagcttctgccgggaatccacgttcagggcgcgggccagttcggatttgctctggggttcgtaatgtccgtcttccatgtgacggatcaggcggtctttaagggaattattcatcttgcggaagttccgggaaaaggagtttcccattcccatggatgccatcataagaaggttttcgcgttgcttcaaggcgcgggcggtgcatgccgcgttcgtcagcggcttttggcctgctggcgcacctgccgtttttacagactttatccgcaagccgagctttgatttttcagcgtataacgtatttgggatgaaacccccatgctgtttataaggaaggggctgccgacggtttctcatcatgtggaatgatgggaaatatatgatgcaggcccatgaatttgtgcaggaccgtttaagagacattaccagcgacgcggtgaaaaagggggtggccggcatggagagaggaatgggtatccttttaaagagtgataaaatattgaaaatgtatgatcaaaaccccggaatttgaatggagattaaccattgttcaggtggagattatcccggccggagcgtgccctccgtggtgccgagctgttctgcgacgtccaattcccggataagccgggccgcagtgcaggaaccgtccagcagctcccggtagcgggacaccagaaggcgtactttttccgggggatcatccagcagttccagccggaaacgggaaaggcccagacggcggaagtcctgaaggaagcctgcacctgtctgggcgcgtccgttgaacagcgtgttccggcacccggcgtccgccagcaggggatgaagttgtcctacgcggtcacgcagctgcacatgatgccgttcgcaggggcggccgcagttcttataactggtgccgttcgacaggaaggtgcagaacacgcaatgctccatatgaaacatgggcatgtgctggtgcagcgtcagttcaaaccattccggcggcgcggcgcggagcaggtccgccacctgttccgcgttcaggtcgtaagagatggtgagatgggccagatttccccgtttcttcaggatagccgcgctgtacggattggcgacgttcagggaaaaatctccgatacggtgcaggggggactggcggaaatattgcgccgcacccaggttgcgaatgagaatgccgtcaggttccgcccgttccataagtttgaagtatccgacttccgagggtttctggatgcggggcgtcgccaggaagacgggaatgctttttccgtgttcccggacggtttttatgccttccgcatagtcccggaggtcttcaaagtccagataaacggcatttgctccggcatccagcgcggcgggtatttgctccgttttgcggcacagaacagacaaatggggaggcatgtccggaacggctgttcccttcggcagcggaggaagggtgaaggaggccggaggatgagagggaacggaggattcttttgccttccgggccgtttgaattcgttccaccagggcacgccttgtctggttgaggatgctgagcggaagcatcaggccctccggcagccggcagtcgcaggaggccaggcggaatcccgttccccccagcctgccgagctgttgtttcagcacttcgggagtcagagggcgtttttctgccgtctgaaggggctggggagattgcacggaacatccgtattccggacaggcaatcgtcaggggtttcccgacggacccggcacatgtcagatggaggggaatggtggattcctgcaagtgttcccgcatttttttcaactccgcgttcagggccggatcatccgttttccagagtttttgcccgggtttaaccctgctccagtcaatacgggatgcctttccgtggaaaaaaaggcggtttctctgcactttccagatacgtccgccctgttcttcattgcggtcttcccctgcatcaatgacgaagccgtccccgggcgcgagcggaatgcccccttccggcctgatatccagccagccctgaccgctgttcataatgacgcctgcgtaggcgcccctctttttaccgtagcggccgtgggtcagacgcgggtggttcgtcccgtccagccagccggtggagaagccgcgtgaaaataccatttgcagtgcataacggtcgcgtgcggtcaccatttcatccacaggtattccagcgcaggcggcgtccagagcttttctataggccgccgttaccgccgcaacgtattccgggcttttcagacgtccctctatcttgtagcttttcacgcccatgcggataaggtccgggatgcggtcaagggcgcacaggtcctgcgggctgagcaggtagcgccgttctcccagaggaacggttttgccgtctacaaccagggaatagggcaggcggcaggcctgcgcgcattctcccctgttggcgctgcgctgtcccaagctttccgatgtaaggcactggccggaataggccacgcagagcgctccgtgtacaaatacttccaggggaatgtccgtatgccgtacacattgcccgatttccttcaggctcagttcccgggccaggacggcccgcttcaggtccaggaatccggaggcgaattccagcccgtccggggaggaaagtgtcatctgggtggaggcgtgcagttccagcttcatgccgggaacctgccttccccattccgtcaggcagcgggcaagcccgatatcctgcacgatgaccccgtccgcgccggcggcattcaggtggcccaggtaggagagggcgtccgccagttcggaggtaaaaatgagcgtattcatggtcacgtaccccttcacgccgtgtgcgtgaaggaaacgcatcagttccggaagggaatccagcgtgaagttgtctgcgcgcagacgggcgttgaaacggtccaggccgaaataaatggcgtctgcgccattggctacggcggcgcgggcgcagtccatgtccccggcgggggccagcagttcggggcgcaggtctccgggccggagggcggaaagggttatgtcgtcggaagtcacggagaaaagcaaaaaggacggtaggggttattgggcggtgctgcgtttttccgcatggcggagcagagctttcaaatctcccagaaggaacagggagcctgccgccaggaccgggagcggggaggccagtgccgcctgcagcccatccagaagcgaggaatggatgaaaacggggccggtttcctgctcgcccagcagggcagccatttcttccgccggcatgatgcggggggaagtgcagggaaccaggtgccattctccggtaatttcccgcaaaaccggaatcatttcccggatgtgcttatctgcggatgcggcaaaaaccagtgccgccttccgtcccgggaattcctctttccacgtggacgcgagcacgcgcgccgcatgttcgttatgagcgccgtccaacaccagggggggcgtctcaaggcgttcgaaccgtccgggccactgtaccttggccaggactgcggcggcttcggatggggaggggagggaatggagccgcctcatggtttccagcgccagggctgcgttttcccgctgatgggctcctggcagggatgggatgggtgttttccggtccgcccgggcaatcgtgaggggagaacggcggttttgcgccgtccgttcgatgacggccatgacacccgggtgctgcacggcagttacggacggtttgccgggggcgatgatggccgctttttccgcagcgatctcttccagggtatctcccagatactgctggtggtccaggccgatgggggccagtacggcgatatccttgggcacggcgttagtggcgtccagccttccgcccagccctgtttccagaatgatgaagttcacgctgtttttccggaagtggcgcagggcgacggccagagccagctcaaaaaaggtgggcggctgttcccagccttccgccagctgtttcaggaaggaaatctcctctgccagggcgtccggagtgatcatgtccccattgacgcggatgcgttcagaaaaatctaccagatggggggaagtgaacaggcccgtgacataaccctgcgccctggccagggcctcaatcatggcgcaggtggagcctttcccattggtgccggccacgtggaccacggtggcgtttatccggtccgccccggctgccgccagcagcttcctggtattatcaagccccagcttgatcccaaaaaattgggtggaaaagagccagtcaagggcggcggatacattcatgggcggtattttaccacgggaaaactcccgttcaactccggtatggcgtggggactgtaaaatgccgccgggaacggacgcggcaaacacgaacaagctaccgttgctacctctcggtcctggcggggtttgccagtcgtgcctccacggggttcccggcggctcacccagtaaactaggtttgcagtgcagtgtcaaccttcaaagacatcatctccttctggcgaaagagagcagaatggagatcagcaatattacgccgataacgactgccgccgtgaagaagatttcttcttcctgtctgagccggctgcgctcctcttcgattttcgcgtctctgacgcgttgcagcccgtgcagggctttggcctgttcctccacatccgcctccgttcgcatgacaatcgtttcctcatggctgacggcctggtcgtaaggagcaatcatcgtgcggaattcggggtcttccgaaagtatttccgtctcatcataatcttccgccagaggggagttcatggtgtcccgaagactggcgatctgtctgtccacattgttttggaacaggcccaactcccttttggccttttcgtaagcttccgtctggtcgcgcagagcggcttccccctggtcggtaatgcgctccagttcctgcggaaggctggcctgaagtttgagcagatccgtcctgttctccgtcactttaaaattcctgcttttcgtgttggacgcctccgcgagctggatgcggttgatgtccagacgggtttccacctggcgtatttgttcctgaagccggtttcgggcgctgtccaattgttgtctggtggcgtccctcctgcttttgagttcttccacttccgcaacgcgccggtcatattgttccagcagatgggctattcgggcttccgcgcttcgggcattgggctttccgcttacgggagagggcgtctttttcccgtctttttcctggccggcttgctttattcgggcatcccagtatttgcggacggcttcttccttccgttgaatagctttctggagacgcgccgcctgctgttcgtgaagttccgcggcttcatcaaaacgggcttgggccgcatccagctccgggcagggttcctgctccatggctttgagggcttcatgcctgggtgcgaggccgttttgataataatcccagccgtagtatcccccggcgagcaacaggatgagaagtaggtaacgcatcaatgaaaaaaggtagagtcagaagtaaatctcatagtgggagttccgccggattttgcaaactctaaaatcagccatccggagcttttcccctcagcagggagaatgatgataaattcactccggagggggcgtagttttccttgaagccatactttcaagccatgtctattttctcatcacgcagacaatttctcaaatctttggggcttgcggccggagcggctgccgccggaaatgccctccccgggaaggctgtggaaatcccggccggagaccatctctggaaatccgcctccccggcggctccgaggccttccggttccacatacatgggaggattcaaggctccccggctgggtcgcatcaggatggccttcatcggcgtgggagggcgcgggttctcccacctggcgcaaatgtgcgtgatggatggagtggaaatcgtgggcatatgtgatttgaaggaagagttgacgaaacgcggcgtggatcgcgtgctctccagaatggggaaaagccctctgggctattccggcggcgatatggaatacctgaccatgctgaaggagctgaagccggatgccgtcatcatcagtacggattggagttcgcatgccagaatcgcctgcgacagcatgaagcacggcgctcacgcctttgtggaagttcctctggccgtctctctggaggagctctggagcctggtagataccagcgaggccaccaggaaacattgcatgatgatggaaaacgtcaactatgggagggatgaactcatgttcctgaacatggtccggcagggcgtcatcggcgacttgcttcacggggaggccgcgtatatccattgcctggtgacgcagctgggggacacgcgcggggaaggggcctggcggccggaatatcataccagaatcaatggcaacctgtaccccacccacgggttgggaccggtggctcaatatatgagtttggagcgtggagaggaccgtttctgccgtgtggcggcgttcgcttctcctgctctcgggcgcaatgcctacgctaaaaagcatcttcccgccgatcaccgctggaacaatactccattcatctgcggtgacatgaatacggctgttgtcaagacgcagctggggcggagcattcttgtccagctggatgagacgtccccccggccttactcccgcgccaacctgatccagggaacggagggcacgctggccggtttcccaacccgcgtggcgggtgaaaagctgggcaacggcaattatcatgaatggattgaaggcagggaaaaactggccgctatttatgaaaaatacgatcatcccctctggaaacgcatcggggagctggccacgaaaatgggtggtcacggcggtatggactttgtgatgctttcccgcatcgtggaatgcctccggaacggagagccaatggatcagaacgtttacgaaggagcttcctggtcttccctgctgccgttgacagcccgttccatcgcccagggcggggtgcccgtgggatttccggattttacccgcggagactggaaaaccaccatgcctctggccgtggtttcatgaataacgccggggatgaaggggcgctgtcctcttccggagagttcaggaaggaatccgttcttacgcagagtgctcagcagggactgccggaaaacagattgtttaattcttccgcgctcatgttcatgagccattgttcggggcctccggagaacaggtcgtccgccatgcggcgcttgtccttgagcatggcgtcaatgcggtcctcaatggtgccccggcagatcaggcggtgcacgagtacgttccggtgctgcccgatgcggtaggcccggtccgtggcctggttttctacagcggggttccaccagcggtccacatggatgacgtgggatgcctgggtcagcgtcaggccggtgccggcggctttcagggacaggatgcagaagggagggccggattccttctggaaggcggtgacgatgttctggcgttccggaataggcgttcccccgtgcagggtaagcccggaacggccgaagattccgtacaggagatcgtgcagatggggaatgatggagcggaactgggtaaagagaatggttttttcctgcctggcggcaatggaggtgcacagttcctgaagccgccggaactttccggagcgttccggcgcataatcgtccgtgccctggaactgggcggggtggttgcagatctgcttgaggcgtgccagaatgggtaaaatcagcatcaggcgggcagccgggtccggttcgtccagtacggcatgcagcatgtctatctgtgtctggtacagggcggcctgttccggcgtgagggagcaataggccggtatttccgttttgtccggcaggtcgggaaccagcgccggatccgttttcattctgcgcaggatgaaggggcgcaccaggcgtcgcagcggggcataaccgcgttccagggaacgggtgaaggattcgaagctttttctgctgcccagcagccccggattcagaaattccatcaggctccagagttcattcaggttattttccaccggcgtgccggacagggctatgcgtcgttccccatgcagggaacggatggcacgggaacgggcggagcctgcgtttttaatagcctgggcttcatccagaataatggccgggaaatgcaggtcggccagggcggacgtgcgtgcagccatgccatacgtagtaatgacggcgtggcagtctttccggcgcagggtattttccggctgccacgggtccggggaggaagggtgcatgatgcgcaggataagctccggagcgaagcgttgcgcttcctctttccagttggacaggagggaggccggagccacaatcagagccggcaggccctccagccggccttttctccgcaatgcgtccagccacgcaatagcctgaagggtttttcccagccccatatcatccgccaggcaggcgccgaaaccccgttccgtaatccggtaaaggaaagagaacccttctttctggtaagggcgcatcagggcgtccagccgggaaggaagctccggtatggagactgggactttccccgccaggatgtccagggtctgccggaggttttgacccggttccatgacacagtcttcgtccggttccggaatctgtacaagctggccggaagggccgttaaccagcattctcagaccctggaccagagggatgccgagggagctcatcatacgtgctgcttgattccaccggtccattaagtcccggacctttcgggcgtccacacgcacccattcccccttgaagcggatcaggccgtctccgttgctgagcagttcccccagctcctccggggtcaggtctttgcctcccagagtggcggatacggaaaatttcagcagactgcggacggaaagcccggaagaatggaccgttgtttcacttccggatgcgtctgccgtaacttttacctgtagtttgggagggggttttttccataggttcaccatgcgcacaatgatgcctgcgcgttcgtagagcggcgtgtcctgcagaaaatcccgggcctccggagcgctccaggccatcggcgtataaatttttccgttatccagcaggcgcttcagcagggggctttcctgtgccgcttcttttaagggctggagtacggccagcagggcggtgtaattcccttcatgaagtttcagggcggtggcaagggggaggtggcgcacctggttgtccgcagcgctttgatgcgcaaaggtagccatgaaagcaaaggggcgggagcctgtggcgtcatcccggttttccgcaaggtggaaaaataccttgcctatctggttccagggcgcgcccaggccgttcaaccattcggcgggggtaatgcctcgggcgcggatttcctttgctattgccttccgcaaatcttcaaaccatccggcaatgatgtccggagtggcatattccgcgcccggtacgggggggaattgctccgccagaaaggctttttccgtagcggaggccagcaggtgatccagaacggcatctacctcgtccggcctttctgcggcagcgtgcgccatgcgggtaagcgcctggcgcgccatgttcttgataaagaaggcgcccggatccggaacggtttcccagttggataccgccagggcatacagcccgtttccggttccttcttcaaacagacggtcgaaaggcggcgtgtccgtcaccaaagcaccggaggggaggatgcggaaaccattgatattccgtttctctttcggtactgcatgatagggatccggctgcatggctggcgggaatgtagcgtgtgcttgcagccgtagttcacagggcgaacgtcgtatctttgatgataggcagcttggacggcggaggattgagcagctccttgatttgtttcaggtaatcaatcagggctttgcggacatctattcccgtcggtttgccgttcccccgttgggggaatatgaaattgctgcacaggtagtctcccatcgcgacagtgtaaatgaccccgtttttcaaggtgctggtaatgctgggcgtaacaccgtccatgatctggtaggagaatccggagcagtacacttccagaacgcctccttcgtcatcggtcggagacatgaatttggacaggatcaattgttcaatgtccgctttactcatggagcaggtgacgatcttttctcggaagggttccagctcgtaaatgtccctgatggtaacgggtcctttgttaagatggtttttggaccgtactccgccgcggttgtaaatggcaatatccgaatgggaggcctgctgaatggccttgcagaaaagggtgcctatggtgacgtgcgtgatttcttctccggcgacgcccacttgctggttgaaaagcggatttccggaaaatcggcggacaatttcctttacttccgggtcatcgggaatttcctcattcaaagaaacggccctggttgatttggaaaggatggagacgggatgttccgtggagaaaatgatttccgtaacgcctacatggctcaggctgtgtcccgtgtggctgagcagggttccggttctgagatgaccgctgggcagcatgacatgggtatggcctccaagaatgacgtcgatattcggagaatacttcatcattttgagatcattgccgtatcccagatggctgaggatgacgttgatggtgttatggtggagccggaacctgtccgtgattcccttgtagtcttcttcatccggcagcttccatgagatgccggtcatcctcctcacatccgtggtttgaaggtctgccagtcctatgacccctacggaaatggacgttcctttaatcgggatgctgacatacggagaaaaacagttttccagagtaggggaaaggctggcgttggtaatgacaaacttggtggagggcattcccttgatatggtcgcgcagggcctcctgcccgtaatccagatcatggtttccgatggtcactacatcataccccagcttgttcatcaggatagtaaggggttcgccccgtttttcacagtcgtccacatagggattgcctatgaaataatcgcctgaatccaccagcagcacgtgcggatatttagcgcggtattgctttaccagtgtggccagtcttgggaaattgtccagattgccgtggatatcgctggtagaaatgataatcagcgttttatcgggatccgatttaggctcctgagccagagagaacgggtacaggcatgccagggaggcaagaataatgcggagcggaatcatgcagggtaaaatgataaatatacggaaaaggatgagatgggattaacgggcggaaacctcatgcgggccgtcacccacggagatgacttccagacggaccctggatacgccgcgtctatgcaggccgatgcggcttgcggcggcggtggtgaggtctatcaggcggttgctgtgaaaaggcccgcggttgttgatcctgacgacggttgatttgccggtttccaggcaggtgactttcaccttgcacggcatcggcagggttttgtgggccgccgtcatggaacgctggggattgatgtattctccggaagatgtcttcaggcggcgcgctttgccgccataccaggaggcatagccggtctcatggtattgcagggcatccgccacgctcatgggagtatacctttttccacgcacccggtagggcgcatttttgacatgcgcctctgcctcctgaacggatggctccgttttctgagcgcacttctccgtagtggagcagcccggcatcagaaaaagcaacaggacggggaggaaccatttcacgctttttacgtttaacacatattgatgattttgtataacaaaaaaggaacaagagttgaaatttaaggaatagagcagggcggaacaatcttttcccggttgcggtttaccagttgagcggcccggaaaaatgcagtatgatctcccgcatgaatccttccaaggtaatcggcctggtcgctctggcggaaaaaacgggactgggggaagcgctgcgcatcatgcgccgggaactttcccgccacgggctgggctcctgcgtcattgaaacgccggatgctctggaacgggctatcggacggtgcggcatgctggtgaccttcggaggggacggtaccatgctgaccgtctcttccctggcggccatgcaccgcgttcccctggcgggagtgaacctgggccggctggggttcatgaccacctgttccgtgcaggaactgccgcttctggcgtatgcccttcaggaaggttcctacctgacggatgaacgttccatgcttgaagtgatccgggtggggggagacggcgttgcggcacctccgcgcaagctggccttgaatgaagtttccctgatccgcgcccagtccggcaagatggtggacctggatgcggagatagacggagaattgctgaaccgctaccatgcggacggcgttctggtttccacccccaccggctccacggcatactccctttccgccggggggcctctggtctggcccatgtcccgtgtcgtatgcgtcacccccatctgcccgcacagcctgaccaatcgttccgtggtgcttcctgacaacatgaccatacgcctgcggccccgcgagcgccgcggccgctttgactccatggtctattccctggacggccgttccgcctatcccatcgaagtgggagaaagcctggtaatccggaaggcgccggaaacgctttccctggttcatctccggaagcagaatttcggcgccctgctgagggccaagctgcggtggcagggggcggaaatcccctcggacgatgaataggccgttgcggaagcccggcctccggaggactgtcccctcactacggaattcctgcatccgggaacggtttcccatttatcgttccgcattggcgcaggggcggtaaaacgattttttttaggatgcgggcttgacgaaaaggcctatcctataatactcttcctgccctgccaccaagggggtggtagatcttaatcgcataaacgcgtaagaaatagtcatatatgaagacccacgtgaaaaaaggtgatgaagtggaaatcatcgccggacgtaaccacaagggcaagcgcggcaccgttctcgccgtgaatgcttccaaaggtactgtcatcgtagaaggcgcccgcaccctgaaaaaagctgtgcgcccgaccgaacagaacccggaaggcggcattcaggaaatcaacggcccgattcacatctccaacgtgaaaaaagtaggctaggccacccggtctgaccctgcgcttaagccatatcaatcattaataaagagctgacccgctaaaacaatgagtacaccaacactgcaaacatactaccgtgaaaaggtcgttcccggccttcaagcgaagcatgcatacaagaacgtgcatcagattccccgcctggagaagattgttgtcacctcctgcatgggcaagcacccggaccgcaagcaggccgtggaagatgccgttaatgaaatcgccaaaatcaccggacaaaagccctccgtcacctatgcccgcaagagcgtggccaacttcaaggtgcgtgaaggcgaacctctgggagcccgcgtaacgctgcgcggcgcccgcatgtgggaattcctggaccgcttcatcaatattacggctccgaacattcgcgacttccgcggtcttccctacaagtcctttgacggcaacggaaactatgccgtcggcatctccgaccagtccatcttccccgaaatcgaacttgaccagatcaagcgtcagatcggcttcgatatcattttcgtgacttccgctcctacggacgatgaaggccgcgacctgcttcgcgctctgggcgtccccatgcgcgaaccgaagaaggccgaagaaacccaaaccgccaacgcctaactatttcttaccatggccgtattaagtgatcccatttccgacttcctcacccgcctgaaaaacgccagcctggccggcaacgaggaatttaccgctccctgctccaacatcaaggtggaaatcgcccggattctgcaggaagaaggctacatctggaactatgaagtgaccggagaaggctccaagaagcaaatcaaggtgaagatcaagtttaccccgcagggcaagccggtcgttaccgatgtgaagcgcagctccaagccgggccgccgccagtacgtttcttccgaagacattccccgcgttctcagcgggcttggcattgccatcgtctccacctcccgcggtgtgatgaccggtgcgcaggcgcgcaagcagagcatcggcggcgaacttctcgcccttgtatggtaaccattaacatttcctaaacatatgtcccgagttggtaaaaaatccatcacattgccggacaaggtaacggtaaaggttaacggctcttccgttcaggtggaaggccccaaaggcaagctttcctggacgcttccggaaggcattaccgctaccgttgaaggcaatcagctctctgttgaccgcgccggcgaaagccgccagcttcgcgccctgcacggtacgaaccgttccctgttgaacaacatggtcatcggtgtttccgaaggcttcgtcaagaaccttgaaatcgtcggcgtcggtttccgtgccgccgtcaagggcaacattctggatctgaacctgggcaagtcccatccgatcaaccaggtaatcccggaaggcctcaaggtaaccgtgactgaaaacacgaaagtgacggtcgaaggcatcgacaagcaggtcgtaggccagtttgccgctgaagtccgtgcgtactatcccccggaaccctacaagggcaagggtgtgcgtttcgtcggtgaagttatccgccgcaaggaaggcaagagcgtcggtaagtaattcaggtaataactattacaacatatttatacacgatgagtactatcaatcgcaaagccatccgcgccaaggttcgccgccgcatccgcagaaaggtttccggaacggcttcccgtccccgcctggctgtctatttctccaaccgccacgtctatgcccagatcatcgacgatacggtgggcaggactatctgctccgcttccacggccgatgcttccatcgccgatccttccaaactcgccaactgcgctaccgctaccaaggtgggcaatctgatcggcgaacgcgcgaaggccgccaatgtcactgaagtcgttttcgaccgcggtggattcaagttctgcggcaaggtgaaggccctggccgatgccgcccgcgaaactggtttgaaattctaattgaaagattccttaaatgaataacgaaacggaaaacactgctcctgctacggaagccgccgctcccgctcaagcgcagcaacccgcaacgggcggccgcggaccccgcggaccccgccgtgacggccagaatggccgcggtccccgtggaccccgccgtgacggacgccgtggccctcaggctgaagctcccgtggaagaaggcccccagctcgctgaaaaggttgtgttcatcaaccgttgcgccaaggtcgtcaagggtggccgccgcttctccttctccgccctcgtcgtgagcggagacatggaaggccgcgtaggcttcggcttcggcaaggctaatgaagtggcagacgccatccgcaaggctacggaagccgccaagcgccagcttcgcccggtctccatcgccaacggcacgattccgcatgaagtctactccgaattcggcggcggcaaggtgctcctgaagcccgcctcccccggtaccggcctgattgccggcaacaccatccgcgccgtgctggaagcagcgggcgtgcgtgacattgttgccaaatccctcggttcctccaaccacgccaacgtagtgaaggctaccctgcaggctctcgcttccctgcgcacgagcgaccaggttcttgccgaccgcggcaagaagaaggaaaaggccatctaatctgatccggaggcggcagcccggcgccgccgcctccaagaaatccaaccattgtaaataacatgttacagcttcatacgattaagcccaatcccggagccaagcaccgcaagaagcgcctcggcaacggggaaagctccggtctcggcaagacctgcggcaaaggcaacaaaggccagaaggcccgttccggcggcacgatccggccgggttttgaaggcggccagatgccccttcaccgccgtctgcccaagaaggggttcaacaacacccgcttccaggataaaatccttatcgtcaacctctcccagcttgaacgcgtgtttgaagccggtgctacggttgatgaaaacaccctgcgtgcggtcaagctcgtccaaggtccctgcgatgccgtgaagcttcttggcaacggcaccctgaccaagaacctgaacgtagtcgtggacttcgtgagcgccagcgcccgcgagaaggtgacccaggccggtggcaccgtcaccgtgcttagcgaagcctaatcacatttggcgaaccgggtcatgcagcttgacccggttcgcatcgttgtgtttactgttgcggttcccatggatgccccgggtgcaaaccgccgcgacatgcaagccaagctgcgcgccaacttttatattacaggaccatgatatccgcatttgcaaactccatgaaagtaccggagctcaggcgccggattttgttcacactggcgatgattgtcgtcgtccgcctgggggtacagattcccctgccgggcattgacgtcatggagctgcagaaagtgattgaagcctccgcgaacgccagcggtcccggagcgggtctggctaccgtgctgaccattttctccggcggcggcctccagcagtgcggcatttttgctttgggcatcatgccctacatttccgcttccatcatgacccagcttctttccgcggtggttccccagtgggccaagatggtgcgggaagaaggcggccgccagaaaatgaccaagtggacgcgcgccatcgccatcgtcattgcccttgtgcagggctggttcctggtcggcacgctggaacacccggaacgcctgcaggccgtgggtctcaacattcctgcggactgccagcttgtcattgaccccggcatccagttcgccctcatgacggtgctcattatggtggcgggtaccatgttcctgatgtggataggcgaccagattacggaacgcggcatcggcaacggcgtttccctcatcatttccgtcaacattattcacgcccttccgggtgcagttaccctggcctggaaaaccctggtgtacaaggacggcgcggttgtccccatgggagccatgctgctcgtggccctgattgccttcctgattgtcgtggtggcgctcgtcgtgacggtgacgcaggcccagcggcgcattcccgtgcagtacgccaaacgggtcatgggcaataaaatgttcaacggtgccacgcagtacctgcctctcaagcttaattactctggcgtgatgcccgtcattttcgctacggccatcctctcccttccgcaggttctcttctcccagatcgcccactacaacactacgctgcagtggatcgcgaccaagatgaatgactggctgaatcccgcttcttccggctattacattatttccggcctcatgattttcttcttctcctacttctgggtggcgaccatgttccagccctcccagatcgcggaagacctgaagcgcaacggcggctatattcccggcatccgtcccggcccccccaccgccctcttcctggaccagaccatgcaaaggctgacctttgccgggtccgcattcctgaccctcatttacttcctgccttccctgctgaatatcgggggcaatatcccctacctggttacccagttcttcggaggcaccagccttctcattctggtgggcgtactgcttgacatgatgcgccaggtggaaacgacccttctttcccgcaattacgacggcttcctgaaaaaaggcaagctcaagggcaaatacgggcatctccagggtaccggtgccgccgcgagcagccgcaccgttaccgtcatgtggattgttatcgccctgcttgtgctggccggagccatcgcctacaacgccatgcagtaagcctcccccttttttactgaaagtaaagatatgaaggaactcaagcatttcattctggttggggctcccgcatccggcaaagggacccagggccggtttttggctgataccttcggcctccactccctgagcaccggctccctgttgcggagggaagtggaatcctgcacggaactgggccggaaagccttgagctatatggacagggccatgctggttccggacgaaattgtcaacgacatggtgcgcggctggctgtcggagatgaactatggcgcgtggctgctggacggctatccccgcacggttgcgcaggcggaagcgctggaccattttctaaaccagcggggaacttccgtggatgtagtcgtctggatggatgtgtccagggaactcattgaacagcgcatcatgcgccgccgggaatgttccacatgcggttacgtggtgcagacgccggaagaggaatgttccaagtgcggagggaaaatggtttcccgcaaggatgacaacatggaagctttcgcccgccgctggaaggattttgaagccatgacgctgcccgtagccaggtactacgaggcccgcggcctggtcgttaaaatgacggtgtccgaagaacgggaacctgccgatgtttcccgggatctggcccgcaagctggaagagtaccggcaatagaaagaataatcccatggcagaacgaatccacatcaagtctcccggcgaggtagccaagatgcagaaagccggggctgtaacggcggaaatcttgatggagatcggggccgaagtccaggtgggacgcaccacgcgggaaatagatgatatcgcgcgtgaaatttttaaaaagcacaaggtaggcaattccttttaccggtaccgcgggtttcccggccagctctgcatttccattaatgaagaggtggtgcacggcagcggcggcccccgccgcatccagaacggggacattgtgagcctggacgtcggcgccattgtggacggctggcatggagacaacgccatgaccgtgccggtgggcatggtggatccggaaaaactgcggctgctggccgtgacggaggagtccctgttccgcgccattgaactggtaaggccgggcgccttgctggcggacgtctgcgcggcggtggagggctttgtgcgtccccgcggttttactgtggttcgggattttgtggggcacggcataggccgccacctgcatgaagaaccccagattcccaattaccgcccccattacaagcttccgcgcctgaaaaaggggatggccctggccattgagccgatggtgaatgcgggcaggccttccgttaaaattctggatgacggctggacggtcgtcacggcggacggcaaaccttccgcccactttgagcacacggttatcgtaacggacggcgcgcccctgattgtgacggaccgcccccgcatcgcgttgccggagcagctcggcattgctcctttgtaacttcagcccctccagggaatgacgccgccggaagcctccgttcccgtgattctggagaagaccgccgcccgccggatggtgtgggtggatgtggcccgcgtggctgcctgcatcctgattattgcgaatcacatggctttctattcggcggagctgtaccggtggatatgggcggagttcctggcggcgcgcacgcccttttttctgctggcggcgggctattttgtggggagagggtcgtttggccctctggatggcgggagccttttcctctggcggcggagctggtttcttcttcgtccgtacctggtgtggggactggctgcggccgttctgatcggctggtcccccctgcacgaatattacgcgtcttaccggcctatgtatgaatggctgggaggggaaaagggagccgggttctggcctgctctcgcggcgttcggccgctgcctgggcattgccgggcatccggtggacactcccatgtggtttctgcgcgatatcatcatctataccgctgcggccccccttctttaccgtttgggggactatctgctctgggcgggcatggtcatgctgtccctgaactattttgcgctggatctggcggatcatgattatcccatcgccaacagcctgggatttttcctgctgggaatgtatgtttcccggtattccctcccgttcctgacggaatccgtgcgccggtacgcggtgcccttcctggtcgccacgcttgcgcttacctggtggctggcaggccaccgggaccagcacaactccatgctcatcgccctgggcatgctggggctgatgtccctggccattctgttcacggaatggtttccgcgtgcggccaggtgggtggcggggctggctccggcatgttttttcattttcggaacgcattacatcgtcatcatcctgctgcgtgaaagcggctggattacatggaagggggcagcctgggacatgctctggctctttctggttccggtcattttcgccgtgctggcggggctttttttctgcatgaaaagatttgccccgcggctggttcccctgctgggggcctatgggaaatagccgtcttgaagagccgttccgccgggacgggaagggagccgcgcttatctcttgccgtcaaaaggcaaattctttattctttcctttgctggaaggggcggaagcggcttttttgtcacgttgccgttcttgctccacggccgggaaacaatacatggtatggcaatgattcaaggcgagcaggttcaggattcggaattatcaactcaggcggtgatctatctgggcccgagctccatgagcctgatggtggctgaggctgtccgggacaggattcgcctgctggatttccttcagcagcccgttccgatggcgcgtgacattttccggttccaccgcatttcccggcataccatggatcgctgcgtgcaaatcatcggcgactatctggaaattctcaaggaatacggagccggcagcaagctttccgtccggttcatgatttccaacatcatttccgaggcggataatgtggacgtgttcgtgaaccgcatgcacgtggcccacggcttgcgggggcgccgcattgacgacggcaagatgacgcgcctcatttacgtgaaggtgcaggaggctctggcccagtatccggggttcagcaagaaaaaagtgcttgtggtgcatacgggaccgggcaatacccgcgtgcttctgttccagaaggggcgcatcgtgcgttattcctgctacaggctgggaacgcaccgcacgggggaggctgtcggggaaatcgagtacggagacgatgtggcggagctttccattctgcgggagcacatgcgcgggcaggtggaccagatttgcctggattacgggggcgtgaagggcctggcgggccttatcgtcatcggccaggaaatgcagcagctccgggaccgcctggcccccacgccggaaggcaaggtggcgtgttcctccctggcggcggaggcggagcggatgtcccgcaccactctggaacagcgcatgaatgtttacggtgcggattttgccggggtggactccctgctgcccgccgttttgatgacggaaatgattgcccgcagcctgaacctggatgacgtcatcattcccgcgagcggttatgacgaggagttttcaagcagcctgatacgtgcggaacagcatccgggggatctggaggcggaggttctccatttcgccgggattctggcggacaggtacaaggcggacaaagggcaccgcgagcatgtggcgcgcctgtgcatggaaatgtttgaccagcttcaggacctgcaccgcctttccgaacatgaccggctgctgctggaagtggcctccattctgcatgaggttgggtctttcatcaaccagcagaaccaccagctccattcccagtatatcattctcaacagtgaaatcttcggcctttcccgggatgatgtggaaacgatcgccctgctggcccgctaccaccggcatgaggttcccgccaattccgatcccatgtacggggagctggaactgagggaccgcatgcgcgtagccaagatggccgccatcctgcgcgtggcggacgccctggaacgcggccatgcccagcgcgtgaacggcgtccgggcgcacatccgcgggcgcatgctggagctggagcttcagggcgtgcgtgaaaccgccgtggaagacctggccctgcggctgaagggcgacctgtttgcggatatcttcggttatgacgtcgtgctggcgccccagcggtaggctgatttaaaaaacttccattttccatttttcccatgtctgacgaatatatcaacagagaactttcctggctggaattcaaccagcgtgtgctggaccaggccgtaagaacggatcttcccctcctggaacgcctgaagtttctggctattaccgcctccaacctggatgagtttttcatggtgcgcgtgggcggccttcagatgctgcggcattccggttcccgcgtgaaggatatttccgggctgacgcccacccgccagctgaaagccatccgctcccgcgtgggccgcatgattgaggaccaataccgcctgttccatgaggaaattctgccgtggatggaaatcaacggcatcaatcccctggcgatggaggatctcagcacttcccagaaactgacgctggagcagtatttcaacaaccagatattcccgcttctgacgccgctggatatggatgctccggaagctcccgcgctgccatccctcaagctgctgatgggcgtggaactgcgcgacaatgagaccggggaggtgcgctccgccgtggtggcccttccggacggcctgccgcggcgcgttcccgtcccttccgcggaggcggagcgctacgtgatgctggaggaccttatccgggagtgcatcggcaccgtttttcccggtgaaaccgttctttccgcagcggtgttccgcgtcacgcgcaatggggacattgccgtgcaggaggaagacgccctggacctggcggatgagatggaggaagtgctcgtagcccggaaattttccgaatgcgtgaggctggaaatagagtcctccgcgcccgcccccctgcatgacaagatcatgcggattgtaggcgccgggaaggaggagacttatgacctcaagggccccctgatgctttccgacttcatggaaatggcttttgcccccggcaatgaccagttgaaggtggagcagtggtccccgcagccgtccccttccgtgaatccggccgtcagcatttttgaaaacattgccggcggggacattctgctcaatcatccctatgaaagttttgaacccgtcctgcgcctggtggaggaggcagcggaagatccggacgtcatcgccatcaagcaggtgctgtaccgtaccgccaggaactcccgcatcgtggccgccctgaaaaaagcggcggagagcggcaagcaggtgacggcgctggtggagctgaaagcccgttttgacgaagcccgcaatttggaaaaggcggaggagcttcagcgttccggcgtgcaggttgtttacggcgtcaaggggttgaagacccatgccaagatttgcctggtggtcgccgggaacagggcatgctgcggcgttactgccatttcggcacggggaactacaatgagaccactgccaagatttacacggatatttcctaccttacctgcgacgaccagctgggagcggacgcttcccagttcttcaattccgtgacggggcgcaccaagctcatgcgcttccgcaagctgtatccctccccggtgttgatgaaggcgcgccttattgaacttattgaaggggaagcggaacgcgcgcggcagggggaacccgcccgcatttccgccaagatgaacagcctccaggacgtggaaatcattgacgccctgtacagggctgcggacgccggggtggacattgaactgaacgtgcgcggcatttgctgcctgaaaacgggcccccggcccaacggcaaggtaatccgcgtggtcagtatcgtggacaggtatctggagcacgcgcgcattttctttttccaccacggcggcaaccaccagcttttcatcgccagtgcggactggatgacccggaatctggataaaagggtggagcttatggtgcccgtcaccaacgggaagctggcgcgccgcctgaaatccattctggacgcctgcttcagggacaatgtccaggcctgcaatattctgccggacggcacttccgaacatgtcgttcggaaaaagggtcagaaagccttccgtttgcagcagtacctgaccaaggaggcgcgccgcctggccaaggacaaggaacgggaacgccagcagatgctggaaccgcacacgccgcattaaaggcgctcgtcacgggcgtttgaaggttctccgggaacagtctccggagtacgccggttttccggccgtctgcggagactgcccatgttttccggagagggggggaaagcctgttacggttttctgccgttaagaatggacagcaattttttcagccatctgattttgtcccggcgtttccggaaaatatggccccgggagaagaacagtttccattgctggccgcggatatggcgttggaggagcgggaccagcccctgggaaatcgcatccagttcctcccggaacgcgggaagcctctttgcttccggccaccagaaaaaggagtacaggatatagtggaactgccccatggttccgggggtgtcagggagccgccatggtttttccgggcctaccatgtgcagcagtttccatgaacgcccgcaggatatggacggaacgttttcaaattcggttccgcgcaggagccgtgttttttcttcatcccaggtccaggacaggaattggaagttccattccggaggcagcgtcgtcatgtctccgtgcagggcgatatttaagatgtcctggtccggataggggaagggttccgggcggttccgaagctgttggagcagccggtgttccaggttgcggcggcgcatctgatccagatccagcaccaggacgccggaattgcagtaggaaaggggggaggaaaggtagttgcccatatattccagatggggatgcatcgttcctttttcaatgctccagagggccaggccgtctccggccgccgctacggaagctccccgcaaatcggaaaaatacagttcggctacgtctccggccagcaggacatctgcgtccagataaacgatcctgtcgtactgcgggaacaggctgccggccatcaggcgggcatacgcaaggggggagtagcggtccttgttgccgttttgaaagagatggcggaattcttccggaagttgcaggaaagaaagggaaacctgcggaaagggggcggcaacctggttcagctcctgtattattcgcgcgtccattccgtcgtgaacgatgtgaatgtcataaaagcgtccggaactggcgtgaaggcaaagggtgtgaatggctacggccaggggcaggccccagccgccggtggcggaaaacatgacggggatgcgtgatttctccggggatgcgggaacgggcggggctgtcatggcatcggggaatttcatgggaagggtcttgaaaaaggggctgagggaaggaataggccggggagggaaagagcatggaggctccgttcaggccggaaaagggatgtctgttatttgaagaagggagaatctgaagtctttaaatgccggggccgggatttttgcggggggtaaccgtttttccccgcatggaaaataatttggcggttttcgttcatttgtccgtttcatggttcggggcggcttttcgggcattcctgttcctttggcggttcctgccgggcggagagaaggggcaggagcagtccggctgttttccctgcctggtacgcgcgatccggaggggagaaatggaagggatctatatatctgcgcccctgcatgaagtcatggtggtctgaaagaaccgcgccgggcagggaagatgccgcctcgcggacaatggcattaaaggcggtgatgattttctctttttcttcattcagcgtaccgtccggcccatccatgatggacgtactggttgccaggatgaggaaacggcagcgcttgctgagctgggagacgaatgccatgtaatttttgcggaagtcatccacggaaatggcggagactttattggtgacgtgggaaccgaaggaaacaatgacggcttcgtatccggcggagggaaaatatcctgcaagggtggggagatagtccggatctccgggaatcagcgtggaggagaacaagtcaatgtcttcctgaagttctgaggcaaggggccgccacaaatgccgcatgacggaaccgccaatgagcagtatgcgcgcctgccctttttctgaatgaatggccgtaatccagtcggtttcctcacggtaatggggaggggccgccaatgtcctccagcgggcaagcatgcgttccttccggcgttttcttcttttctccagcaggcggtgtattttcccggaacgccttctcacccacgtttggccgaaaggcagccggtggaggatctgttttcccagattccggtaagcttccgggaaatcttcttccccggagccgggcagggggcggcattgcagcatatcgccgcaaaagtcaatgaatggaaggttcagcttgcctgccagcgtgcgaagaagggcgttccaggcttcaagggcgcccggttcttccgcgtagggatgccgggcgctgccgtagtcggagggcggggatgacaggaggatcaggcggcgcgtctgtttccgcagaaaggcgaaaagcctgcaaagcatatcttcggcgctttccatgggcccgcccccttccgggggcttttccatgagcctgccgttggccggggaaagatgcaggggcggccacatgaaaagaatgatgctgtagcgggcgccggaaaggctgtgttccatttgccgccacaggcggggatggttgagcgggaaattgaagatgagcgtgtcgacagccagtcgggacgatttcagatggccatggttttttgccagagcggaactgccgatcaccagcattctgtcattgccgggcaggaggtggtcgtgttgctggtaggaatagatgaacacgggaaaaacagcagttacagggatgatcgggggagcttctttgcagaataaagagtgtatccgaggatttggagcgtgtctattccgtttttggaaaacctcagccggaacattttccttctggcggtcttgaacttccagaagcattgaaggaggcgcaggtaaatccaccgtccggccagggcggcctcaagataagccctctgttccctgggcatcccgcaaacgtgttcggaagtgatgtccgcctcccgccagagttccgcccaatgcctgagccgcccggccggcatttcattgtccggaaaaagcagggggacaatataattcatgtaggccgtgcggttgctgtccaggatccccttcccggagtttttccctggtgagcatctcgaatacggcgtaataacttgcgggccgggtttccgctttccggttgcgagaagaaacggattggggatcgcccagcccgtagtggtagagtttttcagaggtgagggcgacgctgcggcagcgggcgatggcccgggaaacgtaaagggtgtcttctccgctggtgaaggaagaaggcaggcggacttccaggggggcggaacagccggggagtatccgcctgaacaatttgctccagacgacgccggtgatcctgtcttccagaaagagcctgaatatttctcctttctccgtaaagacgccgtcgcaggcggtgttttcaatatgaaggagtttttcctcagccattccgcgcgattctccgctttcagccggaaggaagggggaataggaacattggaccatgtccgccccgctttcttccgcgagccggtagagccgttcgtacatgtccggctcaacgtagtcatccggatccgcaaaacccaggtaaggcgccgcggctgccctgattcccgcgttacgggcttccgccctgccggaattttcctgtgtaatcaggcggaaacgactgtctccggaagcatatttccggacgatgcctccggacccgtcggttgaaccgtcgtccacgcagatgatttccaggtcgcggagggtttgtgccgccaggctgtccagacagcgcggaagaagaggctccatgttgtagatggggacgatgacggaaatgaggggtgaggggagaggcatggtctgctgtataggaaacggggttatatccggagccatgagccggggatgagtgcgtcatccgtatggtaccggtcgccttcctccctgttgaaccagatgcgcggcgcgatgacgattttctccgcgtgttcgttgagccaggccgcccaccaggagaaagtgctgttggcgatgatgtggtggcggcagtttcgcatcagttccagatcgaagtagccggtgccgccgtcattgatatccacatggacatggggcagggcgggcctcaggttttgccgggcccattctatgtcgtccgagaagatgaagtaacgcagggattcctgcggagcgcctgccgcccgcagccttccttccatttcagccatgctccggaggtagtattccagaggcggcggagaaaggtaggggttggaaaggtaatccgttctgcggatgtgcagggaaatggagcagcatgaacggatatcttcaagaatgcgggcgttttccggagtcaggggagttttcagacggaattccctgcaaagctgttcccggcagtggaggaagtattgttccgtctgaaaatatcccttgaaataggtatggcggcggggaggagctgcgagaccgggatcgaacccgtgccgtttttcctcccggaaatgaggatatttgggagcggcgaacagggaacgcaggcaggcgggaatacgggacttgcggaaagcccaggggggagggcctccttcaatgggaagggaaacccggaagtgatggagttcgcagaccctcttatcatcatgttcatatgatgaggtttccagtcttgcttttcccccttgccgggagagcgcgaagaggaaggcgtattggaacagctggtttcccagccctccgaaaagacgcatgactattatttttccttttgccatgttcaagcaggggaaggggttaaaacgtgatattcctgcgtatttcctccagctgttcgcgtacttgccgcagccgtgccctgccatttctcctccatgaggggacagggcagaaatggaggagctttcggcggattccggtgtttttgccggccctccggagccttcttccgaagtctgaaaagccggaggatttcaacaacaggcggaaaggaagatgcagggaggccctccggcattcggcggccgtgcaatgggcgttcaggaagtcccggatgatgctgtaaagtatttcctgctccggcggggagaaaggcatgccaagcagcctcagttcaaatggttcatgctcaataaagcggacgagatggccggcttttcttttccagagatggcgttgttcataaaactcttcaatcagggaaagccaccgggggatcatgggcaggatgtcggcggttcttttccgtatctggtggtggttgccctgttcatgctggcggtaatggtaaacggcctccggacagaaggaaattttttctgtcagcgcgagcacgaaatgcgagaagaggccgtcttcacaggggtgaatgccttccgggaattccagattgtttttcaaggggaactcccggcgcagaaatatgccgcaggtgggcagggcggggattttgtccggcggaaacctgtcgcagaacagctttcccgctacggtcaaatcgcttgctccgcggtccgaggcgtccagaagatgtttgagaaaggccgcgtcgatgaaatcgtcaccgtcaacaaaacacaaatagcgcccggaagcgtgccgcatgcccagattgcgggcggaggaaacgcccctgttttcctgttcgaggcagcggattcttgagtcctcctctgaaaagcgccgggcgatttcccctgacgagtcggaggacccgtcgttgacgatgatgcattcccactccgcaagggtttgccggcggatgctgctgatgcactcttcaagatattgttcctgattgtaaacgggaacgatgacggaaacctggggctgtggcgggcgggttcgggtcatgggcgggcctgttgaggttcggagggggagcatgcggcaagggcccgctccagattggaacgggattccctgtcaatatccctgcccagttggagaagcgcctgctgcatttctgcgtattcctcttccgtctgcctgatggcgcggagcatggcgccgccaagcgtttcttccctgtaaaggagtgcgttcctgtcgttgaagccgtagaaggaagcgaatttctcatggataaccgggattttcgcgaatccgtaaacaagctgggcggaaccggtgacgccggtggtaatgtagcggttatgcgccggattgccgggatcaagcaggggcaggaaatagtccgcccgcctcatggcctcgtacatggcggggaagtcgagctttccggccacatgcaggaaggggcgcagatggccggggatttttcccagctctccttcccccacgatgatgacggaaaagttcctgtacccttcattgcagacggtttccagcgcctcaaccaggagttcgtggtttttccgctgtgcggagagggaacctacggtgatgaacacgggttcgcggttccggggcgcaggcgggatttccccgaaaaagtgcggattaaccatcatgcccctgggaaaggagcccagcgtcagcagccgtccctggcggtcaagttcttcttccccgaaccgggggatgtcctttaattcatgttcgacggccagaagattggcgaatttgtcaagccccgtcatatgaaggaaacttgcccagcccggaatgtcataaaaggcggatgttgatatcaggatggcttcgtaccgggtgaggacgcgcgctttggccaggcgcttccatgaagtgcacatggccgtgaaaatatggatatcgccttccttgaaacaacacaggggcgattgcctggccaggctgtgatgcatcaggacatcaacgcggtatcccatgtcgagcaggtggcggcagaaaccggggatgacttccccgtggcaatagttgggttccagaataaggatggtgcgaccggccactggatgcctgcgccatgcgcgcatgcttcggcgggcgtcccggtcatagtcggacagaaaatcgcgcaggaaagtgcgccattttttacgcaggttccgaaacggaatacacatggtcagcaatcggagcatgactgtctgcgtatgtgtcattggtttcatggtgaaaaattgcaggaaatataatgaatatcgcctgacgcggatgatgaatggcccttgttaccgttccgggcggtttttcgcctgccgggtaaaaaagaatacgttgtgtgacgagggctgaatacttaataaattcatactgaaaagcaatatcaaaaaactccttggcgcatgatgccggagtattcctgacggtttgaattttccgccgtattgcagccgtaccacagccctccgtttccgttattcccgggaacttccttcgggaggcagcctttgcatttctttccggaaacagtttccctcttccggttgttccgtttttcaacagatggcgttgctgttttttcttgatgtgaattttcaatccggataaaaaaggatgcttccgccatgagcgtatccgtttccatcattgttccctgttataatgttgccgcttatttggaccagtgtatggaaagcctggccggccagagcatggaagatatcgaaatcatttgcgtcaatgacggttcttccgaccgtacggcggagatattgcgcgaatggcgggacagggacggccgcgtccgggtgattgaccggaaaaacagcggtgtttccgcggcgaggaacagcggcatggaagcggcttcgggaaagtatatcggttttgtggacccggacgacgtggtggagcggaatatgttccggcgcctgtttgatgcggccgtggaaaaagatgcggacgtagcggtgtgcggataccatgagttctgcgactgcggaggcatggatatgcctgaaagcggctggtcgccgtcagccgggtttttcccggaagaaaaagcggagcggttccggcgggggacgccctggagccggtgcgcgggaacggtgtggaataagctgatccgcaggaagctgctggaagaaaacggtgtgcgtttcgttcccggattgcgccagggggaggatttgtatttctgtttgatgctgttgactgttgctccgcggctcctgatccttcccgaccgtttgtaccattaccggagggaacgccccggttccgcctcctgcgggcgggatccccgcctgggggatttccgcatggatttgatgggcatggaatctctggcgcgtttctggggggagcgggggctgcttgattcacccgccgccttcggtctggtggactactgcatggagttgatgcgcaggcatttcatcatgaaagagggagcttttttcaaagcgtctccggaagaccgggaagttctgctttccggctggaaaaagtggctggagctggtgggcgcggagaacgtccttcccagtctggaccggtgggaccgggctttttgccgccttctgctggattgccccctccggagcaattttttctctgccctgcattcccgcctgatgtcgtcccgcaaggggcgccggggggcttactataccctgaaaaggcacctgatgaagtgaaaagggggagattccccccctttccctgttgttccggcgccgcatggggttgcggaaaggcggaatgcctgccggcatcctacaggcccgtgtagcacatctgctctttgagctgggccacctggaggtcttcccccagatattccccgatggagtagccgaagagcatggcggcgccggggccgttggcggtgagcatgttgccgtccagcaccacattttcatctttcacaatatgggcgccggcttcgttgagttcccggtaaacgtcctgggccgggtaggccgtgacgttcctgtccctgaccaggcccgctttggccagcacgatgggggcggcgcagatggcggccaccagcttgcccgcttcatgcatttttttgaccagatggatgacttccggcgtgtcgcggagtacccaggagcccgcgccgccgggcaggatcagggcgtccagcttgtcagcatggagtttatccagcatggtgtccgtgctgacggttacttcatgggtgctgaccaccttgtcggactggacgccggcaagcactacggccatgttcaggcgccgcaggatgtccagcggagccatgagttcgatttcttcaaatccgggggcggcaagtatggcgacttttttcatggttggtaagacagggggaggaagaggaacgttcaaggaaaagagcagcatgttccggtagccctacaggaggagaagaaccgggttttccagcagggttttgaattcggcggcaatgttggaagccttacattccggcagaatgccggcgttcacgtacagggtgacgggcaggatgagtttggacacggggcgccccgcctcaatgcccgttttcggcgtggtgcctcctatgctgatgatgctgtggggcatttccggcagcacggcgcgctgggctgccacgttcacgccgctgtcgcaaagaaggatgttgggcgcgacgctgcccgcggggagcgggcctgccgcgggggcggccaggcgttccatggcgatgttgtaaatcgtcttgccggaggcgttttcaataaagacgtatttttcccccttgtccagcaccatgagcagttccgcggcggcgtctccggccagccattccggctcgctggcgcatgctttcaccgccgcgcgcaccacgtagtcaaagaggctgtagcggccgccgatgagtttttcgcactggacggcgatgggcgtgctgatggcggccaggtaagccatgttcgcctccagggaatacaggtaaaagttgtctacgcgcgtggcgtggcgcgtgtcccggggcgccagcggggtctgcacccggcgggcggggccgtccgcggggcgcagggcggcccgtacatccgcggccatgattttgccccgggggccggtgccgcgcagcgtggcggggttcaggccggcttccgccgccagcctggcggccagcgggctgcatgttgcggacgggcgcggggggcagccgcaggcggctgcgccgaattccggctgaagcagcgcaatgggcgctcccgccgcggcggaacctccctccggcaccaggatttccgtcagggtgccgtcctcgcaggcctggagctccacatgggccttatccgtctcaatgtcggccagatggtcgccgacttctacgaagtcccctgtttttttgagccatctcaggacggtgccttcgcgcatggagtcggacaggcggggcatttcaatggtaatagccatggaggtgaatgttgaaatatggtaaaagagaggaaggcgcgccggaaggggcgggacgtctccttccggcgcgcggaaacgcggttacgcgctgtatttttccacgccgtcgatgaataccttgcaggtattgaagtcatcgtccagcagaaccatgtccgccgtgaagccgggggcgattttgcccaggccttccaggcccagggactgcgcctggttccaggaggtggctttcaccaggtcgctgaggggtttcccggtcaggcggtgcacgtttttcaggccgtgggcgtatttgagggtgctaccggccagggcgccggattcctgcagacgggccacgccgtccttcacgatgatgggcaggccgcccaggtctccggggccgtccggcatccaggagcaggccagggagtccgtaatcatcagcatctggtcagaatccttgttcttgaacacggttttgagcatgtccgcgcagaggtggatggtgtcgcagatgatttcaatcttgatttccctgtccagcaggccggaccccaccaggccgatttcacggtggtgcaggggggacatctggttgcagtagtgggtcaggtgcgccagccccgcggacttcgccctgttgaagtcctcatgggtggcggcgctgtgcccggcggagcaacggatgccgttggccgtggctttctcaatgaattcaatggctccgggcatttccggcgccagggagaccagcagcaccttggcgatggagttcaggttggctacttcatcgtaatccggctggcggacaaaggcgggattctgcgcgccgcagcatttggggttgatgaacggcccttccaggtggacgccgggagtcttggcgaattcctggttcttcatgtattccgccacggaggcgcatacgtcttccagcaccttgggggacagggtgagggtggtcggcagccaggaagtgacgccttccttcattttgcattccgcaatggtgcggaggctttccagcttggcgtcgcaggtgtcgcagccgccggcgccgtggctgtggatgtcaatgaagccgggaaggagcatgcggccttccgcatccacgaccttgtctgcggcgggaagttcgctcccagcgggatagacggcggtaatggttttgccttccatttccacggcagccccgggcatatcaatgccgggggagatgatgcgtgcgtttttaatgagtgtcttcataaaaatgaatggttgttggatggatgtttatcgtcgtttttctccgttcgtccgcgtcttcccgcctggcctccgcttcctgcggaaaaccgggaatgggcggcggcgcaccggagatcgttcatgccgctggcagcctcctggttatctggcggcgtccagggttttgttccaccgggctacgcgggcggcttccgctttcagcactgcggccgcggcgttcttgtccagaatgcggatgtccttgattttgtccccccggacaatggagttgacgacgtcctgccctttcagcaccttcccgaagaccgtatggcggccgtccagatggggcgtggccacatgggtgatgaaaaattgggaaccgttggtgccggggcccgcgttcgccatggaaagcacgccggggccgtcatgcctgaggtccggggaaaactcgtcttcaaaactgtagccggggcctcccatgcccgtgccggtgggatcgccgccctggatcatgaaattcggaatcacacggtggaaggtgatgcccttgtagtaccctctgctggcgaggttcaggaagttggctacggtgacgggcgccttggaggggtaaagggccagttcaatatcccctttggtagtggagatgacgacattgacgtccttgaggccggctgtggattccgcggaggcgctgaagcacgccagggcgcacagggaacacaacagaagggtgagatattttttcatggctttttgttttcccccctatgttgcccgaataaaagcagggttgcaagtaaatcgcgcgccctgacgggagaatggcgcggggcgcgccaatgcgggaaggtttttctctgaagagggatttttaaggatgggcgcccggttgccggcccaggactaccttgagccggaagccgcgcgggaaaaacggaagaccgcccacgccatgaagaggctgaggattcccatgacgacgaattgccaggagggggggatgaccagcatcatggcgtattggaacccgacggccagcaacccgagcgcgcagtccaccaggttgccggcggcaatcatgtccccgcgtttgtcattgtccgcccggtcctggaaaaaggcattcagaggcaccaggaacagggcggcggaaatgcccgccgccatcagcagggcattaaagaccggggaagccatggagactgcggccagggccgcgcaactagccgccatcagcacgcctcccgccacggaaacattcatccggatgtggcggcggcaaatcacggaggcgagaatgccccccagcaccgttcccccgctcatccaggccatcagcacggctcccacggagctgaagtcatccccgccaccggagatttccttggccatctggatggtcatcagcatgaccgtgccgccgaagaaccagaaatagccgatgcccatctcgctgacgcgcagattgcggtttttccacagcttgcccagctggtggaagtgttcgtaaaacagggaccaggagaaggggcggccccccccgggagcgtaccggggcaggcggaagctggaggccgccaccggaacggccaggagcagaaacaccaggcatgggaaagaggcggcataccatccgtcattgatgccggagggtttcagccatgcgtcaaaccactggaagaagccctcccccagccagaggtgccagatggtatccgtggaaggctccagcaggtagcggaaccagatgaagacgccgatctggccgatgagcaggctgaggatggaagccatttccacgatgccgctggcgaaccccatgcgggaggtccccacgatgtccttgacgattccctttttggccgggctgaagacggtggcctgcacggcaaagacgcagaaccacaggatggccccgttcagattgtggacgcgcaggctccagtacatgcccgccagcacgcatatctggagcagggccatgaattggatgatgcgcgccttgcagaaacggtccgaaagccagccgacgaatggggagaacaggatgaagggcagcacgatgatggcccccagcggatattccaggtccccctctgcgccgtacagccagacgcccaggggaatcagcaggaattgagcccctttttcattaaaggagttctgcgcctgaatcagcacgagccgccagaaagctccccatggaactttgcgggcgtgtcctggcgtgtgggcgctggaattcatgaagttacaggctgggctcctccgctttttccaggccggagccgcggaacaggcacagcacgccgatgacggcggtcaacagggcgctggcaatcagggaggcttcttcactgaaaccgcacatttccgggctggagaacagatattggaatactaccaggctcaggaaggcggcgggggccgccgccggccagtagcagcggtttttgctgcgcaggtaaatggaaacggcccagagcgtggcggcggccagcagctggttggcccagccgaagtactgccagatgacggcatagtccatgctgctgacggcaatggccgcggcgaagagagggatggcgatcatcaggcggcggctcagctgttcctggctcagcttgaagcagtccgcaatcatcaggcgcgtgacccgcagggcgccgtcccccgtgctgatggggaggatgaccacgccgatcatgaccaggatggagccgacgctccccatccaggattcggaaatcgtctgaatggccagcgccggagcctttccgttggcggtagcccctcccagggcttccggagagccgtagaaggtcagcgcggcggcggcccatatgaaagcgatgatgccttccgtaatcatcgccccgccaaagacgggcagcccttcccgctccgttttcagacaccgcgccatcagcggggactgcgtggcatggaagccgctcacggctccgcaggcgatggtgatgaacatcacggggaaaagcgggaaatccgccggatggcggttatggaaaaagtccagatccggaagcacttccatgcggggcaggtgcatccaggccggcatggaatccgcaaagggcgccaggagcatcacgcccagaatgcccatgaccatgatgatcagggcgaccgaaaaaagaggatagacctttcccatgatagcctggatgggaagaatggtcgccagaaagtaatagccgaagatcatccaaacccatgccgaaacgctccagcccgtcatgggggacaggatggcggcgggccccacggcgaagacgacgcccaccagcacgctgaatacgatgcagacggcgcggctgatccactgggcctggctgcccaggtagcgccccaggatttccggcaggttttcccccttgtgccgcagggaaatcatgccggagaagtagtcgtgcgccattccgcccagaatgcagccgaaaacgatccacagaagcgcggccggcccgtacagcacgcccatgacggcgccgaaaatgggccccagccctgcaatgttcagcaactggatgagaaaaacgcgccagcgcggcatgaccacataatccacgccgtccgtacaggccacggcgggagtttgccgggaggcgtccggacggaaaatcctttccagcacccgcccgtaagtgaaataaccggccgccaggaccaatatccccagaatgaaatagcagtaaccgttcatgttggaaaaagggccagccatctcatggacaggctgtccgttcacggaacttaacttttctcccgccttctggcaagccgttagtgaaaggggggaaatagggaacggattccaaatccgaaaagtaaatccacgcctctttattatgcataaataattggtgttgtaaattttatgatggttttaaatcttccgcggcaaagcttctgattataggacgccgctgttcctatatttgtataaacatctcgtttctattgtttagtgttgacttcggatttggaatccgctaaacggagaaggttgacaccattcaaccttccccagttatgaagaaaacattgataatcattgcgtccctggctcttggcgcggcagcctcccaggccgcggtgctgtgcaccactacgtttaaccggaccgggacttccctggattccgtcactgtgagtacggtctccgatgcgggactctccacttccacctcgattagctccgataatttcagcaaaaatacttcgggcaatgacctgctggctaacggcactattccggcctccgtattttctcctaatgccaatgtgggtaataatcagaataatacatggagcgtttctttcacgtttaccaacgacggttcccaggatatgctgatttcttccattgatctttccatgatagggttcactggagcgggcgccgcgcagaatgccggaggcggtgtggccaataacaattatgttgggggagccgacggcaatctgaacaaacctgtcaatatcacccttggcatgagcgggcagggcgatcagacgctggcctataatggcgccaccagtacaaatacatctacgggatcctgggatggcgttcgtacgggaagctatgaatatagcgatgtgttgttgaaagccggggaatccatgacgttaactgttacggcttccaaaaacgaggcctacggcagcggctgttttatcggtcttacgggaattcagattaatggggaagtggttcccgaacccgccacggcctccctggggcttttggggctggccgcattgatgatgcgccgccgcaggctctaagcatcttttttcaaccgggcccgttccaagaccggatttttggaacgggcccggtgcatggcattctgtaacagaataatgcatggaaagcgaattaagaatccggtgtcaacgtaaaattttaaaaagaaaccactttatccctcctgccttctctgaaaagagaaggcaggaattgcctctttttaaattttaacgatttatacaatttattatcaaaggattatattcttatccagcgtaaaaaacattttcaggattcttaatccggtagagaaaaaccgagtttctgttccagaaattcagataatctaaagttgccagaatcatgaagaaaacattccctgtcattgtctccatccttgctcttgctggttccgcccattcggctattgtgtttgattatcaggcaaatcctcaagcaacaacgagcttttaccagcctgaaaccaccggagcttccctgaccagtcagacattcactggggtttcaaaccagaagacgggttccaactacgttgactcctttttgagtcccaatataaatgtcggcaacgggaatgcgtggagcgtctctttgtcctttaccgtaacggaagccgtcaccgttgattccatagctctgaatctttttacattcagtggtgccaatgcggttcagaatagtgaccggagaggcgcttatacctttgatttgaagctgggtgacaatgttttggctagttgcagcaattctaacctgacttatctgggtacgggtgatgttaatgccggcagttcccaacaggccagcgtgggaacgctggggcaactcggagggtcttccggcatccatgaggaaggaacgctgaaccaggcagtaaccctgtctgccggcaatacttatacccttgagctttccctgaacaggggacaggaaacgcagggttactttgtcggattgggcgccattgaactgaatacgatccctgaaccggcgaccgcctctctcagtattctgggcatggctgcactaatgatgcgccgccgcagacgttgaagcccatgtccctgatacacttgttcaagccgtccgttttttctttgaaactggcggcttgttcattttcagccaacaaaattcggcattttttaacatttaacatcaataaccggtatgattccccaggcagtccgttcttcggcgtgatgtcctccgggtcatcgtttcgccagccagccatgttcccgcaccgttttttttccgttctcctcttttttcttctgtcccttgctccagccaggtctgctgatgttgaatatgtctggaggggtgccgattaccagtggggttccctgtccaactggagtgtcggaggcattgccgcctcttccgcgccaggggccgccgcttccgcctatgaacattggatggtaaccaatggaacggattccgagggaaggacggatgtcggcggattgggcgcggggggccgctatttgaagggcgtcaggattgcggggcttaacagccagccggaaggcaaaatcccattgttcattaaaaacacgaacaaggatgtatatttgcgcgtggaggagggcggcattaccgtggaaaatgccggagaaggaggttattctgcggatttcggggtcgcccagctgcgcgtagccgcggaccaggagtggcatgtggctgaaggtcgcagcctgtatgtggggcatgacgatgacgctccgtccgggggattgtattccctgacttcggaaggcgatgttccgcggcgcgtgacagtgacgggcggaggcgccgtgcgcatcggggaagggatgctgctgaacaatatttccggcctcatcggttttgtgctgaacgccggaaagggaattccgacgctggatctggcggaccggggcatgggcaatacggtgacggtggaagacgctgcccgcctggaaggcatgtctttgtaccagggggccctggtgacgcgggaaaacgcgtccgtgactttttccggaacggaggccaaggcgtccggacaatggaacattggcgcggacacggagttggcgctggaaaattccacgctggacctgacggaggcgggtgtggacggcaacgtgattctttccggctcttccggcattaccggggataagggaacgctgcggcagacgcttctggatgatgcccgggtcacttatacggacaggaatgtcaaggcgggggaaatccggagcgtaggcagcaatgtgacgataacgctgaataattcctccatgcattttgacggagaaattccggaggtggacctggtggtgcagggcagctgcacgctgggcggcagcggcgccttttctggaacgattacttatgcgccgggaggcaccctgactgtggatggggatatttccctgcccagttcatccctgacgctggggcgtctccatgtggctacgctggacggcgtgccgcaaaactccgccgtccggccggaaacccctgcccagcaggcaagggaatatgtggttttgtttgattcctcctttgaggatttgatttccgaatggccgggtaggcatacgctgggcgtgcagttccggccggatatgggcgcccccgtcaccgtaaaggaactgcctgaaggggcgatttcatggaattatgatgccgcatccggctggctgacgctgcagacggatgtagcggaaaagccggacatgccggcgcatgtttccggagccaggcccaacattatttttgtcctggtggatgacatgggctggggggatatgagcgtcaactggacgcagcaggataaaaacggcaggcaggtgacccgcaggaatgaattcaagacgcctaccctagacacgatggcggcggagggcatgcagctgaggcgccattacagtgcggctccggtatgcgctccgtcccgcgcttccctgctgctgggcgttcaccaggggcattcccgggtggtgcgcaacaatacgtttgattaccctatcgagaattcccatacgctgggaacgctgctgaaaagcgcgggttaccatacggcggccatcgggaaatggggcgtgggcggaggcggacagagcggcaaggctctgaccgcggctccccacatgcgcgggtttgattatttttacggaatcatcaagcatttggcggggcattaccattatttgacggcgggttcccaggatatttacgaatataatgaccaggccgcggctccggcgtgggagagcgtcagcgcgaaagttccgggcaccgcctatgatacggatttgttcggggcccgcgccaaacagtggattgtgcaccaccatgagaaaactccttcccggcctttcttcctgtatctggctttcccggctccccacggcagtctgtccgctcccgcctgtgcctatccggcggggctgggaagggacggcggcctccagtgggagaaaaaagacggctatgaagcctgcaataccgctgcggacggatggtcgggggtggagggggacttttctccggatacctatatctacccggaacatgaggtttttggaaaaacggaatcccgccacgccacgatgattcgccgggtggatgacgtcctgaaggacatgatccagctgcttaaggatttgggcattgatgacaatacgatgattgtcttcacgtccgacaacggcccccacaatgaacccggttccggcaattacggcaacggcgcgcaggatcccgcgtatttcatgagctacgggatgatggacggcattaagcgcgattgctgggaaggcggcatgcgtgtgccggccgtggtacgctggcccggtgtggttcccagcggaatcagtttgaatgccagccagttccaggactggatggctacttttgcggacgcggccggagtgcccgtgccgtcccgttgtgacggcgtttccctgctgcctacgctggcaggggtgccggaacgccagaaaacgggcgttatttatgcggaatatgcctatagcgggagcactccgaattacagcgatttcctccagcaacacagggggagagggcggcagcagcagcagattatatttgtggacggcttcaaggggattcggatggggaatgccgcccccactacggattttgaaatctacgatacggaaaaagacccgcaggaagcggcgaatctggcggcatcccgtccggatctgcaggagaagatgaaggcgcaggcgctgcgctcccgccgttcctcccccattgcctccaccagttttgacgccggttatatcgcgcccgtttccgcccccgctggcctgcgggagggaaggctgcgctggcgcgcgtggaaccgctcttttgactgggtgccggatttccggcagctggaggaggggccctgttctacgggtgcgacggatgtttccgacgtgctcagcgtcaaggcggggctttccggtcagaagggggtggaattgacgggctatctcagggtgcctgtcaccggggaatatcaattttaccttcagacggattccaatgaaggctccagggcttttgtccatttgcacgatatgcagctcattgatgcggattatgcctatactcccggaacgcaggctgcctccaacgcgcgggaaggcgtttccggcgatgtgcagcccaatgccgttcagacggtgaagcttactgcggggctgcatcccatccgcatcggctatgtggggaaggcggcttcctcctccctttccctgcaatgggaggggccggaaaccagcggcagggaacccattcccgccagcgcgttttcctatgaatacgtgaatcccttcaatctggaaaagacggaggaaacggtaggatgcgccgcctccggtacggggctgaccgtgcagacgcatcttccctggacagtttcctgcgaccagccatgggttacggtttcccccgtttccggttccggaacctcagtgctggatattgccgtggaagcaaacgggctgcaaacggagcgggaagccgttgtcaccgtcgtatgcggcggagagcagaggacattcacgctgcgccaggaagctgctcctgccccggcagggtacgacaagtggaagcagggccattttgcggatgggacgccggatgagcaaatggccccggatgcctgccccgccggagacgggatttccaatttgatgaaatatgccacaggcatggatcccaaccagccctgcgggagcgtgacgaagctggctgtccgcgaggaagcgggcgggaaatacctcgtgctttcctggcctgtgaatccggaggcgacggatgtgacgttccatgtggaaagttcttccgacctggaggagtggactgacgaaggggccgtcactccggacggggcctgcggggaattccgcgatacggtcgcgctgggaaaaggctctccggagcgccggtttctgagattaaaggtgacgagatagggaatcaccggtttctctttccgtttcccgatgatgattccttacgggaacagggaccttccggccctgctgcctgcccgttacggattttttccggaagcgtgattctgcgtgttccggccctccgctgtcccggcgcatccagcgcggtacggccggggacaccgtgccttagccaggggaagaatattactccccgtcattttccgcatcggcagggggggctttgggcaggttcttgtcaatgtcttccagaaggttgaccaggtcaacgccgcgctgggcggagtcgtccagacggaaggtcaggcgcggcgtattgcgcagcaccacgcgcctggccacggcggactggataaggccgtgacgggagttcagtttttccagcacctgggagggagccattttccctacgacgcccacccatactttcccctctttcagatcgtccgtcacttccacttcaatcacggtgacgattgttccgggaaattcaaaatcccgctgaatggtggtgcctatttcccggcgcaggagttcgtttaccttgtcagtgcgtctgctcatatgaagggatagagtgatgaagggaccgattggttcaatcggagaaggaggaataagggaaaggacagggacggaggtttcccggacgcccggaggagcgtgcaaggagctccgtccctgttggatgatttttgttgggggttacagcgtttgctggattttttccagcgtgtagcattcgatgatgtcgcccgtttcgtattcgttgaagtctccgaggcggatgccgcattccagacctgccttgacttcttccacttcatcctggaagcggcggagggtggacattttaccgtcaaagacgggcgtcttgtcgcggatgacgcgcgcctcgcagctgcggaggattttcccgtcctccaccatgcagcctgccgcacggcccttgttgagcttgaagacctggagcactttggcgtggccgatgatggtttcgcgcgtttccggttccagaaggcccagcatggcatcccgcacctggtcaatgagttcgtaaacgatggaatacagttttacctgcacgccttcccgcttgagcagtttgacggcgttggcttccaccttgacgttgaagcccaggatgacggcgtccgaggaggaggccagcagaacgtccgattccgagatggggccggcggaggcgttcaggaagacgcattccactttgtccgactggatgtccagaacagctttcctgatggcttccacggaaccctgcacatcccccttcaggagtattttgagctgggctttctgggtgccgtcccccatcatggcgagcagttcttccatgcgtgccttgcggggctgggccaggcgctgcttgcgcagttcctcctggcgttcttccccaagctttttggcggcgcgttcgttttccatttccaccagttcgtcccccacgttcggggtttcagagaagccggtgatttccacgggcatgccgggccctacctttttgacgcgttcgccgtggtcgttgaccagggcgcgcaccttgccggcgtaagggccgcagatgaagggcatcccgacgcggatggtgccgctttccacgatggccgtggcggagctgcccgtgccgggttccacgcgggcttcaatgatggaggcgcggcagttggccttggggttggcctggagttccagcacttctgactggaggacgagaaggccgagaaggtcgtcaatgccggccccggtcagggcggagacttccacgcattccacatcgcctccgaagtccgtgggaaccagcccttcttccatcaggccgctcttggttttgacggggtctgcggccggaaggtcgcatttgttgatggcgacgatgatggttttgccggctgccttggagtgggcgatggcttcccgcgtctggggcatgatgccgtcattggcggccaccaccagaaccacgatgtccgtgacgtccgcgccgcgggcgcgcatttccgtgaagatggcatggcccggcgtatccaggaaagtgagcgtgctgccgttgtagtcaaccgtataggcgccgatgtgctgggtaatgcctccggcttcccccttggccacgcgcgttttgcggatgtagtccagcagggatgttttgccgtggtgcacatggcccatgacggtgatgatgggcgtgcgcgtgatgagggtggctttgggttcttccaccaccggcacgggttccggttccttgacgggttcctgctgggctttcacgccgccgcccttttcccgtttttcacgggcgaatgtgtagccgtggaggtcgcagatggaactgacggcgtccgcatccagcggcgtgttcgggttggcgaagatgcccatgcccatcagatccttgatgatttggaagggcttggctttcagcatgcccgccagctcggaaacggagacgggcggcttgaggttgatgattttatcgtctgcggagggttcttcctggggtgcgggcgcggcgggttctgcggcggccggggcagcggcgggcgccggagcggcgtcagcggcgcgcgacgcttttttcttgttgccggaaagcaagtcgagagcttctttcttgactggagcagggcgggagggagccggtgcgggggccggctggggtgcgcgtttctttttggaagatccgccgatcagatccaatacttcctttttgggttctttctcttcttgtttattaggcatcttgatttaaggttgttagatgttgagcgccgcgctcaacggttattgggagataaggtcccgggccttgtccagaatttgggcggcttcctctgcgggaatgcccatgctttccgcgatgtcggaagcttcaaatccggtgagggccaccaggtccgttccgcccatggtcaccaggcccatggcggtttcttccgggatttccaattgttcgctgagggttttggccgcagcctggcattggcgcatgacttcttcggccgcagcctggctttggcgtttttccgcttcctggacgtcaaagacgcgcacctggacatcccagcccatcaggcgggaggtgaggcgggcattctggcccctgcggccgatggccttggagaggtctttgtcgtcctggacgataacgaagatttttctggcttcctcgtccacggtgatttcccgcggttccacggggctgagagcttcccggacgaaggtgacggggtcttccgtccattccaggatgtccactttttcattgttgagctcccggacgatgtttttgacgcgggcgccgcgcatgcctacgcatgcccctaccggatctactttgtcgtcatggctgatgacggccactttggtgcggtagccggcttcgcgggcgatgccgtggatttccacggtctggtcgcctatttccaccacttccgattcaaagaggcggcgcaccaggttcggatggctgcgagaaaggatgacttccgggccgcgtgcttccgtgcgcacttccaccacgtagaagcgcatgcggtcgccgacgctgtagtcttcattcggcacgcgttcgcgggaggtcatgacgccttcagatttgccgaggtgcacaaaaatatcccccttttcaaaacggcggatggtgcccgttaccaggtctccggcgcggtccttgaattcgtcgtagagcatttccttttccgcatccagcagtttctggagcatggtctggcgggcggtctgcaccgcgatgcggccgaagcccttgggcgtgatgttggtggggagcaggtcgtgaagcacggcgtttttgtccagcttgacggccagggaaagggggatctggttgaatttgtcggaatattcttcatccggcaccacttccaggtccgcaaaaatacgcaccttgcccttgtccacgttgatttcggccctcaggtagttgatgctgccggaaccgggaaccattttgcggtaggcggagagaaaggcggactccagagcgaggagaattttttcacgggagagccctttttccctctcgtagtagtcaatcaaagctttaatatcgtttgtcatgagtgtggaggagtgtgatggatagacaaaaaagagcgggtcgacagacccactctcgagtgcctctcggggtgtttgcctatctaagtaagcacgagggggaggttctggcaaaaaaaaacgcttgttctatgcggcatgcaaaagactggggatgattcctgaagaagaattttccggagccctccggaagggggcgggacaacggtgtttgagggcttgacggacccgtgaaaaacgggaagtatgcgcgcatgaaactcgtctcatggaacgtgaacggattgcgggcggttctgggcaagggaatggcggacgccgtggatgccctggagccggacgtcctctgccttcaggagatcaaggcgcgtccggaacaggtgaaagacctgtggatttcctcctggccgcaccagctctggaatccggcggagaaggccggttattccggcgtgctgatcctcagccgggtgcggcctctttccacgtccgtcggaatcggctggccggagcatgaccgggaagggcgcgtctgcacgatgggattcgaggggttttacctggtcaactgctatacgcccaattcacagaatgaactggtgcgccttccgtaccgggagcagtgggacgccgcgttccgcgagtatgtggcgggactggcggaaaccaagccggtcgttttctgcggagacttgaacgtggcccatgaggagattgacattgcacgtcccaaagagaaccgtttttccgccgggttcagcgaccaggagcgcgccgggttcacgctgctgcttgaggccggttttacggatacgttccgcgccctgcatccggaggagccgggctggtacagctggtggtcctaccgcgcgggcgcccgcgcccggaacatcggatggcgcattgactatttctgcgtttccaatccgctggcttccagggtgaagactgccgccatccatccggatgtgacggggtccgaccattgccccgtcagcctggagatcgactgctgagcgcggtctttcagatgattttcaactgtaaaagattgatgattatggaacagaaattgccgctgctggtggttgccacgcgcaacgcccacaagaccggggaaatccgcgccatgctggccgggaaatgggaagtgaaagatctttccgactatccccaggctccgcccgtggatgaaacgggagtcacgtttacggagaacgccacgctcaaggcgctttccgcttccagatgcatccccggcgtcctgctggcggatgattccgggctggaggtggatgtgctgggcgggcgccccggagtctggtcctcctccttcggcggggaggaagggaaccatgcgcggaataacctccgcatgatggaggaactgcggcgcgccggcgtgaagccgggggacaggcctgccgcgcggttccgctgcgtcatggtgcttgccgggaacggccgtgtgctggcggagttttccggttccgtggaaggctacatgttgacggagccggccggagaaggaggattcggctatgatccgctgtttgtcccggaagggtatgaccggagtttcgcccagcttcccatggaagtgaaaaattccatgtcgcaccgcgcccgcgctctggcgcaggtggtggagtggatgaaggaatgccgggcctgaggtctttcccggacgcctggcggcggggaggtcagtccagcctgaaggcgcatatctggaagggagccggtgttccggtgttcaggagctggtatttgccggcgcgccaggaatgatggggcaggcgggacaggaaggcttccacggcttccgcttcttcctttcctccttcgtggccgggatagcacatgacgctgagaagcccgttcggggcaatgagggcggcggcctgttccagcgccgccagggtgcattccgtcctggtgaccgtttttttgtccccgcccggcagatagcccaggttgaaaacgatggccttcacggggcctccgaccagttccgccaggcggtcatggctggcaagatggagccggacggaaggggtgagcagcccttccttctccagacgctccctggtggcgcggatggcttcttcctgcacgtcaaaggcatgcacctggccggaagggccaaccagccgggccaggaaaaccgtatcgtgcccgttgcccgccgtggcgtccacgactgcgtccccgggggagacgacgcggctgatccagtcatgagcgcaggtcatggggcggctgagcagggaacatttcatgaccgggttgtacagaagccttgcctgtatgacaattcgtttatgaaattccggtgcgggaagaatgacaggttgttttttggcagggcgtgtgttaggaagaggcataaaaccttctgcgtgttcccgcatgcggggataaaccacagacgttgccatgaagatgactgacagacgcacttttttgaaaaggactgccgccgcaggggcgctggcggccatatcggacatggattccctgttcgcccaggaggccggagctccggcggcttccggcatcccggatctggtggccgtccgcaacggtacccgtgcggagatggtcaggaaggccgtggagacgctgggcggcatgcaggctttcgtcaagccgggccagaccgtcgtcatcaagccgaacatcggctggaacaaggctccggaattcggcgccaacactcatcctgaaaccgtcgccacgctggtagagctgtgcaggaaggccggggcgaaggaagtaagggtgtttgaccactgctgccacaacggcgcttatgagggcagcggcgtgaaagaggccgtagagaaggctggcggtgtgatggtggacggcggcaatgagagccagtacgtgcggacggaaaacccgaaagcccggaaattcacctccgccaaggtgcataaggccgtgctggaagcggatgtttatatcacctgcccgcccctcaagcaccacagcggttccgagatgaccgcctgcatgaagaatgtcatgggcaccgtctgggaccgcggggccatgcataagaacgacctgcaccagtgcatcgcggacgccgtgtatttccgcaagccggacctgtgcgtgctggacgcctacatgcccatggtgcgcaatggccccgtggggaaggatacgaatgacctggtggagcgcaaaacccttctggcttcccgtgacatcgtggccattgacgctgcgggcgccgccctgctgaacaaggccggaaaaattcgccatgtgcagcttggggaggaaatggggctgggcgtcgccgacctttccaggcttaatatccgccgtatcagcatggcctgacgcggcggctccttctcccgtctgcggatgacgcggtggggggccaactttccgcctccggcgggtttatgataaatatgtcagttatcaaagcctttctcgtcagtcctctgaagtggctccgcgtgacggtggccgtcattttctttattgggattgcatacgcttttctgcaccacattcccgcgtggaacgtgccgaacatgacggggggcggagaggggatggaagattccttttccctggcgcggtggcaatttgtgccgtccgtgctggggaccctgagcggggcagccgtttccgccgtgattctgggggttttgctgctgcttacgctgctgttcggccgcgtatactgttccttcatctgcccgctggggattctccaggatattgtcttcagaatccgccgctggctggcgccgaagcgtttcctgaaattctcccggcctgtgccgtgggtgcggtatggggtgctggcattgctggccgcctgctgcgtgacggggctggccggtctgtctctgaattggctggacccttacagcattttcgggcgcatcatgtatgtgctggcatggccggccgccatttggagcaataacctgctggcggcggacagttcttctgcggacctggtccagatggattatttccccgcggctttcccggttctgctggcttccgccggcatgctcggcctggtggccgtcatgagtgtctggaaggggcgcctgtattgcaatacggtatgccccgtcggcacgctgcttggcctgctttcccgtatctcccttttccggctgggctttgatcccgcctcctgcaaaaaatgcggcaaatgcgtcaaatcctgcaaggcgcaatgcctgaacctgaaggaatacaaaatagactcctcacgctgcgtggcgtgctacgattgcgtgcgctcctgcagtgaggggggaatacgctaccgctggtttaccagggcccgccaactggttccggcccaaaaaaagaaggctcccccggctcccgctccctcttcttccgccgcggttccctccattgccgggagttcccgccgccagttcctggaggctactgcggccgggctggccacggccgccctttccggatgccggggagatgccgcccggaagctggaccccacccagtgcgttcttcctcccggagccggttccctggaacgttttctggatatctgcaccggctgccagatgtgcgttgccaactgccccacccatgtgcttcagccctcatacctgcagcttggcctgaagggattcatgaaaccccggatggattttgccaccaaatactgcctttatgattgccaccggtgtgcggaagtctgccccacgggggctatacgcaggatgcctgttaccgcggaaagggatactgagggaataacaaaagatactacgcgcattgccgtggcccggttttacgtctgccgctgcctggttgcccgggaggacatggattgcggagcctgtacggagcattgccccaccaaggccctttacacggtgccctatatcgggcgtgacggccaggagcaccgcctgcccaggctggatccttccctgtgcatcggctgcggcgcgtgcgaacacgcctgtcccgttaccgcggaacggcctgaggaacgcgaacgccggaactcctgcgatctgtgcgaggaaaaatgcgagttcggaaggcggcgggaaatgcccccccgggcgctggtggtgcgtgccgtaaatccccagcagaaagctgttaaaaagtttgaggacaaagctgtggatccggtgggggatgcggattttccgttttgaaaacggctggcggtttggaagatgatgaaataaacgctcccggaggcttcaaacctccctttcgggagggcggtgtctgtccatccggtttttcgggggaattccgtgcagcccggtttgcgcacggatacggccgcgggggatgccgagatgagcgggggcaggaggagcctgaccgcgggagcgttcccgcggctggcagggaaggtttccggagagcatgttctccgttgctggcgggatagagtgcaaatgcccgattttccttgatgatgcggaagttgatacgttaaagtaaaagaaccatgttgcaggcggacggcattacgtatgagatagaaacaccggatggtcctttgaaattattggacaatgtcagttttaatgtccctcgcggtcattttatggcggtcgttggtccttccggctgcggaaagacgaccttattgaaggcgattgcgggcatgattgcggaaacgggcggtcgttttttctggaatggccatgatttggctgaagaagactttgaaccttcggaaatcgggttcgttccccagttcagcattgcttatgaccagctgagcgtggatgagaatgtggagagcgccgccaggctccgttgccggttcaattccgtggacgatttggacgacagcattgacaatgccctggaggtaacgggaatggaggggattacggaccgggatgtgaaaattctttccggcggccagaaaaggcgcctggcgctggccatggaactggtatccaatccccggctgctgatttgcgatgaggtgacgtccggactggatcccaggtcggaacacgatatcgtgttcctcctgcatgaaatctcccgttcggaaggccgcatcgtcatttccgtcacgcacagcctttcccatctggacaggtatgattccatcctggtcatgcaccagggctgcgtggcttaccacggttctccgaaaaccatgctgcattacttcggcgtttcctcgctggaggagatttacccgaagctccaggatcgcgaaggcccttcctggagccggtcctggagcaagcaccgggattcctattattcccgtctggaacaggaaagggaaaagaaaattctttccggggaactgccggatccggatgccgtccgtcctgcggaggcggagaaggaggggtcctccggagaatccggaacggaacgggaaaaggccgtggaggaaaacattccggaagttcccggattcttcacccagttcttttgtctgctggggcggcgctggcgcatctttttccgcgaccgttcccagttggttcttcaattggtcatggtgctgctgtttcccgtgctggtagccatgtttacggacaagggctccgggcaaatcgtggggctttccgccacgcaggatgtccagactgtccagaaggatatggaagcccagcagctgaacatgaaaacgggctccgccgtctccggcatcatcatgtttgaggtgattttgctggggctgatggggtccaacaatgccgcccgcgaggtggccggtgaacgcgccgtcatggaaaaggaaaagtatgcgggcatgaggccttccgcctacctggcgagcaagctgtcctatctgagcgttctggtgctggtgcaatccatctggatgtttgcctttgtggattttttctgggaccgtggcggcggcctgacgcatctgctgttcctgattttggcgaacgccgccatgacttttgtatgcctgggcatttccgccctggcccggagtgcagatcaggcttccctgctgagcatttatctggtgggtttccagcttcctctctccggagcggtgctggcgcttccggaatatgcggagagtttcatacgccccttcatttccgcgtactgggcgtgatccggcagcatctccgcactgaaggacgacgtatattacgccgtcaagaatgtgctggatacggacctgactccctccctggtttgctatattgttctgggcgtgcatgttgcgtgcggcattgcggccgcctacgcgggaatccgccgttcgcgctgggagctttaatttaatgcgtgcgcttgcgggaagtacgttatatactttttccatcagaaattatggcgagacggcgtgcagcaaaaaagaaaagttcctcatcatccgcactggttttgacggtcggggcggcggtttttgtgctggccgttattgtgggaattgtcatgttccgagccggggagaagccgcaggccgggtcggatatacctctggacattctggcggcgaacgcctcccagctttccaataacaactatgcactggacggaacggtgattgaccgttttccgcgcggcgagtccgagcttattgccttcttgtacaaagacgcctccgggcgcgagtacattattcccgtctgtgtttccgctgaggccaggaacggactgaacatcaaccgggatcagcaatacaggatagagttccgggtgaaagatatcaatccgaaggtgcgcggcgtgtgcgtagctacatccattcagcctaaataaacaatctccctcgtcctatgaaatgctgttttttgatgaccctggcctgcgcggttcccgccctggggcagatgatgtacaaccctcctgcagccggcggtgcgcctgccgcgtcccctgcctcccctcccgccgttcagccgaatgcctaccagccttccaggcagggggatgccaagtccctgtacggcaatgagcttcctttcctgaaccctcaggacggcacggtgaccatcaacggaacgacgttgaatatgggcagtttccgggagattgaagcgcgtttcaacaagtacctgagccagccggaggaaagtacggaagatgcgaaggaatatcagaaaatttttgaaaagctccacgaaacgctctccatgcgcaaggaaaaactggtggcggataatgtggtgcggcaggtagtggacctgttgaccgccgcttccagcaacccgctggacggaggcgtttccgacgctctctgccaggccatttacaccgcgtggcaggccaggagcaatggaaaaaacaaggggaagatgcttgaggcggtggaaagggaaatccgcagcaacgcccagaagatgagcctgatggaaagcggcgtgacgacgatttccggtgcgccctccggccagaagggcgggaaaaagggaacatccaccaatcatccggccaaaaataacccccgttacaaatatctggaaaagcgtgtagtggagatggaagcccgcaagctgaagctggaaagtgagcaggttctgacggtgacggaagcgaagattgtttttcagtctacgctggttcaattgtttgcccagcggcgttttgaccatgtttccataggctgcggcgtttacagccgcctgttcaatgacggggataccaagctgcggctggataagaattccgatgccgccaagatgttcagcggtacgctgggcgctcctcccaccgtcgctatcctggacaacctttcccgggagctggcccgtgactccgaccggcacatgaaggccgtgaacaacctggtggattcccatcattacgtggatgcgctggaacggctgaacgaagctctcctgatcggggaattcatgcctgccgtgaatacgtttccgtatgagaagaagcaaaaactgtatgccttcaaacgggacgtggaaaagttgttcgagttgatgaacggcaaagattacgaagaagccctttccctggtggagaaccttaagaagacttccagggatttcagtacgggccgtgcggagtccgctatcagcgccgccgtattcgccagtgacgcctatatttcccaggggcaggaagccctggccaggggggaccgcgccaaattggaggaatgcctgaaaagcgccattgaaatctggccgaagaatccccgtcttcttccgctgcggaacgccatgatggccgcaggtcagcaatcccacgctctggaggatttcaagcgtttccacaagaataagaattatcgccgcatttttgacaaccagcatgaatttgccgttctggtgaaggatgatccggagctccagaagcagtttgtggaagatctgggcaaaatggccgttattgagcgtgccctgggcgcagcgcgccagcgtgaagccatgcaggacgtatacggcgcctgggaggagcttcaacagctgcgttccagggatcaggaactgttcatcaatgaccaggagctgaatgcccggtatctggacctgacgacaaaggcaagcacactggtaaatctgctgaatgatgcggaaaaatgcaggaatgcgggagaagtggggtctgccctgggcaaatacatggaagccaaaaggctgtatctgtattcccggtttgccaaggagggaattgagtccctgctggaagaagttcttccgttgaactaggcgggtggattccgccggacggcacgcctgcggagacggagtaattgcttttcttccggaacggtgccgttatgctacggctcatgaaggcagtatacctgtgtttgtgcatgctggcggcgttctgttttccggctgcggcgctccctgcggattgcagccaggtgattgtaggttccgcggacgggtggaatagttcccatgtgcagttgagccttttggagaaggggccgcggggctgggtgatggtgaagggaccgtttccggcgcgtctgggaaaatccggtctggtctggggcaggggcgtcagcctccctcccgccggagggccggtgaagaaggagggggacttgcgctctcccgcgggaatttttgaactggggggcgtatatggaactgttcccgcgccgcagaaaaagcgttccatgccgtaccgccgcattacgccgcgggacatgtgggtggatgaccctgcctctcccctgtataaccagcactttgtgctgaagcatgatcccgtcacgccttgggagttcaagcagcagatgaagctgaatgattacgcccacagtctgaaactgtttatccggcataatgccgcagacggacggcagaaacccgtgccgggtgcgggttcctccatttttttccatatctggcgccgggacggaggagcccctacggccggatgcaccgcaatgagcgaggaaaatttgagggccatgattgcatggctggatccttccagacatcccctttatatcctgctccccgccagggaatatttgcgcctgcgcagagcctgggggctgccgtgatattttcagaatccgcctttgcaggcacgcctgtttcgccgccccgggacggacaggggagtggtttaaaccctacggatggaagggctgttggatggtgcggctcccgtgccgtgctgcacgttcgttgctgcctggagttccctttcccgtaaatgcaggaagccggcctttgaagaaaggccggcttccgcatggtaaaacggttattgttcctgggactggggagcgggagcttccggctggagcaggggagtggaggtttctttcacttccgccatggaatcctgttcttccctgggcgcgcggtcttcgcggggctgccggggttgttcctggcgttcattggctccgctgaccagcagattgcggcccatgaaaggctggttgtggagaatgtccacggaacggatggcgtcttccatcttcttcatttccacaaaagcataccccttggacttgtgggtgcgggggttgtaaatgatttccacggaattgacttccccgatgcccttgaacacgtcctccaggtcgctttccgtagcttcataggaaagattgcccacataaagccggcggttggagacgggctgtttgggtgcggaaacgcgatcttgcctgttgcgggctacgcgggtgttggttttggcggcggctttatccctggccgcatgcttgttattcttggacggacgaatgccgaagaggcccaggaaacgctgccacaaggagagtttggcgggcgcttcttttctgtacttgggacggtaaccgctggaatcgcggcggtcattgccataggagcgtccgcccttgttgtagcggcggcgagctccctggccctgtcttccctgtgtgttgtgttgtgacatacttataatgctaagttggtgattatgttggtgtcatgccggatttatcgctgtgtgcagtaaattccatccggaggatcgccgggacgttccgctgccatgagaaaagccaggagtaagggggccccatgccccgatcaacggttcatgcatggtctgataggggggcgatcaggctaggcgcgtgaccagtccggtcgattgacgcgtataccaatgcacagggagccggattcttgcaagccggtatctcgtcattttaggctttccgaccgcccggaggcgggaaggccgtccgggaggcaggcttccgtgccgggcatggctcagagtgagcaaacaatttgacaaaaagacgaggacggagcattttaaatgccgactaatctacatattctctcgatgctgattcaaaatgcagaccgtactacctacgggattaataagattgttgttttcgtccttgcgttcgtcgttttcttcgttgtcggatttgtgtcctggcaatgggatggggtcgctccggaaccgtggcgtctgcggacgctggtgctgacgccgctgacgatgtctctgctgctgtatgtgtgctgtgaccagttcggcgtttactaccgctgccagacgctctgggaaagcatccggcggtttgtggtggcatatgcctgttttgtggtgttaagcgtgatgatatggaagttctttgttcccttttccgcggatgtcggtgtccagtccctggcgtatctgcttaccttcctgggttccctctggctgcgtatcagccggttccgggcggaaaaaaggctggtggaggaagcccctacgctggtggtgggaactccggatcatgtgaaagaattccgcaggacgttggagagcaatcatgtggacttcaggaatgggctgctggtcatggcgcctgaagaggtggacagtgcggtagtcaggaatttgctgattaagaactgcgtcagcaaggtggtgtttttgccggaggaggtggattcttccgtggcgcggtgcctggtggaactgtgcggcaagatgggagtcgatttttacgcgagcatggtggtaagcatgcccgccgtgcataaaacctatttcggcgttattggaggaacaagaatgctggtgtacaaatccacccccattccctataccacctcctggcagttgaagaaaatgctggactggacgggagcgctggcgcttctggtgggaacgtcacccctgtgggtgctggcggctgtgggaatcaagctgtcggatcgcggcccggttttttaccgccagaaacgttccgggctgtatggccgggagtttggcatgtggaaattccgcaccatgtaccgggatgcggataaaaggctggatgaagtgaaagcccagtacggcaatgacatggacggccccatctttaagctggagcacgaccctcgcattttctccttcgggcgcttcctgcgcaaattcagcatcgacgagcttccccagctcattaatgtgctgaaaggggaaatgagcctggtcggcccgcgcccgctgcccgtttatgaaacggaagcctttaccagcgatgcccaccgccgcaggttgagcgtgctgcccggcgtgacggggtactggcagattgccggacgcagcaacatccgggaatttgaaaagctggtggaattggatatgaagtatattgacaactggtccctgtggctggatatcaaactgcttctgaaaaccgtcccggcagtgcttttcgcccgtggggcaaagtagcttcctggtctccctggattgcaggccgtcagccgttattgccgggaatttggaatccggctggggttctctgtccggtggaacaggcctgttttaagaatactgcaattcgggagagggatggaattggtgtattctgtggaaaatgaaaaaaattattgccggacagagactttaatcttgaggtgcggaaagggatggggcagaatcaatctactatggatttagttcagcgagaaatctctaaagaaacggtgactccgtatttcatcgagtatttcggtcaggcgcctactcatgtggcagcggcaccgggacgtgtgaaccttattggtgagcacacggattataataacggttttgtgatgcctatggcgcttgataaccattgtgttgtggctgtggctccctcccccgtgggcaaacaccgcttttgcggttccctgggtgaccagatccatgaaattgcagtggaagacgccttggttcccggcgaaccgttctggtccaattatgtccgcggcgttttggccaacctgcacaggcgcggcatagaaatcgggcctgtggatatgctgattgacagcaatgtgccccgcggcggcggcctctcctccagtgccgctcttgaagttgccgtctgtacggcgctcgccgcttttgccggcgttgaaatagatcccaaggaagtcgccctcatcgggcaggccgtggaacatgaattcgtgaacgttccctgcggcatcatggaccagtttatttccgccaacggcaagaagggcatggctctcaagctggattgcgccacgctggaatatgagctggttccgatgaataatgagtccgtatccgtgctggttctggacagcgctgtgaagcattccctggcggacggagcttatggacagcgccgcaagcagtgtgaggaagcttcttccatcatgggcgtaccctccctgcgggaagctacgctggagctgctggaatccttcagggaacagcttggcgatgtgcgctatcgccgcgcccgccacgtcattggagaaaatgcgcgtgtgaacgcttttgcgaacgccctttcccgcggcgattgggatgaggccggcgtagccatgcgcggcagccatgcttccctgcgggacgactatgaagtttcctgtgctgaggtggatacccttgtttcactttgtgaccgcattccctccgcatcctccatttacggcgcgcgcatgacgggcggcgggtttggcggatgcattgtggccctggtgaagacggaggatgtggaaaaggtggcccaggagcttctggacggctactgccaggaaacgggcattgaaactacgtatcttgtaacccgtgccggagaaggcgcccgtgttctgtaccaagcttaatccatactgatgatgaaaacactagcaaccatattcggggcgctcgccctgatgacgtggggcgcagttgcccaggagggtcccgtacctgcaacggcagctgatgcgcagcccgccctggccgctccggccgcgattcccgctgttgaagtccagccggcagcggaaattcagccggcggctcccgccgcagaggctgtacaggctgaacagaccgcctctgcggagcctaaaacggcccctctttccatggtggaagtcattctcttctgcgtggtcgtggtgggcgtgatcgccctgggcatctggaagagccgtgaccccgaagaaacggaagaggaaaagaaggccaagggagcttcagactatttccttgccggccgcggtttgacctggtggctggtgggtttctccctgattgccgccaacatttccacggaacagtttgtggggatgtccggcaaatcggccaactgggtgggcatggccattgccgggtatgaatggctggccgctatcacgctggtggttgtagccttctgcttcctccccaagctgttgaaaggcggcgtatatacgattcccgaattcctggaataccggtataacacgctggcccgttccctgatggccattgctacgctgctgattctggtaggcgtgccgactgcgggcgtgatttacgccggcgccaaggtgatttccgtgttcttcacgggatactctgccatgggcattgacttcggcaacattaccgtcggctgcgttatcattgccttctgcgccacggtatacgtgttcgtgggcgggttgaaagcctgcgcctggacggacctgttctggggcgccgccctgattgtgggcggcggcgtggtggcctactttgccctgacggaactcagcggcgcagacccgaaccatttgattcaatccgccgccgccaattccggcgcgacggtcgcctccctggggaatccttcggacagcctctggcatggggtgacgcgcttttttgagctgaactccggtgacgcggccagcggcgtaaataccgtgggcggcaagctgcacatgatccgtcctgcggatgatgcggaaatcccgtggacggctctttgcctgggcctgtggatccccaacttcttttactggggcctcaaccagtacatcatgcagcgtacgctggcttccaaatccctggcggaaggccagatgggcattgtgttcgccgcattcctcaagctcatcatcccattcgtggtggtggttcccggcatcctggcctataacctgtaccgcaatgacctgaaggaacaggcggaagtaaaatacgcggcggaaatccgtaagacggaagatcccgccgcagtcaagggccgccccgtcatctacaagcttacggacagcttcctggtggaaaacgtggaggaaggctgtgcccatgccattcataacgcggaagtaatgaaggtgggcgaagatgttatggccaatttgaaacaggcctgcgccgatttgaaggcggatgccgccaacgaccagactacgctggcggaacgcgccccgttcgtggaaaaaatcgcttcccttaacaacaaaatcatcaagccggccgtggacaactcggataactactatctgacggatacgctggtaggctttgactatgactccgccttcggcacgctgatcaggaagctgcttcccggcacgggctggacatggtttgtgcttgcggccctctttggcgcggtggtgtcttccctggcatccatgctgaattccgcttccaccatctttacgatggatatttacaacaagctgcgcaaaaatgcggggcccacggagctggttaccgtcggcaagattggtttgctggtgtgcgccgtgatcgccctgaccattgctccgttcctggacagcccggcctttggtggcatcttcaacttcattcaggaattccagggcttcctgagcccgggcgccctgtgcgtgttcctcttcggcttctttgtgcccaagtgcccgcgcatcttcggttggctgggtatcgtcattaatgccctcctgtacggaatcttgaaggtatggcagccggaaatggccttcctgaaccgcatggccgtgtgtttcatcacggtagtggtcatcggcttcatcttcacggcggtgaacgccgcccgcggcggacagcctatcgtgctgcccgacaggggcgtggttgcccttcagtcctcttcacgggctaaaatcttcggatggctcgtggttgccgcgacggttgccctgtacatcatcttctggtaattcagggaagacctccagtcccgtattttcaatcctcccggttcaggccgggaggatttttcacgtccggaacagaccatgcagctggcgcggctgaatattctggaggcggaaagccggcagactggcgtttccggacggaaacggcgccttgttctctgaataaaatacatggttgaaaagaggccggcaaaacgccataccgcctcttattcctcttccagaagcatgctgcgcagggaatcgaaaaagtttccggattcctcttccgtcgcttccgcgttcatgagatcctcccatttggaatattccatcaggtggggaggaatttcactaaggaaggaggagcgctggcaaggcatgcggtccccgtagcgcaggcgcgtggcgcaataagtaagcatgagtttctcctgggcgcgcgtgatgcctacgtaaagcaggcggcgttcttcgtcgcaattgccgtcttccagggaacgcttgtggggaagaatgccttcctccagccctacgaggtacactaccggaaattccagtcccttggcggcgtgcatggtaatcaggcatacgcctggcttgttttccacgtcgtcatcattatcctccttgtccagggtgacctgggccaggtagtcccggagggtttttccgggttgccagaagttgcggagggaggctttcacgtccccgatggacaccagccgtttctggatttcagcttccgttttgcacaggcgcgtgacgtattcgctgaatccggtttcctcaataagctgctccaggatgtctccgaagtcggtttccttatcctggaaaaggtcaatgtattttgcaatcagttcattgaatgcctgcacgctgttgcgggcgcgggtggaaagagccgccaggaattcttcgtcctggagggctgcccagacgctgttgccgtgctcccggctccagtcgatggccagatggctggtcagctcgctgatgccgcgcggcggcgtgttgaggatgcgcagcaggtattcgtcagcctgcgggttttcgatagtcgccagataggaaatgaggtctttcacctccttgcggtcgaaaaaactttgcgcgcccaccatgcggtagggaattttgtgttcccggagcgtttgttcaatgatgcggctctgggtattggcccggaacagaatggcgaaatcctcccagggccggccttcctgcctgcggacgttttcaatgtccgtaatgatgaattccgcctcttccgcgtctccgggcatggaaatgagccggacggcttctcctccgcctttgtgggcgcgcagcgtcttgtccctccggcccaggttgtggcggatcagggcattggccgtgtccaggatgggggcggtgcaacggtaattttcttccagtttgatgacggagggatttgggaaaaaacgttcgaattccaggatattgctgatctgggcgcctcgccagccgtagatggactggtcgtcgtctcccactacgcagacattgtgttccggacctaccagatggcccagcaggctcatttggaggctgttggtatcctggaattcatccacggtgatatagcggaagcgctgttgccacgcctccctgacgtcccggtgctccttcagcaatttgtccgccagaatcagcaggtcgtcaaagtccacggaattctgcgcctgaagttcccgctggtaggaggcggcgatgttggctgtcaggttgtcttcaatggagtcaaggcccagaccgctgtttttcatccggctcatggaagaaagcacatctttgggcgtgattttctccgtaatgccgccgtggcgcacaatcagtcgccggatcaggccgctttgctcggaaccgctgtaaatggtgaaattggttttgtaccccaggcgtcctatatcctctctcaggatacgaacgcaaagggaatggaaagtgctcaccattatttggcgcgccgccttgcgttccaccatctggcctacgcgttcccgcatttccagagcggccttgttggtgaacgtcacggccaggatgcttttggggctgatgccccgatccaccatatgggcgatgcggcaggtgacggtgcgcgttttgcccgttccggccccggccaggatcagcacgggcccccgcagggtctgcacggccttcctctgggccgcgttcaggctctccatggaaaaggacttggccatttatacgtcaaaatggatatctttcaaattcgggtggccggcaatgagctgggagatattcatgcgcgtgctgccttcaagctggacgtctgtcaccagcaatcctccgcttccgcaggcgatcaaaagcccctgttccccggcggagagcacctggcccggttttccctccgcttccgggaggatggaaaagccggggaaaattttcatgttgcggatgcgtttcttgcggttccagtagttggtgaaggtaccgggccacgggtcgtacgcccggatcatgcggccgatttcttctgcggggcgcgtccagtcgatttttccgtccgcccgcaggagcttgggggcgtatgttgccaggatttcctgctggcggatgcgcgtggccgtccctttttcaatggaatggatgacgggcagcagcacatccggcgtcatcctggccagcttgtcatgcagggtacctccggtttccgagccttccaggggggtgctgatctgggcgatgatgtctccggcatccagcttcctgacaatgtgcatgatggtgatgcccgtttctgcatcgccggatttgatggcggactggatgcaggccgctccacggtggcgcggcaggagggaggcatgtgcgttgatgcagcccatgggcgccatatcaatcacttcctggctcagaatctgcccgtacgccatgacgacgatcagatccggattcagtctcctgaggttgctcagcgcatccgggctgcgcagggaatgcggctggagcacgggaatgcccgcttccctggcaatatttttgatggccggggctgtaagcacctggtgcctgccgacagggcggtcgggctgcgtgaccaggcctgccaggtccgagtgacggatcaggctgcggaaggcgggaatggcaatgtcgcctgtgcccatgaagacgatgcgcatggctggaagcttgccctgacggcttgcgcaggtcaatgttaaatccggttttgagaagggaataatagggaagaaaggccgttttttcccgttcctttccgtccggagggaataccggaggataatgttttttccggccgcttcccctcatgtcctccctcctgcaagaagttcttttcgacggagcggaatattggtataccctgttctatgcagaaaggacggctgccgcgcattctgattgtgaccgcaggatacggggaagggcacaattccgcagccaggggcgtgagggatgctctcgcagggcgcgcggaagtccgcgttacggacctgtgcgcggaggcgatgccccggatgttccgcctgacgcgcgccgcctacctgtggacgatctcccgcatgccccgcctctggaaatggatgtacgaggtgagcgacaggcgcaatatggcggagaagcccgtcaggggaattgcccccgtggagcgcctgctggaacgtttgctgcgggaatggaagccggatgccgtggtctgcacctacatggtatatccctacatgctggattccctggcctcccgcacgggcagggcggttccttacctgaccgtcgtgacggattccttcgtcatcaataaatcatggctgtgttccaagtcccccctctgggccgtaacggacccctggacgagggccatcatggaggaaaaggggctgccgcaggacaggctgcgcgttacgggatttcccgtcaatcccgtgctgggagcgctggcggaggaacatcccctttcctggaaagaaggggagccgttccgggtgctttactttgcccagcgttccgcacggcatgcgcgggcggagctggcgggtatgctggatgcgaatcccgccctgcatgtaacctgtattctggggcgccggttccggcgcatttatccccgcatccgggatttgcgcgccagatacggacgcaggctgacggtgcgcggctggacgcgccgcgtgccttcttatcttgccgccagtcacgtagtggtcgggaaagcgggaggagccaccgtacacgaagtgcttgcggccgcacgtcccatgctggtgaactttcttcttccgggccaggaggagggcaatacccgcctcctggaaaaactgggaggcggcagccatgtgccggacgcccgtgccctggcttccgctcttcaggaaatgatggcggacggcggcgcacagtggaggcgcatgcatgaaaacctgctgcgggccgggatgaccggaggaagcggcagaatagcggatttggccttgaaactggcggaggaacatactaactgattcccgtgacctatcttctgattgacaattccaacacacgcaccaaattcgtgctctcttcgccggaagccctgttaccggaacggtatatggttcccacccgggaggtgagcggggaacggctggacgaggtgctggccggcgttcgttatgatgccgccgtggtgtgttccgtcgtgccgcgcgtggcggaagaactgaaaaactggatcgtcaaaccgtgccatttcctttcctgcgattcccggttgggcgtgggcattgactatccccacccgcgccagataggggccgacaggctggcgaatgccgtaggagccgcggcctattacgggtatccttgcgttgtggtggactttggcaccgccgtgacttttgacgtgatcgggccccaatgcacctacatgggcggcgttattgcgccggggcttgccagcatgggggattacctggagcgcaatacggcgcttcttcccgccattgacccccaggagccgtcccgtgtcattggaaccagcacagtagaggccatgcaatccggcgccgtgtacggttaccgggggctggtgaaggaaattctggcccggctggaaggtgagctgggcgtgcgtccggccgtggttgctacgggaggggatgcagctctgatcgccaggggagtggagcgcattgaccatgtgcaccctgacattacgttgaacggcttgcgcatagccgccggactgaatctttaaagaacggcccaaatcggctggaaacctgctgcttccggctccgtggccggatgacgcataaaaactcataaataggtgttgcaaatggcgcataccccatgtagtatcaatgaaccttaacaataaatatcatgtctgacaacagcatcgaagaaaaagtaagaagtatcatcgtcgaccaacttggcgttgaatccgataaagtgactgctgatgcgaaattcatcgaggatctcggtgctgattcgctggataccgttgaactcgtgatggctttcgaagaaaactttgacatcgaagtgcccgacgaagaagccgaaaagcttcagtctgttgccgacgtcgttgcttacatcgaaaaggttcagggttaagttaaactgctaaaaatcctttattacaaaagcggcttccctgtccaaggcaaggaagccgctttttcatggaaagcctttccgccttttcttccatgagcgacctgccttccttttcccgtgacgatatccgctatgcggcggagatgacacgggtggtgtatgaaccggaccgccgcattgatacttttggcgataccaggtttaattttcttctcctcagcgaactgatggatgaggtgaacgtggtgcgcgtgcgcagcggctgggtggaagcggagaaaccgaaaatcatacggccttccatttacaatgaaatcagtacggaggggttttccggagaagccaagcgcttttttgactggctctccaaaaacgggccaggctttttgacgttgctggaatacgggttcaggttcaaacggtcggaggtgagcgaggaaattctgcatgaaccgcttgattccgtgcgcggtcggctgctggaccaggtgcgcaatggagaagatacatttatggctctcattgagggagtggatgacgcatgggaggtctccctcttgaaattcacggtggaaatgatacaaaaatcccatgaaatcaatatctttgacttcaagcgcaaaggtcttctttagccttttggcggcggttttctgtgtccagggagttttggcggacggagaaaattattccctctggccgcgccgtccggaggcccttgctgaagcccgccgcctgatggactgcggcagtctgccaaaagctctggaactgctgcagcctctggcggaacagggaggcgtggtggggaaagaggcgaaggaactcatcggaaggctgcgcatccgccagttgctggatcccaacggaccggacgtgaaaaaatataccgtacggaagggagattcctggatacgcatggtcagaaaactgggttgctctcaggccatggtggttcacctgaacggtttgatggatattcccgctcttcatgcgggagatgtattcaagtaccggcctctggatttccatgtagtggtgaacgtgccggaaaaggaaatctgcctttacgacgggacggattttgtcaagggataccccatcctctccatgaaggacgggggaaaaaagaatgtggaaacgaccgtaaaggatgagcaggcccccgtgtccatctacagcaggcagtttccttctgcggataagacgctggtgctggcggcgggaggctatgtcattgacgctgcccgcggtacgccccgctcgcctgggttttatctgagccggcaggactgcaatgaactggtcatgctgaccaggccgggaacgaaggtgactatcctgagggggaaaggagaggaaccgtgaggctggttattcagcgtgtcagtaaggccgccgttcatatcggcggtgtttgtgcgggggccgtggggcccggtctgctgattctggcgggcattgaagaggcggatacggaggaagatgtgcgctggctcgccaacaaggcggcggccatgcgcattttttccgacgcggacggaaagatgaatctttccgtaagggaagtgagtggaagcgtgttggtggtgagccagtttacgctgcatgcctccacccggaaagggaacaggccctctttcatccgcgccgcgaggcctgagcgggccattcccctgtatgagctgtttaagaaggaattggcgtctttgctggaaggcagggtggaaagcggcgaattcggcgcggatatgcaggtttccctgattaacgacggcccggtgactattttcatggattccaggaaaagggaatgagagaaaggatcttatatatttaactttgccccggtttcctgctttctctctatctccatataaacatagaaaaatattgccgatagatctgttgctcctcctgaaaatctgtccttgagaaaggaggaatattacgtctgcacagatccgaacttggccctgaaatagctaaggccggagttctactggctggacgaaattttccgtagcagccgcctgtccatagggagagtaatcgtaagccgccgcaacagcgccctgtgcgtcgaggacctccgacacattcttgttgaagtccatgccgtagcagtacagggaagcgccctgcacgagggccagggggcgggtggccaccggttccagaggatcccacagcagtgtccggagcacgttacggttgtccagcatatccaatgccgctatttgtaaatagccgcggtacaggtaccgttcgtggctggcgaccgtgccgttttgggtcactttcttcatgtagcgccgtccctggtaatcgtagccgcactcaataatcgtgtttccattccggctggtgaagctcaccgcgcggttggccgcgttgtacaccaccgtccagatgcccgttgacgtcctgatcaatgcctagtcacaccttaaccctaccgttactaactgtgtattatgaccagtcatcataatcaaaagggcaataaatcagctgtatggcaataactccaaatataagagctttttccatatcataatcagcgtcaaatgaaagtggaattataggtgtttttggttgctttaaaaggccaaacgataataaaccaataatcattcgtaaaaaataaaatatggtttgattcctagaaatagggacttcaaattgacggtttctatcatcggatactagtgcttttcgtatgaatctacaatttaaatcttcctgaagaaaaaaatcgatatattgatttactttataggaaattcgaatttttacattatttaaccgatatatacaatattcttgttctgtagtattaatacagcagaaatttggatcaatttgaagtatcttaattttattttctcctatcttgccttcacctttacctgtttttataaagtaatgaagttcacctactgtatcaaatgtagaattatctattaaggataaaacccttttattttctttcgtgtttaataaagtcgatccaaattggagttttctccagtcaatattctttttattttgattattaatcataagtcactatgatcattgcaataattgaatccatggggtgcaatactggtcttgccactcatgattatagtctatttttccaagaggccaaatttttgcactagcccaaacacgagcacgcaaggatatacatcccctccctttaacttgaaacttatccaaattagtagtcacacaaattgaagctctaaagttaatacctcctctagcaccaacttctaaggaacctattcggcttgcagctttggcaattaatccaagttccgcatatccattaacgcatccaccgccagaaacagcattgctacaggaactataacttgctgatattcctcctgtcgcacccaatctcccataccatcccattctgatttctgcaagattaaaaatattcaaagatgcagaacctgcttctccttccatttgaaatgataatgataccgccttagaaaaacccttatttccgttctttttacagcatccttcacattttttattctgcaaaattatacgtattttaaaatcatatatgccaattttatttaataatttattttgtacttttcctgctttaagttctttgcgaataaaatttctctcgcatttaaatggtccagaaaatccagaagaaatatcatcttcaacttcaaaacctaaataatcaacatatataatagaagcattcccacacataccgtacaaattccaccctccctgttcagcgatgggatcgcggttgatccaccttccatcggcgggatggtaataacggtaattgtaatagaccaaggccaattcgtagtcgtgcatctcgctggaccactggacgggctggacgaggctgcccgtaccggtcacggccccatagggggagtaatcgtaagccgccgcgatcgttccctgtgcgtcgaagacctccgacacattcttgttgaagtccgttccatagcagtacagggaagcgccttgcacgagggccagggggcgggtggccatcggttccagaggctcccacagcagtgtccggagcacgttacggttgtccagcatatccaatgccgctatttgtaaatagcctcggtacaggtaccgttcgtggctggcggccgtgccgttttgggtcactttcttcatgtagcggcgtcccaggtagtcgtagccgcactcaataatcgtgtttccattccggctggtgaagctcaccgcgcggttggccgcgttgtagaccacggtccacacgcccgttgacgtcttgatcaaggtctggttgcccgaggcgtcgtacgtcggcacaaaaggcgcttccccgctttcttcaatgccggtgtactggttgagcccgttggccgcgtaggcgagttcctcggccggttcccgtgccgtcttgcggttgccgatgttgtcgtagctgtagccgtagggggcggcgcccagggtggcggcggtgagttcgtttctgccgttgtagctgaagctgtcgctgcgggctgcttccattccccgttgctgcgtgcgcgtggccgggcgtcccaatgcatcgtagctctgggtgcgggagactagcacagtttctcccaaatgatagttcattccggtgatcaaatcacgccgctgttcgtaagcaagttccctaacgatgctattgggcatcgcaaggctggagagcaggctgcttcccgccagatagccgtaggcgaagctttgctccgttccctcgtgcatgattccggcactggcaagccgcccgttggcttcatagccctggctggcttcctggaggacgtcggttccctgtttcagggtatagccggaggagcgtccgtaagtgtcgtagtgttcctggagctggtaagagctccctccgatggtgatggtatcggtgtcctgttcgttgtattgggtataggcaagggaacgcgagccggaggcgtccgtgacccgggtcagctggttgaggtagttgtaggcgtactggatgccgggcgtggagtcgctgtaggagacggagttgttgaccccctttttcaggttgtagccccaggtggtgacgatgccgcgggcatcggtcagggtggatttcaggttcagggcattgtaggtggtgtcttcatgcgttccgtccgcgtaggttttttggaccagtagccccgtggcttcgtcgtagctccaggtggtggtgtctccgtccgtgcgtcccgtggggtcggcggtgatgtcgcccgcgtcctcccggaacgtggtgaggcttatcatcctgtccgcctcgtcgtagccgaagagcaggggctgggtccccgttccccattgcgccgtgttgcggccccggaggtcgtagccgtagcaggtcgtgttgcccagggcgttggtgacgacggcaggctggtcaaaccaggggccgtaggcggtagaagtcgtgttgcccgccgcgtccgtcaccgaaacggtgcgcccggcgatatcggttttcgtcgtgaccgtgttgccccggccgtccgtgctggagtagatgacgccggtttccgtgtaggcgcgggtatgcgtggccgtgacgcccgcatggtccgtctgcgtggtggtgaacccgtcaatgaccgtggccgttgctatgacattggaagtgggaatgctgcttttctgcgtccggacggcgcccgggccgtattcgctccattgttcggaagcgtttcctctggggtcgatggaaatgactttgctttccaatatagatgagagggaggaagacagcgttttttgcgtttcgttataggtcgttccctggccgttgttcctggtcgccgtaacaacgcggtatacctcatcctgggcctgttccacgccgtagctccacgtggtgatgcgcgagttggacaccgtagccggatcggcgagtttccaggtttctttcgttttgttgccaaagtcgtcgtattcccacagggtcggggccatcgtcgtggccgcattgcccgcgtccgtctgcgttttggtgagctgccccctggcgttgtaggtgttcctcgtgtaaatgactccgccgacggtgttggggacgcccgtgcgcagggtttccccggctccgttgacaatactgcgctgcagctcggtttgcgtttccccggagacggctttcgtgaaggtccgcacaccgtcgctgaccaggtcgatggcgtagatgacgtgccgctgccccgtgccggattcttccatcaccgttccgtccggcgcgctgcgcgtgatgaatgtagccccggaagggacggtttgcgtgaccgtcaagccgtcctggctgtaggcgtaggtagtgacccggcccaggacgtccgtagaggaagtcatcctccccagcaagtcgtactccgtgctttcttgggtcgtcatcgcccccgtgtcttgacgcgtggagagcacgcgccctgccgcatcccgggtgtaggtggtgatggtttccggcgtgatgacggtttccccgtccatcacggcggaacgcgtgacttccaccagttggcgcgccgtgtcgtaggcgtagtccgtcctgatgccgttttcatcgatttcccacagcaggcctccgtcgcacatcagttcgcgctccgtgagccggccgttgcccgccgtccgcttcacccaccggttctgcgtgtcaaattcgtagacggcgctgcccgtgagcgcccattgcccggtggaaagcaggaggtagttttcttccctgacgcgctgcccttccgccgtgatccaggtgacggcgcgcgtgctttgtcccggaacggcttctccgttgatgcgcgtttccaccgtttccgtgtagagggcgccgtgctccgtcgtggccgcgtagtcgtgccacgtttgcacgccgtcgaggccccggctgaaccgcgtgcgtccgcgggcatggatgttggcggctccggccagccattgttcctccgccgtcaggcgcgtgcccgccacacccaggcccgtggcccgccgttccgttcttttgatgtggttggccgtcgtgtatttccaggtggtggatgtcagcgttttgacgtgcccttccagcggaagcaggtctgccgtttccgtggcgggttcgttgctgaagtcggcttctcccgaacaggcataggtgtagcgcgtgatgcgcctgccgttttccgcccacggttcgtcccggctaagcgggcggccgtagaggtcataggcgtaatgagtctggctgccgtccggggccgtttccgtcctgagccgcccgcactggtcgtaggcgtattgcgtggtttgctcctccgggcttccgtagccttccgccagcgtgagcagcaggtcgcccacgtccgtggtctggtagatggcgcaggtgcgcgccgccacgattccgtttttggagatttccgtgaccagctgccagaccgagttttccggttccagctccgtgcgcgtgcggagggtcgtgagggcgtcttcccccgtgccctgccgcatgttccacgccaggccgtcgttccaccaggtgacggcgtagggctgcctggcaggcgcctgttccgtgatggtgaacttttcctcagcatccagggaaagaataaatgttttcaagggagcgcccgtaacggtataaaatccctgtccgtccgttccggtgatttgtccaggcgtgtagagcgcgatgacgtaacccgtggaggtgacgttttccacgttgagcaggccgtcccacaggttccagatttgcctcagcgagccgtctccggcatgcctgacgtccagataggatgacgcgttggagatgacctgcctgtccgtggtggtgtaggagaggagcgttcccgtttccgccgagaagaggtattggctgccgtcttccaccacccagcgcaggcaggattgtccttccgccgtggccagcgccgcacgccctccgcccgacgtgtccaccccgatgggcagcacgcacccgtccgtgtagcagcgcatggcaattacccggtctccctgcaccaggttgaaccgcactcccggcgcaatgcccccttccggcacgtccagacggctgttcaggggatggttgtaggccagcgaggaggggctttccagaccggaggttctttcctcagccctcagttccacccttccggccggaaggcccccaagtccacggaacgctccgaagttgcaggaccagtacatcagcgtggccgtgctttccgccgtcacgctgcaccccgccgagctgtagtttcccagggcgccgctttccatgcccgcctcagggcccgaccgggccagcgacggggaaggcggcgttccgccgctgttgtcgcacgtgtctccctcgcagggacacggttcgggttctttcctgccccccggttccgtcggcaccacgtcgatgctgtagttgcagatggaggtgttgccgcttgccggattgtagtcgatgttggtctggctgacttcccagctgtaggtgccggaggggagctgcgccccgccgatccccgtgtggtatttgtgcccgccctgctcgcccgccgtctgcgggttttccttcagatccacctgcgccaccacgttgccgccggagtcctttacttccaggattccccagtcgtccaccccaaggaagagcgagcaggtgccgtagagttttttgccctccgctccttccgggatggtgaatgtcccgtgcgcgctgtacccgtccgccgacgtgctcggcggccccacgttcctttcctcatggatccggatcgcttcaaacggcagcggatcgggctccggagcggcctccatgccccgcctgccgaggctgccgccggctccaaagtaccatttcccgtagccgggaacggcagaacgatgaggcggattcatcaggtattcaagagtcgggggtaatgaaggaagcgaggggggccgccctttcctgatcgttttatcaatagtatgatccgaagtcggtgtcgatagaattttatttgtatgtttttgattttttataaaagatggtcattattttacacgaaaagataatattataattcttacgctcaacacctccctgttatggacatcaatgttgtctgtttgttagaaaaaattcctgatagagtgccatcccttccgggcatcagtctaattcctgtaatcaacatttttctttctctcgaagaaagatgggggccgtcgctgtcggacgggggcttgcttaggtttcgtccggcatttccaagtacggtctcctggattactgggtgccttccggtgtaacaattttttacgctgcgcgacgatgaggaagcaactgtctggtattttattcctggttcaaggaaatctggtaatgaaaaaactcccgacagccgatgccgccgggagtttttacagagcgtcttaagaaggaatcttctttagaaacagaggccttccttggcgttggcccgcatgaagtcgcggttgaggcgggcgatgttgtccacgctgatgcctttcgggcaggcggcttcacattcatactggttcgtgcagttgccaaagccttccgcttccatctgcttcatcatggccaggacgcgcttggaacgttccggctggccctgcggcagcagattgagatgggcgatcttggcggaggtgaacagcatggcggaagcgtttttacaggaggccacgcaggcgccgcagccgatgcaggcggccgcgtcaaaggcggcgtccgccttcactttttccacggcgatgttgttggcgttcggcgcggaaccggtacgcacgtcaatatagcctccagcggcgatgatgcggtccagggcggagcggtccaccatcaggtcccgcaggattgggaaagccttcgcgcggaagggttcaatccagacggtatcgccatccttgaacttgcgcatgtgaagctggcaagtggtcacctggcgttccggcccgtggggaatgccgttgatggtcagggagcacatgccgcagatgccttcccggcagtcgtggtcaaaatggatgggttccttgccttccttgaccaggccttcattgacgatgtccagcatttccaggaaggaggcgtccaccggaatgtccttggcggcataggtctcaatgcggcccttggcttcccggttttcctggcgccagaccttgagagtgagattgagtgttttagccatgttataatctttcttttgagtgttaatgtattggctatctttacttgtagctgcggatggcaaggtgcacgttctcgaaggtcagcggttccttgtggagaacaggcaggctgtccacgccagtgtattcccaggcggctacataggcgtattcatcgtcgttgcgcttagcttcgccgtccggcaactggtattccacgcggaagtgggcgccgcaggattcctggcggttcagggcgtcatagcagagcagctgggcgaattccaggaagtcggccacgcggcaggctttttccagttccgcgttgataccgtccgccgtgccggttacgcgcacgttttcccagaattccttgcggagctggggaatgcgttcaatggcgtgggtcaggctttcttccgtgcgggccatgccgcagtcttcccacatgatgaggcccagttcccggtggaaggagtccaccgtcttggtgcccttcacattcaggagcttgttgatgcgttccttcacttcgtcttccgcagccttgaattccggggcggcggtggtgacggcgccgggcttggtggtcgtcaggtaagcgggcagcgtggcgggaatgacgaagtagccgtcagacaggccctgcatcagggcggaggctcccaggcggttggcgccgtggtcggagaagttggcttcaccgaggacgtgcagccccttcacgttggacatgaggttgtagtccacccacaggccgcccatggtgtagtgggaggcggggtagatcatcatgggcgtttcatgggggtcgtcgtccgtgatttcttcgtacatgtcaaacagattaccgtattggccgtcaatccattcgcggcccatgcgcttgatttcatccgcaaaatccaggaagacgcccttgccggtgacggccacgccgcggccgtcgtcgcaggcttccttggcggcgcgggaggaaatgtcgcgcggagccaggttgccgaaggagggatacttgcgttccaggtagtagtcccgttcttcttcgggaacatcggaaggcttgatttccttcttacggattttttctgcggtttcacgggacttgggcacccagatgcggccgctgttgcggagggattccgacatcagcgtcagtttggactggtagtcgcctttgaccggaatgcaggtggggtggatttgcgtgaagcaggggttggcgaagaaggcaccacgcttgtaggctttgtaggcggcagtgacgttgcaacccatcgcgttggtggacaggaagaacacgttgccgtagccgcccgtgcagagcaggacggtatcccctgcgtaggatttgatttcgccggtaaccagattgcgggtgacgatgcccttggcttcgccgtccaccagcaccagatccatcatttcatggcgggagaacatttcaatgtgtcccttggccacttccttttccagggcctggtaggcacccagcaggagctgctggcccgtctgtccgcgtgcgtagaaggttcgcttgagctgggcgccgccgaaggagcggttgtccagcaggccgccgtattcacggccgaagggaacgccctgggccacacactggtcaatgatgttggaggagacttccgccagacggtagacattggcttcacgggcgcggaagtcgccgcctttaacggtgtcgtaaaacaggcggtaaacggagtcgccgtcgttctggtagttcttggccgcgttaatgccgccctgggccgcaatggagtgggcgcggcgggggctgtcctggtagcagaagcatttgacgttgtagccaagttcggcaagcgtggcggcagcggaggcgccagccaggccggaacctaccacaagtaccgtgtacttgcgcttgttgttcggattgatcagtttggactcaagtttgtacttggaccatttgtcctgaatagggccggagggaattttggcatccggcatccagtcgcttacgggaaaattaatcatgactttgagaggagttgatggttatttgatgatacccagaagaaccgagaccggcacggagatgaagcccaggcagataatcgcgccgtaggcgatggcgataaagttgtagaagggccggattttgcgggaatcgacgcccacagtctggaagatggactgtaccccgtggcgcagatggctgaacagcatcagaacggccaggatgtagaaggcggagcaccatacgttggagaatccggtcacgatcatcttgtacacgtcaaaggtttccaccgtaccgtcggaaataaaggtggtgaactgggcggggtcgtatcccacgcgcagggtgtactggtacaggtggtagatcaggaacaccaggacggtcaaaccggtatagatcatgtagcgggaggagagcgttgccttaatggtgttcttgaacacgtagggttcgcgggccgcatggttttccagcttcagctggatggtcagccagacgtggatgatgaagatcaccgcaagccccgcgcggattccccagagggctgcttccggcatggagtgcaggccgtgggcgtaggtgttgatccattcagggcctccgaagatgagaaggttgcctgccaggtgtcccgcaaggaacaagaccaaacataaccccgtcagagccacaatgattttgcggccgatggaggatgtcacgaatgtacatatggtttttactagtgcattcataggcgctctaatgaaataaatgcgtcttcacaggatgcccggttcaagcccggatggcaagcctcttcttgaatttccggcgcttttcggatttttgaaaaaccggggaaagaggttgctgtttatcagtttggaatggttatcattttgttgcctgttccggcttgacgaggctttccgcataggcgtatcgtctgtgcatgaaaagaagtaaaaaggaggtgctggacgcggatttcgcagcggcgcgcgccggcgttctggatgtggccgcatttctggaccgggtggatcgcggggaaggggaggcggatttccgctaccatgccctgatggatgttcttcccctcttgtccgcatccggccccggacgcgtccgggccattctggaagccctttcctacagggatgacaccgtgccggaaaccgccgcagccaaagcggcctgcggagccccgaacctcagcaaataagaatgatggctttcatagaacctcatatacatatggtgtgccgcaccacggacgaataccgggccatggcgcaggccggctgcctggcggtaggggaaccggcgttctgggccggttacgaccgttcgtccgcggacggtttccgggattatttcgtacagcttacggaatgcgaacccgccagggcggccaagttcggcatgcaccattacacatggctgtgcatcaatcccaaggaggcgcaggacgtggctttcgcgcgggatgtgatgaaactgattccggagttcattgaccggcccaatgtcctcggcatcggggaaatagggctgaaccggaatacttcccatgaaatgactatttttgaagagcatctggatctggcggtgcgcctcaaccagcttgtgctgattcacactccccatctggaagacaagcttaaggggaccgtaatgattctttccgccctgaaaaaccgtccggatctggacccttgccgcgtgctggtggatcactgtgaggaacataccttcccgctggtgaaggaggccggttactgggccgggctgaccctttatcccaccagcaagctgaatcccaagcgggcggcggatattctggaattgtacggaatggaccgtgtctgggccaattccgcggcggactggggggattccgatcccctggcgctgacggccctggcctgcgagctacgcaggcgcggtttttcccggcaggaaacggaacgtcttctcctggaaaatccggagacattcatgggacagtccccgaagttccggaaagtgtcgtcccgctaattccgcccgaggcgcggcggaggatacggccctctagtccccgtccgggaaaaagacggtgaggacggcgcccaggatgaccgccgcgtcatccagaaggtccagcctgccgattccgtcaaacaggaattcgtcgggagtcaggatgtaggcgccggcggcggccagaaggcatatattccgtttgttgaaaaaacgcggttctccttttctgcttttgaaataccggaacaggcgcagtagcagctgctgtttttgaaggttcatggacgggaacgggggataaaggttcaagctcagccattttcccactccttttccctgtttcggggaaggagtctgttgccgacggacggaaccgcagcgatccggaccgtgcggggaaatggattgctgaaaggatgggctgttccggatgctgagggaagccgggctttgcatgctccggttccggctgtcccggcatgggaaaaaggggcgtgtacggaagtggggcggggccggaagctcttgaaatgaccctaccgggggagactgaatgccatttttccgtcaagtgctggccgtgaggttgccgcagcaaatggaagcttttcccctctgttttttcggcagatgtttgaacggataaggaaaaggccggctcacgattttgtgagccggcctttgaatatagggaggcggacggtacaggcttatgccctgcggcggcgcatcatcagcgcggccagtcccagcaggcccagggaagccgtggcgggttccggaatgctggcgatttcactcatcagttgaccaacttgttcctgggaaaggagggagtcgtggatgtagagctgttcgatggattcagtcagtcctgcgtccatgagaatctgatcaatttgctggttgccgaatttcaggccgctgttggaatagtacgtagcgctgtcgccaaaatagatgcgggtgccaagatctccggtgactacggaaatggtcagggatccttccgtgcccagcggggtgtcaacgacgggcccgctgtatgaggtgttgttccataatccctggagtttccggtccgtgttcaggcccacgccccagcttacactgctgtttttggcgttaaacagagcggtataggtctccggagtgttgattttggacagatcaagaaccatcgtcacagacataacgtcgcggttgttggtaccgtatccgttgaaggttatcccggataacgtcagattgctgtcgtcagacgtgatggaaacggaatctttcagggtgccgaaatccgccgtttgggaggtaaagtccgaatatcccacgatagagctatccagcagagtggtattcgcggtggcgctcaggctcatgccggccgaaagaatcagggtggataataatttcttcatggtcagtatcttaataaaatgatgcaagattcaatgtatgcacttgcgcttgaataacgaatttggaatccgcaagcaattaaaaatattaagggttagtatattgtatttataattcattgaaaataatgattttttaatatctctggttcttttgtcaagatgacggggcaatctttgttattcattggtttcatgattgatttggcctctttttcattacttgacggattccaaatccgattggggaattccaaattcgctacaagttgccatccaaaaggaataataaatatgaagaaaacactgacatttttaatcgcgatgggaagctttgctgtttcctcggaggcagcgaccgtttttaattattacactcccggtacggataattacaatagtaccatccatgggttttatcttggcctggggtcttcttccctggctccttccgattcctcttctccctcctccctgtccggagagatcagactggacagttttacgctgcgcggagccgccaacaatttgggcgctaatgtcacttacggcttcctggtgctgaatggctccgacaattcggtcatcggctggagcaccaatacgggaactactgcagcagggattaatctgacgttcagtttttcttccctggatggttctcccctgcttcttgacgcggcattgacataccgtttcctggccgtgagccagtccgtgatggacttgatgcaggatacgtctaaaacgtatttatatgctgcggggggaacagccgcccctactgctaacacggaaggagataccgtaacgatcagcggcggattgactgctcccggcatccgcggccattatgacgccgagggagcgcctggtgattctgtcgttattacgggagccaacggaaccaatactttcagcttattatccccgattttcacggaaatccgaggggaaatggtgccggaaccagccacggtttccctgggcctgctgggactggccgcgctgatgatgcgccgccgcagggcttgagcttcctgatggcgaaaaatcggcggatgagagctgttcttgcggaacagctcttgttttttatatccagagaggaagaattgcttatccgtatgcgggattcatgccctccggaaggtacggaatttccgggggcaggaggccgtatccggttttttcggcatggcggcaatttgctggaaacgtttttgagacgcagtaccggaaagctttttctttaccggaaaatgccgtcaaattcggcagcgcgcttttcgtccatatggtacacggcagctttcacatagcggcctttcaggccggatagggaacccctttgcagctcacagacctggagggccgccgcatacatattattcgccgtcctattccccggcgctggtatttcggaagaacggcaatgggccccatgcccagcacttcatattcttttccatcgtctgccctgatgacggacgttgcatcaacgatgtttcccgacgatgcggctgccgtggacggcgactgcatccagctccgggatgaaggacggactgacgcgcatgatatggagcaggtaatgttcatggcagccggggacgaaatagttccagaacgcttctctcgtgacatgttccgtttcggcatggtctgaggattgttccgttcttaatgcaatggtcatgaaaggttgttctttacggctcccccttggagaaattccagaggcggtgcatcgtcataatgtccggaatgttcatggggcgcaccacgcggaacccgatcatgcctccgtccgtcaggtaccagatgcttttagggttttgaggatcctgacggttccaggcgggggtgctggcgcggcgcgcagcgcttctcaggctgtccgggtcgtcttcccacgaaccgccgcgaacgatgtgaggggcgccggggatgatgaccaaggggtctttcgcgggcaagccgctccgtttgccgtaggcatccggaacgtaagagtccaaaacccattccgccacatttccgtgcatgtcccggagtccccacttatttggttttttagagcctgttttctggtagcggtcattggagttgttccagtaccaggcgtactgatccagagaggcttccccgtttccgtaagaataggcgccgggggagccggcccggcaggcgtattcccattccgcctccgtgggcaggcggtagtaatgcccggtctgggcgctcagccattcgcagaatttgctggcggcgtggtgggacatggagatggcgggcagaccgtgttcatagccgtggcccatgcccaggttcatggcggtgtagggggcggtaggctgcgtaacggagtcccacagttcgtcatccggctgttcctccagaagctggccgtccttggcgcgcggacgcccgttttccatgaaggccgtataaagttcccaggggatttccgtttccgagatccagaagggggagatgctcactttatgctgcggaccttcgtccggtttccggtgcggctcttccgcgggactccccatgaggaacgttcctcccggtatggcgaccatgcgcagggaagctcccgccacgggaaccgtttccgtgtaggattcaaaacgtgccggatttccggaagcttcaatgagctgatggatttggcgcgttgtgccgaccagctcccgggacggcaggtcatccggaatgggaagggcaggaccggcagcgcggtccagttcccgtttttgcagcgcggatcggctttctccccactggcgtgcgctggtaatgcgcgcggcatctttcgtggccgggcggggggaattattttcttcccggcacccggccagcagggcgcttcctcccagaaagcaggaaacaaggaaaatgccgcgcatggaatggagaaaaccggaatgccctacatcgtcatgcctccgtcgcaggcaatgacctgcccggtgatgtaacgggcatcgtcagaggcaaggaaggccgtcagggcggcgatatcttccacggaaccttgttctttcaaaggtattttcttaacgatttcttccttgagattgtcgggaatggcattggacatttccgtggagatgaagccgggagcaatggcgttgcacgtgactttgcgcggagcgaattcctgagccagtgatttggtgaaaccgatgaggcccgccttggaagcggcgtaattggcctgaccgatgttgccgacgagaccgatgacggagctcatgttgatgatgcgcccggccggggatttcatgagaacacgctggagggccttgaccgtattgaacgcgcttttcaggttggtgtccagaacggcatcccagtcttcctctttcatgcggagcatcagggagtcccgcgtgatgccggcgttgttcaccaggatgtcaatctgcgggaagtctttcaaaatggcggccatggtttcctgaacggccgcgtaatccgctacgtcgcaggggtaggccttgcaggaatccggaaattccttgttgatttcttctgcggcccccccgcagctggatggactgcggctgatcaggatgaccctggctccttccgaagcgaagcggcgcgcgacggcattgccgattccgcggcccgcgccggtaacgatggctgttttacctgctaacttttgcatgctgcccacagtaaacccgtttttcacggttccggcaagcttgaaatggacttggccgcgcaggaacccatacggggaaggggcgtgccgggaatgaaaaaaagaggggggagaaacggggcggggggctactgtccggcctcttcattttcccggagtgcaccggggggcgccccgtcttcatccggttctaccaggtcgctgaattcatccgaattttccaaaatgtcctttaaggcggcggaaccgtaatagcgggcctcaaacaggcgtttgccttcctgcctgcagcggttgtccagcatttccattcgtttttccattttttctatcaaggcgtcttctttctccttttccgcatcgttcaatttatcctgaagctggaggaaatgccggatgtccttctgaatgtcctgcagcgttttgacggcgttgtccgcgctttccttgtcctgaacgcctgccaacgtctgctggatattgatggcaaaggaaaaggcctggttgatcagggattccgcggaaggaattttttccgccggagccgctgctgcgggggaagccgttccggcggccgtttcaccaaatgcaagagaggctccggacagaagcgcagaatataagagaggaacaagaaaagccttcatcctgttcttttaaggcaggatgaaatccacggcaaggaaaaaggggaaactgaaaaaagagccttattccgccgtgatgccgcctttttcatcgtccagaatgcctgacttttccagatagtagtcatatccacctgcgtaggcggtgatggtcccccggttcacatgcagggttttttgtgccagggaacggatgaagtgcacatcgtgggagatgaagaccagtgttccttcataatgcttcagagcctgcaccagggcttctacggacaaaaggtccaggtgggtggtcggctcgtccatcagcaggaggttgggcggatccaccaggaatttgaccaggctgagccgcgatttttccccgccggaaagaacgctgacgcgtttttccacatccagcctccggaacaggaaggaacccaggatggaacgcgcttcttcctcccggatttcagcgctgcatttcatgatttcctccagcacggtattttccggattcaggttttccgttcgcgcctgggagaagtagccgatgcgcgtcgtggtaccgggagtgcgttgtccggagtcaatggggatgatgcccgccaggattttgagaagagtggatttgcccgcgccgttcgggcctacaagaacagtgcgctccccgcgttccaccagcaggtccaggttttcataaaccctgcggtcgccataggattggcagactttttccagctcaatgactttctgggtgctgcgcggaggctgggggaagttgaatttaaatactttcctgcgggctaccggtttttgaatgattttcatcttttccagctgcttgatgcggctctggacttgcccggctttggaattgatggagcggaaacggtcaataaattcctgaatgtgcgctatttccttctgctggttgcggtaggccgcctgaagctgctcgaagcgcacgtccttttgttggaggaagtccgagtaattgccgcggtattccaccagttcttcgttgtcgatgtcgtacacgctttccaccagctcatccatgaaatcccggtcgtgggaaatcatcaggatggctccggggtagtttttcaggtatcgctggagccacagcagggacaggaggtccaggtggttggtaggttcgtccagcatcaggaggtccggctccaggacaaggagcttggccaggtacgcgcgcatgatccagccgccggacatttcccgggcggggcgatggaagtcgctttcccgaaaggccagccctttgagaattttcttggctttgggctccagctggtaaccgttggcggcgttgaaagtgtcaatggcttccgcgtattccggcgtatccgttttgttggcgttttccgccgtccggatggtgtggatggcctgttccatttccggcgtgatgcccagggcgatttccagaacggtttcatccttcggttcgctggcttcctggggaagatagcccacgatggcgtattcatccatgctgatggagccttcgtccggcgtgtcttctcccagaatcatgcggaacagggtggatttgcctgctccgttggggccaaccagagccacccgttccccccagttaatggtcatttccgtttccctgaacaaggtccgtccggcgtgggattttgtgagatttttgatcgtcagcatggtgaagagaggatgtattctaccgggatggaaaggggaaggcaagagccgtcagggcggaggcaggcatttttgaaagctttactggatttttacgcgtagtctgctagccttggcgcgccatgccgaccacgcagacattcaggcttttgcttgctgccgcccttttgtgcggatggagttcctgctgtactcctccggcggaggattatatacaacaaacttacgtgcagcagcaaatgtccgggctggctaatgccttcctggcgctgctgccgccggatcaggcctctcttcccgctgccggagcggaggccaggtggctggcggacacggccgtggtccagtccgccgcgattgcccgggacaacaggactgtgctgtttggctggctgaacaatattctggtcaattccaacctgcgcgacagggggttgtgctggcaggtccagcaggatttgtaccgggacctgcgccgccgccccgtgaagtatttccgcatagggctgacgattcgagaccgaggaacgggcagggagcacagttgcgtgtatgtcaatgccgcggggaagggattgcagggctccattgttctggatgcctggaagaactgcgggcatctggtgacgctgacccagaaggaccgggaaggcggcaaatgggaggaggactggcgggaaccatttgtttccaaggcctttccggagggccattcctacggcatggaacatcacctggtctggcccgggtgggccaggaaacgccccattctggttcagcggatattccagtccgatcagcagaatgaggcgaaggcggccgctgaataaaggggaagcctgatccggcaggaaccggcacacggtgctgcgccgcggcggtttgcggtatcctccgtttttaaggaaaatcccggcgaatcggcaaatggcggagggaatccggactcagggcaaataaaaacgcactcagtgcgtacaccgagtgcggattaattggataatttgctagtgttgcagggcaaaaccccgctgcaaacttacttgcccttggcctgcacaaccggagcgggagcaggagcggtggtttgctgttgctgctgctgctgggagcaggaagcgaccaggcaagcggcgccggcgatggcgaggatagcgatgttcttcataattcgaattaaatacagtgtttgttaactactggaacctccgcatccacggaggtttgctggcaccaatgtaaatggtggcaagtagaaatcaagagattttcttgttccatgtcacggcattacagaaaagagcaggacccccggtttctgaagtcctgctctttttgatgcgttatggaaaacggattgtttcaaaaccgttttttgcgcttacaggctgctcccaagctcaatgatagagtagtccccgtccggcctccggtatacgatctggagcacgtctcgccgcgcattcctgtagagtacgaatggcttatcggaaagttccagttccatgatggcttcttccttgtaaagctttttgagattgtagctttctctgtgaatgagcaggggttccgggtcttccggggaatctcctgggtaatccagcacggaatcgtcatataccgtttcatccagcttgcggatagtttcctggtgatggggacggaaattcttcatcaggcgcgttttgtgcttgcgcatgcggcgcatgattttggtgatcgtctcatcaatgcaggcgtacatgtccgtcccttccgtggacgcgtcaatggtgatatgatccgagcagaacaggattacctgagaaatcttgcggtcgcgttgcacatcaagcagtactttaacctccataatgcgcgggaaatccaggcggatcccctcaatttttttcgttacgaattcccgaatcgcgtctgtgacttccacgtggcgccccgtgatcgtaatgggtgtgtttacgtttaccttttgcattgtcgtacctctttctagttgatgttaatgcgcggaccccgtccgcacctttcaagatatacagatttgacaatgtttgtcgaggaatcctttctttttttcgcgtgcggggaaaggcacttttctgtttccgtttccatatgccggatctgggcggctctcctacctgttgtgagccaatcaatcggggagcggccgtttccgtttatcgctttccgtcgtcttcggaatacgtttgaacgtctttgtcatacaattgcgggtataaaaaaattatttgaaagtacttgacatgctgcggaaatgccttataacagttgcgcactcctctacagatgctctctaaatcgcgggatggagcagccaggtagctcgtcaggctcataacctgaaggtcgcaggttcaaatcctgctcccgtaaccatttgaaaaccctgcaagttcattgcttgcagggttttttcgttacggatggaaaagcatccggcgagtattgggagtctgttgtttctgggcgtctttttttgacttttcaagctgccgggttatgttaggctgattcgcaatatcttgatacaacatggaattgctcatcattgcctgtttgattttactgaacggcattcttgccatgtctgaacttgccgtcgtttcttctaaaaaaatcaggctcgaagccgaggcgcaacaaggcaacaggctggccgcagccgctttgaagctggttgaccagccggagaggtttttgtctacaatccaggtaggcattactttgatcggtattttgaccggcctgttttccgcggacgtcttgtcagatgatctgggaggttttttctccgggttgggaatgcctgaattttatgccttttatttagcccgtattctggttgtggctgtggtgacttatttgactattgtattcggggaactggtgcccaagagaattggaatgtgtgccccggaagtgatttccaaactggcggccgtgccgatgaaagccttttcttgtgtcgcagcccccttcgtatgggtgctttccaaaagcacagttctcgtatgcaatttgttgggcgtcaggaagatgactgccaaggtgacggaagaggaaatccgcctgatggtccaggaaagcgcccgggacggggatgtgcaggatgtggaacgcaagatcgtggaacgtgtatttaatcttggtgaccgggatttggaatccatcatgactccgcggggggatattgcatggctggatgtcaagatgacgggggaggaaatcgcctcagtcgtgaaccgtttgccttatcataagtatcctgtggctgacggttccctggaccatgtgcagggctttgtttatataagggagttactcggccgtcttcatgacgggcattttacggtgacgcgtttcatgcatgagccggttttctttccggaaacgatgaaagtttacaacgccctggacgaaatgaagaggaggcatctgcagtttggttttgtctgtgacgaattcggcgatgtgaaaggcattgtttccctgcgcgatattctggaagctcttgtggggacgattcaggagccttatgaagagtctgaaatcgtcgttcgggaagatggctcctgtctggtagacggccagtgttcattttacgattttctcgtccattttcaggaagatatgctgtattccaagtatgattacaatacggtcagcgggttaatcctggagaatctggggcatattcctttgaccggggaacgcatggcatgggaaggatttgtgtttgaaatcgtcgatatggatggagccaggattgataagatactggtcacccgtcattccttgtcccggcaccggaatcccggggcggagggaagtctggaggccttgtgacttgttttcccgttttcctgtcctgaagggagcggtattttttgtggaattagagtgggaaacggaaaattttccggttggagaggcgatgacgaaacagccgtgcgagaggttcgttatccgttttagtccttattataaacggataacatgagaaacgtcgccagcaatgtggctgatcgttttttcatgttgttttgttgggatgatctacggtgtttcccttttgatgctgcgttgatttcagtaagcttcattttgtgctttgcctgccgttttcgattgtctgagaggttttctcttttgaatcatgcagtttcaacggaccgtagaaataggaggcggtggctcccccgtcaatcaggaagtccgcgccggtgatgaaagcccccttgccgcccatcagcaattccgctacatgggctatttcatccgccgtaccgggtcttcctgcagggcacttcgcaaacatgtttctgtaaaaatcacctctgggaccgttgaattcatcgattgccagaggggtgactataatgcccggggaaatggagttgatgcgtgcgcctttggcaccccatttgacggcttccgccatgacacgcttgacgttgcagcgtttcgccatctggtaggcatgcagagtgtccttgatattcccgggttggaggagttcgaggttcagcaattcctctgttggagtcatggccagttgttcgtcctgttcggcagtcagagcgggcatgcggtgaccggattggctggagatagttactcccgagccgccggggcaaataactttccccacctcttccagcaatacggcggttccgtagagatccactttaagaatggtttcaacggatgcctggctgggggaaacccccgctgcattgacgagcatggaaatattgccgtacctctgtgcttctgcaatcaaatgcaggatagagtcccgggaagagagatccatctctaaggggatggtgtcaaatccggcctgattcatcgtccgggcaatggcatgcgcgttcccgatatttttgtcgccaatgacgatttttatgccgcttcctattctgcgggcaatggccatgccgatttgcccggctcccgtcaatatcatgacttttttggatagacgttgttccatgggctatgaaatcagttgaaatgaccggtttttattcctagccatatgttatgttcctctagccggacggtatggccctcccgcaaaaagggcaatgcaaaaacggccataggtgatggtattgcaaaatgggtcatatggattgaaaaactgagggggggatgaaagaacccaggcaaaagtcatggcagcatgccgattcttttcagccatgttttgacgcctgcggcattgcccggcatgtcaatcccctcatcatcggcacgtccgggagttgtaatatctcctgggtcaaggtcttctggaagagttgacggaatgtgccgggaatggggcgtaagcctgtaaatttgttgcatggattcgtttaaataagtagtcgcgtcataagtaaagaagggaatgagcgttttccctttcaggtcaaatgcctctaaaaaggtgcaaatcaccatggcaggctgatgccaccagattggagagccgacgaagatagtatcatatttcgccatcagggaggcttcaggcaagttggcgacctttgggcgcaggttttcataagcttcttttttgacacggtcgctgtcgcggtaagggtcggcattgtaggcctcggcggcttcaatccggtagagatccgctccggtcagtttcgcaatttgttccgccaccgctttggtattgcccgttgcggagaaataaacaaccagcggttttcccgcatcttgtccggttctgcggacaacaggcagcccttttgcctgcaacagcgtgttcagctctttccggactgcatctgcttccccggggccgatgttcctggacacgatatcaagcagctggtgcagctgtgcgggtgttatgcccagattcaggcagatgcccatgtgagagcgggccattggttccacaccgcctatggccgcgaggatggatacggtagccaattcgcgttcattataggtcagaacgtcccgttcaaaaatatctgcaaaaaggtgttctttcaggaaacgttccatgaccggggcaaattcggcataggcagctttcggtgcattgacgggaatgccggagatttccgcaagaatggcgcacccgcgatcgtagcggctgcgcttgtcctttgtggggcaggcatcttgtcccggggcatcggctatgcctcgggactttcttttatccagcacggagatgaatgtctgcaaccccctcaggcttcgcggaaacccgcaataggcgtaggaatgcactaaaacttcccggatttcatttatcgtcaatccactgtccaaggcggcattcagggccggctgcagctgatgcaaatcccctctgccggtataggcggcaatggtgatgatgtgtttctgcctggaggtcaattcctggctggaaagggcggaatttgccgccagagccagcacgcacgacatcaggcagaacaggacagacgataaaagtttcatgaacctgggagagcagttttacaggtttttcccgaagaattccgccagctttccgacagcctgatccacgtattccggcacgtagtaggtcttgatatgcgtggcgcccggaatgaggaacaattccttgttgagggttcccgtggcgcggctgtagcattgttccgtcatgtagaaggtgtcggctctgctgcccgccatcatcagcaggggctggttaatcaggtgcataccttcgctcgcgtcaaaggcaaagaggtccatcaggctgcttttggtatagcggaaggtggaattggggtgggcgtggctttgcagataatagtcgtagccgtcccggtagaggtcaaagggcagttgggccgcctgttccggcgttactcctttcatgtctcccacgtattccggctgaccgccttccgcttcgcgctggcgggcggcgcaggcgtcggcaaggcgttcctgcacgctgttgatctgcgagtcgagaaacccgttgcgccggaccaggccggtgttgaacatgctgagcgtggcgactgccttgaaacgcttgtccgtctgtgcggttttcagggtgtagcctcctccgccgcaaatgcccaggatgcccagacgggaggcgtccgctccgggatattgcagcaggatgtctgcggcgcggcggatgtcttccatgcggttggcgggtttgtccgtattgcggggagtccctccgctggccccctggtaggccgcgtcaaatgccaggcagatgtagccctgttccgccatgcgctggctgtaaagtccggccacctgctccttcacgccgccgttgggatgcgccacgacaagggcggggtattttttcgaggcatcatatccggcgggcgtataaacatgggcggcaatttgcagtccgttcagcatataggtgattggatggatgttgacgcggccttccatgttttccgtgacggctccccggtaaaccagcccccagggattggcgttgtggcttttaatgctttttgcttccgtaaatggggattggcgggctggggctgttgaaacgaccggagaatcatttgtgttcatttgctgcgcatttaactggtggttgaaggaaatcagggaaagggctattgaaataatggcgtttgttttcatggcatgtactttgctttctcaagcagttcccattctatcatgaaaggctctcttcccgtcgatagacggattacaggttttgctaccatgattacagatggcggacgcagaaagtaaatgtgcgggggagtgtgcctgtcacctgtcaagtttgttctgccggagccaggcggccatatggtcggcaatgatgttattgtttttatcggacatcagaaaatgcgtatttccccggatgccgattttgggcagttccaccagagcagcatggccgccatgcctgttgacggcctccacaaatttgcgtcccatttgcagacgtacgcgccagttttcccctccaagcttatcggtgacgttttcaggaatataatctccgaagtagaggatgatggggatttgggtgagcttgttgaattcctccgtcggaacggcgatccccttcatcgtgccggtgaggctgggcatgtcttcgggaacctccccttccgggaagacgtaggtgcccggttccagggaaatgatgccgcgcacttccgggttgcggatggccgtcagccagccggggaatccccctgcggagtgagtgaccaggatgcccttgcccacgcgcttgaagagggcgctcagggcatcgagttcttttgtcatatcgtgcgtgccgatatcgggtgtcatttgtcggaaaaactgatccagggaatccttgtccgtagggaactgtactcccgggttgaatgcgggccattcgccgatccggaagatgtcgaaccagaactgctcgtcggcaagcggcctgatggcggtttccgccgtcgttctgcccgcccgtccccgtcctgggaggtcaaccaggtaggtggcgtatcttttgcgcaggaacatgtcattaaagccctcccgtccgtccggtgttgtctgccagcaccgggcggactgtccatagccatgaatgaagattagaggaagcatgcgggcatcggccggtatctggaagtccacggcggcgtggtcggcatggtaactctggccggcttcaactgcttgcccccagccgggaaaacggctgttgtcatatgttcccgggcgttgcagaatgttcccgcccacggcaaaactgccctgccttgcaataagcaggggggcttgttccgcagctggaacaggggggggcctcccgcctgaatcatggccggaggcgtgaatatcgataagaaaaaggcagggaggattaaccggttttttttcatcatttcatgaaggagactgagttgtcatgcttttgcaagggaggaaaagcgtgatttgttgattaatgggttgatgatttttctgtgatgggacttcctccaaatacgtcggacatgttcatgaaggagagagctgcgtcgatctgccggacttcatccgcggatagtattacatgggctgcctctgcgttttctttcagtctggagaactttcgtgttcccggaatgggaacgatccaggactttttgcagagcatccacgccagggaaatttgtgccggagtggcctgtttttcttccgccagattatggagcaggaggaagagatccttgttggcgtcaaagctttccggtctgaactgaggcatggagctgcggtagtccgtccccggctcaaacgtggaatttaggttgtagcggccggagagcaggccgttggccaggggggagaacgctacaaagccgatgcccagttcttccagtacgggaaaaagggattcatgatagcgcgccatcatggaataacggttctggatggcggtgaccggacatgttacgtgcgcgcgccgtatggcttcctccgttgcttcggaaataccccaatgcgcgattttgccttcacggatcaactcctgcatgacgcccgccacttcctccggcggtacggaatcatccatgcggtgctggtaatacaggccgatgcgttctactcccagccttttaagggaactttccacggattggcggattgtgccggggcgggaatcggtgatcagcgggtatggtccggggcctgccgtgccgctgaaacggattccgaatttggtcgcaataacgatcctgtcccggtagggcgccagcgctttccccagcagttcttcgttgtcgtgggggtgtccgggcgttccgtacacttccgccgtatcaaagaatgtatatcccatatccacggcccgggacaggagttcctccatttcctttttgtctgcgggcgctccgtaggcatggctcattcccatgcagcccaggcctatggctgaaaccttcaggccgcttttgcccagctccctgcatggcatgttttgcccgttaattgttttcatgcttgcaagactaccataggatttctattttttccgatagacggattacaggttttgctaccatgattacaggttcccggaatgagctggatagccggctcccttcctgctatgctccggtcaaaagcagagaaagggcatgggcattattctgaacatggattccgtaggggactacaactcctttttggggcaggaaacgctgcacccgctggtcagcgtcgttgatttttccagggtcccgccgctgcggcatgcccgcaaggcttacgggttctatgccgttttcctgaaagacctgaaatgcggagacctgcggtacggaagacattattatgattaccaggagggaactcttgtcttcgtatctcccggccaggtgctgggcaatgatgacaacggggaatatttccgggtagagggccatgccctcctgttccatcccgatttgctccgcggcacctccctgggacgcaggatgaaggactatacctttttttcctatgacgcttccgagtccctccatatgtcggagagggaaaggaatttattcctgaacggcctgacggagatccgggaggaactggaacggggcgttgaccggcataccaagtccatcgtgacggccaacatcgaagttctcctgaaccactgcatgcgtttttacgaccgccagttcattacccgcgagaatgtgaacagggatgtgctgacggagttcgaacgtctgctggattcctacttcgagggagacaagcctcaggaatggggtctgccctatgtgcagtatttcgcggatgaactgcatctctccgccaactatttcggtgatctcgtcaagaaagagacgggaaaaactccccaggagcatatccatatcaagctggtggacaaagccaaggagctcctttgcgccaccaataaatccgttagtgaaatcgcctatgaactggggttcaagtatccccatcacctgagccgcatgttcaagaagaatacgggattttccccgagcgagttcaggttgtcggcgtgacgcccgctccctgtcgccggacagcctgcggcattctgtctggagcggaacggttcgttccggattgatagccgggccgggaatacagaaaataatcttctgttccgaacggcaataaacaggaatgcatcttttttcagctgttctgttgtccgcggtattcctattggcacatgcaggcagtttccggtgcctagggaatgtattgccgggggtacaataatggcttcagcctgccggattcatattacggttttatgccgtggagaagaaataacgtcatcttggaaaggcaaccttttatgaacaggtattttatgaacgtgtggagcgatcgtgcgccgttactgccgtctttggccttgttacggttgcggacaaagggtatggtgcggcaagataaccgcgatattggacggcatgatgaatgaaagcggtctgctgcccttcaggagacgaccgtttgcattcttcccgcaacgccgttccgctgaataatataaaacactacaataatgggaaactcaatagaccatggcatgttccggaagtccgtcctgctggctttcggattgtccatttccttatcgggcttcgcgcttgccgcatcggaagaaccggttccggagcaacaggcccaggccgttgaaggcgccagaaaaatcaatcctgccgccgtggaagtgttgcttgacaacaaccgccggatgacgctcgatttttacggagacaatgttttccggattttccgggatgacagaggcggtattatccgagatcccaaggcggaaccggaagcccgcattctggcggacagtccccggaggccggtttcccggctggatgtggaccagcagggcgatgcggttgtcatcactacggggaaggtcaggattgagataaataaaaagacctctcttttcaaggtgatcaatctgaaggatcattccgtggtggtggagcaggcgtcccccgtcctttttggaaagggcaaaaccagcttttccctgaaggcgaagccggacgaatatttttacggcggcggcgtacagaacggccgtttttcccacaagggaaaggtcatttccatagaaaaccagaacagctggacggatggcggagtggcttcccccactcccttttactggtccaccggcgggtacggcgtcatgtggcataccttcaagaaagggcagtatgatttcggctccagggaagagaatctggtgaacctctcgcatgatgaaaattatctggatgtctttttcatggtcagcgacgggccggtcagccttttgagggatttctaccagcttactggcgctcccgttctgctgcccaagttcgccttttaccagggccatctgaacgcctataaccgggattactggaaggaagatgaaaaaggcatcctgtttgaggacgggaaacggtacaaggaaagccagaaggataacggaggcattaaggaatccctgaacggggaattgaataattaccagttttccggccgcgccgtcgtggaccgttacaaggcccatgacatgccgctgggatggcttctgccgaacgacggctacggagccgggtacggccagacggataccctggacggcaatattgcgaatttgaagagcctggcggactacgccaggaaaaacggcgtggaaatcggtttgtggacccagtccgacctgcatcccaagccggaaatcagcgctttgctccagcgcgatatcgtgaaggaagtgcgggacgccggagtgcgcgtgctgaagacggacgtcgcctgggtaggcgcaggctattccttcggtctgaacggtattacggacgtagcccagatcatgacttactacgggaataacagccgcccgttcattatttccctggacggctgggccggaacccagcggtatgccggcatttggtcgggcgaccagacgggcggcgtctgggagtatatccgtttccatattcccacctacatcggctccggcctttccgggcagcccaatatctgttcggacatggacggcattttcggcggaaagaacccgttggtgaacgtccgcgatttccagtggaaaacgttcacccccatggaactgaacatggacggctggggagccaatgagaagtatccccatgccttcggggaaccttacacctccatcaaccgatggtacctcaagctcaagtcggaactgcttccgtacgcttacagcattgcggaggaatcagtttccggcctgcccatgatccgggccatgttcctggaatatcccaatccctacacgctggggaaagcgacgcagtaccagttcctctacggcccttacttcctggtggcgcccgtttaccaggaaaccagggcggataaggaggggaatgacgtccgccatggcatttacctgccggaagggcagtggattgattatttcaccggggatttgtatgagggcggcaagatttacaatgatgttgacgctcctttgtggaagctgcccgtgttcgttaaaaacggcgcgatcatccctatggcgaacccgagcaacaatgtctcggaaatcaatcccaatctgcgcatttacgaactttatccgcacggcagcacctcctttgccacgtatgacgacgatggcgtgacggaggaatacagaaccggcaggggcgtccgcactctggtggagtccagggtggacggcaaaaacaacgtgaccgtcactgttcatccggcggtgggggatttcgacggtttccagaaaaagaaggccacggaattccgcatcaatgtgacgcagaagccgtccggggtttccgccaaaattggggaaaacagcatcaacctggcggaagcgaattccctggaggatttcaaatccagggagaatgtttatttttatgaccgggctcccaacctgaacaggttcgcaacgaaaggcagcgattttgaaaaaaaggtgatcgccgggaatccgcaattgctggtgaagctggccgcagcagatatcacggcggcccctacggtgctttccgtggaagggttccggtttgaaccggctgaaaagtatcgcctttcttccggagccctgaccgctcccgccaatgccgcggtgacggaggaaaacgcggcggcctataccctgaagcctacgtgggacgccgtcccgaacgccgatttttatgaaatcgagtttggaggaatgctgtacaccaccatcaagggaacggaattcctgtttgaggatttggaggccgagactccttattccttcaaggtgcgggccgccaaccgggacggccattccgcgtggacggccgtcagcgcgaagacgaaagccaatccgcttgagttcgccattccgggaatcgaaggtgaaacgagcgtggaaaaccagggcagctccctggcgaagctgtttgatttcaaggaaaaggatgtgtggcacacgaagcatgatgcgaaggctgttccgtttgacctggtcatggacctgaaaacgattaacaggcttgagaagtttcattacgttccccgcgaggacggcggcaacggaacgctgctgaaaggcgctgtttattacagcatggaccgggagaactggacgaaggcaggaacgttccagtgggataaaaatggagacgtgaagatattcggcttcaaggatgctcccacggcgcgctatatcaagcttcatgtcacggaaagcgcgggtgattacggctccggcagggaaatctacgttttcaaggttccgggtacggaaagctatttgccgggcgatatcaacaacgacggcaagattgaccggaatgacctgacttcctacatcaactatacgggcctgcggaaaggcgattccgactttgaaggctacatcagtaacggggacatcaacaagaatggccttattgacgcttacgatatttccgtggtagccacccagctggaagacgaagccgaccagccgcaggaagaagccgacaagaaagatgaggaagaggataaggcggtaggggacgacgagaagaaaaaagccgccgaggaggcaaagaagaaagtccgcgtggacggaacgcttttgcttagtgcggataagaaaaggtattccaggggagacgccgtcaaggtgtccgtaaagggccggaacctccggctggtgaatgccctgagcttcgctcttccgtatgaccccaaggatttggaattcgtgggcgtggaggtgaagaacatgaagaacatggagaacctgacgaacgacaggcttcatacgaacgggaccaaggccctgtatcccaccttcgtcaacatcggagacaaagagcctgtggaaggaacctccgaactgtttgtgctgaaattcaaggctcgtcgcgacatgaagttccagccgaagctcacggacggcatggtggtggataaaaagctgaacaccaaaaaattgtaatttaacatcctgatacggctccatgcccggccaaacggcggccgcgcatggagcctgccgttccggcggagtatttccgcagtattcatcgctgtggagcggtgttcttccgcgtgtttcggaaaatccggacggagcggcaacgcggaaatattttcctgcctcgcgtttccggcggagcgtgatgcaatggggctatcttaacaggcggatgaaccgtttttttctggcgcgaccggtcttttcccttatgttgggggcgccagacaggccccacgatgccatgaccggccccggactcatctccttgttctgttttttgataacggccgcctattttttgcgcggcgggatgtgtgcgggcattgttttgtgcatgggcctagcgtttttttcattttcccgtcgcggctggcttcgcaggagcgtcacgtctctgctgcaggcttccctgcttttctggggggcggaagcctggcgtctggccaggctgtggatgatggaaggggggcctttcctgttctggacttccattccggctgccgcgctgttgcttcatgcggcggccattctatggcggaggcgcggagaaaagaatttgcccgtcccggagctggcccgcagccgcgtattttccgtttccgtattgcttctgtttttgctggatgcgctggttcctttccgtttgctgatgggggagcgcatcttgccgtggcagggggctaatgggctggcgattcttctcctggcctggtggggcggctattgcgcggaaggtttgttgaatccgcagacgtctccgcgcaggcggcaggtgatgtggaccgtgtttgcctccgctttttttctccagtttctgctgggagtgacggtggctccctccctgctgatgacggggaagctccatattcccgtgccgtttatgatgatttccggcccggtttaccgggaagaaggttttttcatgctggcattgttcagcgtatccgtccttatggccgggagttcctggtgcagccatttgtgctacttcggggtgtgggactgcctggccgccgcttcttcccgcaggaaggggcatccggtgccgggtggaaaacaagcctgtgactggaggtggttttcccttgccgcggcagtagggattcccctccttttgtccgtgtggggcgttccgctggggtatgccctggcggcggcgttcgccgtagctctcacggctccatttgcctggaagaaaagttccgaaaacggtgtgcgggaatattgcagcaagttttgccccatggggctggccgccagtttgctgggcaggctgtccccgtggcgcatgcgcgtcagggagacatgcaccgggtgcatgcggtgcgcctccgcctgccgtgatctctccatctcgcgcgggggcggggcctgccgcatttcccggcgctgcaccttgtgccgcgactgtatttcccggtgtccgcatggcgctttgagcctcggcatggccggccccttttcctctgtgccgtccgcgcgggcggatatgtattttgtaacgctggtttccgtcatgcatgtggtcttcctggccacggctcgaatctgattttatgttgccatgaaagatttctgctccctggagtatccgttttgcggaggatggatggcatctgtccattaggaggctttttcagggctgccggcagagggattcaggcagcggtgcaggagggggacggccctgaattcatggaacggcatggttccctcttcccatccgaaagagtggattttggtttaagaaggccatttttgttattcattgagagatttattgatgatttaaagtttttgttatgatttttgaatgaccgttcaatttattaaagtcactaaaaaagatagggtctgctatgctccggtgccggagccgttggaagagggggataagctggaaatcatggaaatgaaggatgaagcccttttcccgccggcagggaaaaacgcaaggatttccctatccaggaatcccatggtattcgtgaaaatgaatgacggattccagcgcatcctgatgaagaatatcctgtatgtggaggcgggcggaagttattgcacgctgcacgtgcacggcatgccggctatcctggtatccgctccgctggcgcgggtatccgagcatctggatggggaatattttatccgcgtgcaccgttcctacctggttaacaagctgcatatagaatccattgcgggcaacttcctccaggtgggcgtcgttgccattcccatcagcaaattcatgaagaaaaaagtgctgggcagtttgaacatgctgtcgttttccaaataagttccggcctgccgcacgggctcctgcggcgttccgggaaagcgaaatggaacggccggaaaggcgggatggaagcagaaacggaatggccgcatcattcacgacgtcgccggaaggcggcatatcaatgaatctaaaccagaaatagaaattaaatatatggcaattgacagatcagcagcagaagcggcgacttcctccctgcagtcgctgcctttcggcaacatcatcggcggtcccctggtcgcctgtgtggaagcacaggcccaggcggcccggacttcctgggaattcatccagaacgtgggcctgtacgcggatggggaagagaagaagacggtgaacgtttccttccagttcatcaaggacggccgcatggctcagattacggttccccttctgaccatcgtccccattccctatatcgccattaactccatcgacatcaatttcaaggcgaatatcagcgcgtccgccgccagtacggagacggaaaattcctccagttccgtagacaccagcgtttccgcctctgcaaggtgcttttgggcgcgcggcagcatgaatgccagctattccagcaaaaaggactcctctgcgaccagggattccaaatacagcgtggaatacaccatggacgtagccgtccatgccggacaggacagtatgcctgccggaatggccaaggtgctggagatgctgaacaatagcatttccgtcgtttctccggaagggttcctggacgtgcagcatgccatccaggacgacggaaccgtgaaattgataacctcctataaaaacagggaggggctgtttgacccggaagccatcaccctgcggataggcgaagcgatggaaatatttgaaaacggtgcggggaatgaagccaggattgtgaaaacggattccggcaaggaatacacactttccagggaagacgccagaaactgcacggtgagcgctggagaactcaagaggaaggtggctgtaggcgcctgataaccgaaccatagcgatttctcctccattccagagccatgtcccgtcttaatctcatcgtggaatccctgctgaaggacattattgaagcgcagcatgcggcaaactgccacgcggcatcactggcgcgccagtatgggaagagaggccgtgcgtgcggtttcccgctgcccagcgcccagataggctccctggaattcgatttgaaatatgcggtgacgggaacttccggggtggaggagaaacagattgcggacacggagcagtggagcctgttccggcaggaactggaagagcgcgtgccggcgtttgccatccgttccattgtgatggccgtggtgcattccagccttccggacgacgaagcgagaagcgacttctcaagcctgctggccagggaggaacagtggaaaaagaatttctgctcctacctggggaagaaaatttccgcagccgtttccgctcatgagggcgcgctcctgaaggcggaacccgggctggacaggggattgctgctggagcttctggcaggcgtcgcggaaagggaattcatggataatccggagctggaggacctgttccagggaacccggggagaccccctcaggcaggaatgccgcgccaatctccgggaaggcctttcctctttcttggccgctctggcggaaaagtacgtcctcaccaggcaggaaagcagtgtggtggtggatgtggaagtagaggcggacaagctgaaaaagatgccggaggaagccgtacagaccctgcgcctgaatatatcccctgtttccattccctccgttctggcggagcagaatgatgtttccgggttgtccgcgcaatagtgatagatgatgagtgattctacaaataataacaaggtgaacgggcacattatgagcctgcagcagctgatttcagcgccgctggtcgcaacgattgacgcggatgcgatgtccacggaacgctacatgaagcatttcatgtccctggcctttgagtcctacaatcctgtggacggttccaccggggcgttgaggttgatcagcttcaattttacggacagcgacgcttccggcggcgcggaaaagaaggtcagcgtgccgctcgtcagcctggtgacgctgccgctgctgcaaatcaaacaggcggattttgattttgacatcaatatcattgacgccgtagccgccgcgccgaatgaacatttttccctgaacaggggagaggtggagtcccccggcggaaaagagcgggatgaagggctgaattttcgggcttccctggcttcgcagtccgggagaggggcttcttcctccctgcaggcgaacatgaaaatccatgtctccatgcagcaggctgacatgccttccggcctgtcccaatttctccagctggcttccaggccgcattatgaggatgtcccttcccgggaaaagaatgattaattgaaaaaaacgatatggaccagaaaacaacttattcctaccagcgtactccgggccttgactgccccaaatgcggggtgtatttccccacgaccattccggacttgctgtccggctccatcaggtgcccttattgcggcctgacgctttacattgaccggaaagaatcaggccatgccatgcaggccctggaaaatttccagaacgcattagacaagcagcttccctccgcctccctgtcatgaagaaaccgttgattatcctgtccgccgtgctgtgcatggttctgccgtccttgtctccggcggagatgcggcagcgggaaccccgccagcttgccgccgcctggcaggaagtaaagaagcagatagcagacgacgggaaaaccatccgtgtgagggacggcattcaagcgcttgaactcctggcggaactggggatctcttccgttccggcggacggcgtcaggctgtcccgcggcagtctgaccattgtggtcacgcgtgggaagaaagaggacggggttttttacgtgctagctgttaaggaagaagggggcgcaagcctggaagtgaagatggttcctccttcctgatttgccggagaggaaggtcattcattttcaaaatcccacacgcggcggcgggcgtttttcttcgtccgcccgccgttggctttccggaaggggtcaaaaagagagtccagcccgttccctttcagcagcaggcactgttccatcagacggcccagtttccctttcgggaaccctttggcctggaaccaggccagatattcctgggggacgtccatcagcggacatcccttgggcgggtatttggcaggaccgtacatgccgaaagggatatgggtctgcgcgatttcctccaccagttttctcaaatcttccgcatctggtatttcaggatcgttcataggttttgcagaataaatggttgcaggcattccgccagcctttccggcgtttccaggggaagccggtggccggcatgagggatgatgacggcttgccctcctgccatgcgccgcgctagggcgctgaatctggcatcgcgctgtccggcaatccacagctggggaacaggggattgcttcaaaagcggggccaggttttcctgtgcgcccacggaccagtcaataaaggcgcgggagatggatttgcgccacggtttcagggaagaacggtccggaggcggcggactgccttcaaatacgccctgggcatcccattccttcaaaaaattttcccaagatgcggaaaggcattggacggcccattccgcatccttcgcccgccgcgccgcccgttcctcttcatgttccaggccgggattggcgctgacgaatatggctcctttccagagagggggatgggccaaaacggcctgcatggccaacctgccccccagggaatagccgcagatgaggggatgacgatcctgggaggctatttcggaacaaagcacgcgccccatatccttcaggcttttggggcagcattccagatacctccagaggttcagggcgcgagcctccactcctccggcacgaagaaaatccatgacgggtttccaatccgccggagaacccagattgccgtgcagaagccaaagcatggtcggaaccgtctttctatttgacgccgtagccggcgaggccgttcataaacatctggacggaaatcatgatgagcaccatgcccatcatccgttccaaggcgattgtccctttttctcccagcagacgcaggaacttctgggcgatgaaaagcaccattccggagaggaaccaggcggtcacgatggccccggcataggtcatctgggaaatgctgtccggagtctgggaggcgtgcagcataatgatggacagggaagaggggccggccatcaggggcatggcgatgggaacaatgaagggttcgtcttttccgtccgctcgtccggaagaagaaagcatatccttggcggggaagaccatgcccagcgctacgagaaacagcaggatgcctccggaaatgctcagggtggaaggttccagccccagcaggttcagcaggaattttccggaaaagaagaaaaggagcagcaggctcaacgcaaatacaagctcccgtgtcagaatagccttctgctgggcgggcgagtattttttcagcattccctggatcatgggcgccagacccaccgggtcgatgacgatgaacagaagaataacagtggaaaggaagtcctgcatgggatatgccccgttgtaaacgatacgggcgtgtacgtcaaagggaaccgccagcagtggaaattttctctgcccggattgctattttcttcaccagcgcaggagccgggcctttatgcctggaaagcgatttgaggaattctggggaaactttgcgtaggagaccatagctttttaataaaacagaaaagctattggcgcaagaatcctttgggcgatcggcgcgacaaactaaattctgccttccctacatacaccctccgaacaccgggatacgaacattcatccctgaaacgtacttccagctcatagttctgatcattgcgaagacggtcaaaatacgtcagcaacaggtaagcttccttgatggggacttcatgcttttctcccggcttcaacgtaatgaagcgtatggagtctgctgcccgttcaagcaaatacgtggctccataacaggctattggattctctatttcgcccactctgtacccatatcttttccctcccgctttttcccatatttcgatacggatattagggccgtcatccttgaggggatagaagtcgtcgaacaggcgcacggtcttttcgcccttgttcgtgaacaccagcttgaagtcagggaacgtctccctcgcgtcaaaccgggtcttttccatcaccacggagcattccactccgttgtcggccatgtccccccacgccgcggcatggagggacaggcttgccagaagtattaaataccggaagatttttttcattgcagcgcgagtttggccgtcgcccggagcatcccccggaaacaaccttcaccctgctgattatagtagctcgtttccagttcacaagaacattgtttccagccttccagatcgacttcatccaggcataccggaatcgtgacgctgtattcccggccgggggccagttcccggtagttcaaggaacgattgaaggttattttcccgcctgtcctgttcaggacgcggaagttcccccgttccgtcctcaacaccgtcaggaagaaataatcggctgtttcgtcgttgatttcgtccggaatccggacgggctcgtttccttcattgcgaaaacggactgtgattctgccctccgtgaattgggaagtatccgcaatggagagggtcaagggcgccggttcctccgcaacggccacgctgcgggcatacatttcgttgacaggcggaaggaaacagggcggttcaatcgttcccggttccgtgacttcatcgggtactctgctccatccattggcctttgcctgggcaataatcttccgggtcgcctcgttcagaactttttgtccggcacagtagggacgatcattgacatcatccggcaatgctctgacatagttatagacagctccaaaatacgtattactcaactcggtaacgaatggcttcatatttttcagaaactcttccatttctggaactttttcacaagattcatgcttcatttcaagcgtatcctgtattctcaaattgtcccagtagaattgtaaggcgtcattgcattgacggcggtggtgttcctcgtgggcgagggatgcctcctgagtatgccatgcgccgcgtttatgagactggtaacggttcattgcagtgaccgcttcgacggcttcatcttcggtgacagggggatttttaagggcgtccctgtatcctcccgtgcgcaagagaatcctggaaccggcggaaacttgctgcacgcgcagtctccactcgtcgagcacttcatccttgcaagccgtcacgatgatctggggactgataagggacgttttagtatctccgatactttcctcaacgacaggcgcaggttcttcaagcgtcacctccactttcctggactcttcacaggtgatggtggattccttttcaatcgtccacagcttgattttgggagaaggcgagaattcgcgcttcatcgtcgagttgccttcatacttcccttcctgaatgggttccctgtccatcgtcacattgaacgcggcagcgttgttgctgacggggttgtaggcattattcgtgtaagacaaggccaccttgtaatagccagctttcaatcctatcatttccgtttgaatattcagcttgccgttgggaggtgtcccattcttttcacaaagtttctcgttggcaatggaaatgctgcctgtgtcgtcggcttccacgccgaaatagtacagaccgtcttcctcaaccttgatgaacatttccggcgctccggcgcaagtggcgtgttcgcacgccgaaccgtcaaagttgaacatcatcgcgtcaactccgagtttctgcgggatgagagcctgctccccgtcgcagataagcttcgggccgaccgccttgttcagtggtatataattattcatgtttctgatcgtttcctgtttgagaactaaccatttagttctcaaatgaacataaggaattccaggaagaacaacaacacgtcccggacgtgatgaaggaaaaatccccgattatctccaataaaaatggcggatgccattcagcacccgccatatacatgttaatagtttggaacgtatcgctacgcttgtgtatgaattaagctagaccctacaggggctggtagccccgttcctcctgccggatgagttgcccctccgggatacagactctttacatttccgttttcggaaaaagcggggtttctgaaatacggattcaaggcagtcgggaaaaataatacggaaacgcccggcacggaggcttgtgacgccggacgggcattggatggtatttccgttcccggagttacagaagaaggtcctggatgttgtccgaggagatgacgcctgtttccgtggaggacagtacgcagagggcgtctaccaggttttcctgccccagagccagcccggcttcttccaccagcacatcgtcaatattcagggtagcgatggaaaggggcaccgtttccggggcagagggttccatcagggctgcaatgccgatgacggcagccaccagggccgccgcagcagctccccaaatgcggaaggaatgccgcttgaagtgatgaatggattccaccggaacggcgggagcgcattcttccctttcaatacgcatcatgaccttgcgggcaaaatcgtcccccggcgcaggttgggaggcatggcccagaatctgccagagttttgtatcgtcctgttcgttcatggttatggttccgctgagggttctatgaagaaaaacaccggaagatgggtccggtttcttgccggcgtcattttttccgttctgccgcctgtctgatgacgggggccagcacggcggcgatgcgtgcgtaaccggccgcagaagggtgcagtccgtcgctggaaagctcttccgggacgtatccgtcgctattagccatgacgcgtcccggttccgtataaatgaaattttcttccgcggccaggcggttcaggaggagattgatgccggcaatgcgttccgccgtaccttcccgggcgctgttgcgcgggtaaaatccctggaggatgatgacggcttttgccagtttgccggtgatttcccggcagacggcacgaatgccttccaggatttccccgtccgtgttttccgcaaggttgttcgtgcccaggagcaccacgcaaacggcattgtcttccgcaccgtccagttctccgtggcggagccgccacaaggcgttttccacccggtcgtagccgaaccccagattgaccgcccgcattcccgccgtgcacaggttccatgtttccggggatttttgcaaaatgtcccggtgcggttcatccacgggcgcacctccccagaaatgcgtgatggagtctccgatgaagaggaggtccgggtgtgtttcgcgcacgatgcggcacgcggcttcatgccgggatgcccagtcgtaaatcatgaagtcccggtcctgggtgcagggaatcagcgtggagggtacggcccgggcgggaggaggtccgggcatgatgaaggtttccggggctgtaatgccgcgctttccccggaacaggcggaagcggatgcgcgcgccgggcggggcctgcaccggagccagatagcggccctgcgtgcagagcatgcggggagagcccgcattcacgtccattcggatgacggcttccggcggagcgttcaccgcggtaagtaccagttctcccgcctcattcagggaggcgcggattccggggggtgaggatgattctgtcatgagacgtcgcgcatgtgctggcgcatttgcctgcgtccgatggagttcggcccgcggctgtcctgcatgcagtagttcacggggcggctctgggaggcgccgtggggagcgcccaggcgcttgtccggctctgacggcagcagatgcaccactctcttgtttttccagaccagccagagcaccgctatggtcgccagtgcggagatgtgcaggatgatgccggctacattggccagggcgaaggtcatccaggctttcatcatggcatggagggaggattcttgcgtttcctccggttcctggatggtgatgttggcttccgggatgctggcagggttgtcaggctccagtgcgggaagggtgggcctgggggcggatgccatgtccgcctccgttcttctggccagggaaatcatggcctcaatgagttcgtcctgcggattggtgaatcgggaggcgtcctgcttcacctggtacaggagatccctccgtcccgcatccccaagctgggagctcagctccggatccagtgcgatctgggcgcttttaatatcccccatgtggaaatggagcagcaggttgcgctccttgttcctgaatatctggcgggcgatggtgggagcattgacggaaggggggactttctgcccggccgcgaagatgctgacgaacaggttgacgttgtagcgggatttgatgagcttgataagttcgatgacgtcattgctttccacttccgcaagaagcttctgggggtcaatcaggcctgtggaggtgcggatgtagtccggcaggaaatattcattgacgtccgtaaagtcctccggaatgggatccacggcgggggagtctgcattggcggcgggttccggcatggggtcggagggagccgctgccgcatccacagggggcagcaagggagggttggcattccaccacgcgcctctcatcagggattgctggtcgcggttggcccatttcagggcgggtaattcctgggcgggagccggaaagatggccgccgccagcaggcatgggaacaaaaggggggtcatgcgcctcctcctttccggtcctcgggggtgggaggcattaatccgtagcgcatgggatgcctgactttggagcgcgctttcctggctacgagctggacggcgtttttcatgatggcccccgcagcctggagcagcatgctttcccgcaggggaatgcgggctttcatgatggatttgttgatcaggtccggctctacataagggtccagttcatagccccacatgaagcaggccgtgtccgtgcgcacgtccagcaccagaaccaggagccactggggatccagcggtccctgatggttagggaagccggcctcatccaccgtcaggtggttcatcgtccagaaactgtgcggaataagggaaaagggctccaggatgttggggaaatagacggacaggagaacgggggggatgcggcgttccagtttctccagcagggcattcagcctcatgcggtcctgttgccggagagcgccggcgttgtcgcatacgcggcggtagggtatggcgtctttgccgtattttttgtccaggttttccagagaaaaaccgcagtgagggcacaatgattccgccccgcggtggaaattatgtaaacacttcggacaagtcggcacaaggaaagtttaagcacgaagttcgttgccgaaaagactaattgtcagaaagaaatcatgtatgtctcaatcttccagattttctttcgtgacacggtaaatggcggcgcatctggggcacgtgatttccagctcctcttctccctggaacaggtcttccttgttttcctgaagggtcttgagcgtgggcaggatgcggtccagcgtgcagccgcagtaaaagcggaaccggcgcgtttccagcactcgggtattttcatcttcttccagatgggccattttctcccgggtgagggaagcaagccattcttcatccgcgtcaggctgggccgtcaccatggtgtagcattcatccgggagctcaatgcagcgggcgtttctctgttcgctttgcctgtagaattcctccacccaccgggccggagacgttcccggaatgggtacgacggagtattgcggttcaaaccccttgtggagcagggtggaatacagcgtgttttcttcaggttccttaatgtcctgtgtgaagacgcgccccacgacggattccgtcagggaagaaccggtgacaaacaggttggcgacggcaggcgtccggagattgactgtccaggcatgttgttccgcccagggccgtgcgaccatgtaaagggtgaaataggccatgagttctttcagcaggctgtcgtagagttcttcgttgcgcaggccgtactgcatgaggtgaaggtagtaatccgtaaacagtggagaaaattttgacctgagcgccagacaattgcgtccgcggacaaagatggattcaactgtaatgaattcttctaccagttcttcgctcatgccattcaagttcggtcttcctttgtggaaaatcaaccgttcctcctgtcattagggtctatcatgacaggtaggcgcggcggcggtctttttcccggcatggaaagaggcggaagagtggctggagggaaatgacggaggggcccggggactgcacgcaataagcctttaccatgcctttccgcgcgtttaacatatacccatggcaactgacaaaaatatcaccattcatacttccaagggcgacatcaagctgacggtgtttgcttccaagacgcccgtgacggcggcttcctttctgaatctggcgtccaggggattttatgacgggctcaaatttcaccgtgtgatcccggatttcatgattcagggcggcgatcccaccggcacgggcatgggggggcccggctacaggtttgaagacgagtgccgcccggacctcaggcatgacggccccggcgtgctttccatggcaaacgcgggccccggcaccaacggttcccaatttttcatcacccatgtgcccaccgactggctgaatggcaaacacaccgtcttcggcaaggtgacggaaggtcagagcgtggtggattccattgagcagggagataccatctccagcattacgattgaagataatgcggacgatctgtttacggaacaggccgaccgcattgccgcgtggaacaaggcgcttggtaagtaacctcattccggcattcactcggcggagcgcggcgcggggacgcccgttccgctgttttcctctctctgctttttcagtacatggttctgtctgttcaaaacctgcgtgtgcagtatggcgcgcgcgtcctgttcaatgacctttcctttacagtggaggatggggaaagaattgccctcgcgggccataacggcgcggggaaatccacgctgatgaagtgcatcgccggtttgaatgaaccggattccggctccattatcaaatccaggcattcccaggtgggttatctgccccaggaaggaattcatatccgagggcgcaggctgattgatgaagccatgtccgcctttgcggatctgatggatcttcaggagcgcattgatgtcctgacgcgggaaatggcggggctggatccccgttccgccgcctactctgaagttctaaatgaaatcggggaattggaactggtgctgcatgcccataattccgcccggctgcgtccccggacggaatccatcctgcgcggcctgggattcaaagacagggattttgaccgggattgcggagaattttccggcggctggcaaatgcgcatcgcattagccaaactgctgctccgggagcctgaagtgctgcttctggacgaacctaccaaccatttggacatccagtcccaacggtggatggaacaatacctgcgctcctaccggggcgctatcatccttatttcccatgatgtggcgcttctggatgccctggtttcccgtacgattgctttttaccacggccgggcggaggagtacgcgggcaatttttcctattttctgaaagaaagcgtgctgcggaaggaaattctgctgcgccagaaaaaggctcaggaccgggagattgccaaaacgaaggaatttatcgaccgtttccgttataaagccaccaaggcttctctggttcagtcccgcatcaagcagttggaaaaagtggaactgattgaggtggaagaggatgatgccgtcatgaactttcactttcctgctcctcccgctggcgcccattctgtggtcaggctggaaaaggtttccaaacattatggttccgtttccgtttttgagaatgtggattttgaaatcgtcaaggggaaccgcattgccattgtaggagtaaacggggcggggaaatccacattttcccgccttatttccggcggagaggcccccagttccggcagcgtgaccatgggacgccatacgcaggtagcttttttctcccagacgcatgctgatgatctggatccggataaaacgattctggaatgcgtggaagctgccgccacgcgggaatctgcgcccatgatccggaatctgcttggctgtttcctgttccggggggatgacgtacacaagcgcgttggcgtgctttccggaggcgagcgctcccgcgtggcgctggtgtgcatgcttttgcatccggccaatttcctgattctggatgaaccgaccaatcatctggacatccagtcccagcaggtgcttcaaaaggctctgtccgaatatccgggttcctactgcatcgtttcccacaaccgcagttttttggatcccatcgtgacgaaagtgctggaatttgtaccgggagagaaaccgcgcgtttacctgggcaatgtttctgattatttggaaaaggtggagagggagcaggccctggctgccgcagccgcctcacccccctccggagcggcggaaccgggcgccggattggatcgcaaggcacgcaggcgcatggaggcggaaatccgtcagaagaagacgcgcctgctgcgtccgcttcaggagaaactggagctgctggaagaagaaatagcgcggctggaaacggaaaagacggaaattacttctcaattggagcgtccggaagtggcggctgatacggaagtcgtcatggagcttacctcccgttttcagcagacggaccggcagctggaaacctgttttacacaatgggctgatctttcggaaaagattgaagagacggaagcccgcattcaagaagaggcggaaagaaacgtttccggaagctgagaggatttctcaacaaaaaacagggctgtttccgggaacagccctgttcggacagaggaaaaaatcagaacttcaacgcttttccggttatacccggcggcgcagaagcagggcggccatgccaagcaggctgagggaggccgtcgccggctccggtaccgtgtccccctgaagattcaactgggaaagccccaggaaggttcctccggtgttgggagccttggcattcacggtgagggtaaaggtttcccccgcactaactgtgaccggggtattgaagctggcttcctggatatcggccgtcggcgtgccgtctttatcagcctggactcgctcaaagctcaggtcagccgtggcggaggaatctccggcagtcagcgtaacggtagcggttcccgctttagtatccgtattgctatgacgctccccgcttgcattgacgaattgaaaacccaggctgagggaagaaaggacgatgtcctgcgtagctgtgaaggaaaaagtgacagtccaaccggtttcatttccattcatttggaggttgggaacaagaagatccgctgccagattgttggagagggcggtggaaggagtggtgagagtgacggaagcatcttccagaaaatcgctccccgtagtaatgctggtttgatgaaactgggtttcatacagagtggacgccgcctgtactccggaaatgcacaataaaaatgttgaaatgaaaagaagactcttcataaatccatgttagcggattagatatccggtgacagaggataggaaaatgggaatggataaatacacacattactaatgatttatgaaaataaaattttattatgtattaagaactttccaaatttttcctcttttcccgtggcgaaactcgtttttcttcaaaaaattttgttgtcaccggatatctaatccggaggcaatctttcctgcggagtaataaatgaatatttgtccgctgcggaaaatcatcagcctgacatggcctggaagggtttcctcccatttccatgcaaggggaaaaatagagggaccggcccgggagaacccagttttctttcaggatggccttttcttcccgcttttccgtgttttttttctgtactctgaaatcgtgacgccgcacagggtaagcaggatccccgccagggatatccaggtcaggcgttcccccagaatgatggctgaggccaccacggttacgaccggtatcatgtaaatgtaaacgctggatttgacggctcccagaatttccaccacgcggttccaggtcagaaagcacagtgcggaggcgaacagacccagatacagcagattgatggcattgacgggttttgccatcaggcgccagtccatgtttgcaggaaggacccacagggcgggaatcatcagtgcgatgccatagaagaaaatgcggcgcgtgcagatgatcatgttggacgtgttgacgccgatttttttcatcaggatggaatacgccgcccagacgaaggccgcgcccagtgccaggatatcccccgccggattcagttccagaacgaaggctccgtttgccatgataaggaagatgcctgtaaaggcagcggaaaaacccaggaagaaacggcgtgaaaagccttcccccttcagcaggaaatgggccagaagggctgtgaagaaaggaaccacggctacgataatgcccacattggaggcgaaggtataggtcagggcgatgttttccagcaggaagtacagggtaaccccggtcaatcccgctccggcgaacagaagctcctttttccagccggagaatggaagaacccgcggtttcaggaaccagaggaaggcatatcctatcacaaagcgggtaaagagcaccgtgacgggggtgaaatcccgcaagagcaccttggtggagacgaaagtggttccccagatgataatggtcatgagggcggcggcatggcccagggtgcgctgtcgggaactcattaaattgacgatgtgggggaggaaggcgtttccagagtcagtcccaggatttccgccggttccgtattcctgttccagacggcatggagaacgccgccgggaacgagctgggattcgtactcgtgaaccgttctttcttctccgtcaagcatgacagaaaccgttccacgggtgacaatgaatagatgagcgtgggcatggcggtgcggggaaagggggccgccgccgccgggggctattttggcgaaggctccgcatctcaggatttcctgcccgtccatgaacaggttcctggccgtgaagcccgtatgattgggaatagaggaaaaggcgtccatttgtttatttgcgtgccaggtcgtatccgtccttgcggtctttaatgacccagcccagcgctgccacttccgccctcaggcggtcggcttccgtccagtcccggttctgcttggcctgccagcgctgatccgccagggtgcggatttcttccggggcttcctcctgtccctcctccggcagaataatgccgaaggcggccagaataaagtggaaggcattccgaaggcgggccgcttcctccggtgaaagggaggggatatccgccttcctgatggcgctgaaaacatggcccagggcttccggagtgttcaggtcatcgttcaggctgtcccatgccggctggaaaattcccaattccgggaatgccgcgcagaattcctcataggagggaacggaatccgttccggaggcgttcctgagctgcatatcgaatttggacaggcggttcagcgcggctttagcgtcttccagagaggaaagggtgaaattcaacggacggcggtaatagccccccgccagcacgtaccggaccgcggacggcctgtggcccagtttgtccaaatccgccagcgtgtacatgttgcccagggatttggacatcttgcctccgtccaccagcagatgcgtgatgtggaaccacaggcgcgcgaagccgccgccgcaggcgcagcgggactgggccacttcgttttcatggtgggggaataccagatccacgccgccggagtggagatcgaagtcattgccgaagtatttatggatcatggcggagcattccaggtgccagccggggcggccttctccccagggagagggccagaagttgtttccgtcttccggcctgcggctcttccacagcacgaagtctgccacggagtctttttcatattcgtctgcgttggaccgggtattggcggtttttcctaaatccagttcacgttcgtccaggtgggaaagccttccgtattccgggaaggaagaaattctgaaatacacggaaccgtcttccgatacataggcatggcccttttccatcagtgtttgaaccatccgtatttgttcgggaatatggcccacggcagagggttccgcatggggaggcaggcaattaagggcggcacagtcccggtggaacagatccgcccagcctgcggtgaattccgccagagaaacgccagccttttgagaatcccggatagttttgtcgtccacatccgtcagattgcggatatgcgtggtgggcaccccccccagttccaggacgcggcggaagacgtcctgcatcacgaaagttcggaaattgccgatgtgggcagggccgtacaccgtggggccgcaacagtaaaagcgcagtgtttttccatccatgggagaaatgtcctgggccgttctggtgcgggtatcgtaaaggtgtaacatggcggaacgattagaagggaagagggcttcccggtcaagcgggaaaagaaagccggggatccgcggttgtccgcgtccccggctttgaagaaatcataggatggcgagagaaagggaaacgctatttgtccgcgttttgctggccctttttataattctcgttaatacgttcgatttcctcctgggtgatgaatttttcccggtagggtttgttttccacagtgcgttccagagtatagccgaaacgcttctggaaatgtttcttgtgggtttccattttcttttcaaactcttccaggcttggacggttcttgtggctgccccacgcggtttcggaaacagccatggcgcgggggtaggtcatgtacatcagcaattcgccggagggaatccattccgcccacatgcagagattgattcccttgatgtgcttgacgtcattcttgtcccgtccgttgcggggatcgaagttgtagcagtctttcagcaggatgggagctccgccgggccgggcgcgcacgtcgtccgccgggaatttcatctgggtacgcgccagataatacttgaactggggggtgacgatgaggtcgatgccctgttccttcgtcttatcaatgcaacgcgggaattctcccggcagccaggacatgacggtttcccccttgtggtaatagctcttgttgatgtcataccacaggatgggctttttccggtgcttggcgagcatggccgtcaggcttttcgtgaaatcgctcatctgggcttccacattatccccctggccctttttggctcgggcggcctggcagtccgggcacttcttccagtcccccatggggcattcgtcaccgccgatgtggatgtacgggaaagggaatatctgctggacggtattgaaggtatccttaagaaactttttagtggccggtttctgcgggcaaattagcttggaggaaacaccgccgtgcgtccatacctgggcccgtttggtgttgcagcagaattcgggataggacgcggccagggccatgttatgacccggcatttccacttccggcagtacctggatgccgcgcgctttgcagtaggctaccaggtcctggagctccttcttggtatacatgccttcattggccagcagggagttgttctggctttccggagcggaggggcggacggcgccgatggtgcggagcttgtcgtagcccggaacggggagacgccagccctggtcttccgtcagatggagatgcaggacgttgtatttgtaataatgcatggcgtccacaaaattgtagatctccttcatgggatagtggtagcggcctacgtcaaccatcatgccgcgccagccgaagtcgggggaatcctggatgctgccgcagggaagtccctcaggagtatccgaaagctggtcctggagctggaacagggtcgccatggccatggccttcccgttgggcgtggtataacggagttccacgccgccaggcgtcagtttcatggcatacccttcattgcccagtccggcgactttttgctcatggacgattttgaggtttttggtagttccggaagttgtcgtcacgttgacgggctccggaataatgttatagggattggtttcggcccagcagagggagcccaggaacgctgcggctagcaaaattgatttcatgcggtgcgtatggtaatgggttgtttgtgtgaggatttaaaccctgtccctccgtcgtcaatggcgtgttccggacaaccgtgttttgggaggaacggtgaatggcggcgtcaatctctggagggagcgcagtcccactgcggcttgacggccagtttgccggtggccccggggaagccttccggtacctggtagtctttgcggagcttgccgtacagggctttgagttctttcacggtttccgcatattccggtttgttgatgacgttgtgcatttgggccgggtccttctggttgtcaaagagcatccattcgtcgctggtccagatataggacagcgtgtagcggtccgtgcgcaggccatcatggcgcggagcgttgtgttcacccggattttcgtaaaaggcgtagtaaagagaacggtttttgaaatcctgatgttctccggtcttgaacaggggagtgaggctgcggccctggaaggtattcatattttccttggtatttaccccggccacgtcgcagaaagtgggagcataatccagttcctgcaccatggcggaggagcgcacgcccggcctgatgtggcccggccatctcatgatgaggggcatgcggaaggattcttcgaaaatccagcgcttgtcgtacaggccgtgttcgcccatgtagaatccctggtctccgcagtagagcaccagcgtattcttgtccaggccgttctgtttcagatagtccatgatctggccgatgctttcgtccacggaaagaacggtgcccagatagtcttccatataatggcgccagcggcgcagcaaaatgtcgcgctgcgttttgattttcccgttcttaatatctttgacaagctgtacggtacgggccttgtggtagttgtaccaggcttccttctgctgcgggtccatacgcacccattccggcatttcccagtcatactgagtatgcagggtcttggattccgggcaggaaagcattttctggatgtcttcggggaccacctccttgatcaggtgttcgtcagaccatacgttgaaatggttgagcagggtttgttccgtcattttcaggaattccgggcggtctgcaaaatcgtcttccagattggcgggcgggtcaatggcgtccgcatactgtttggcgcggcccagattctgaatggaggggcaccagcaacggtggggtgccttgtggcccacgacgagcatgaagggtttgttcttgtccctctggtccagccatttgaggcttttttgcgtaaccagttccgtggcatagccgggctccgttttcaccacgcgtttgccgtccttgccgggagtgatgaaatccggattgaaatagttgccctggccggggaaaatttcccagtaatcgaatccggtggggtcggattcatatttggacgtatctcccttggcgcccggcggaatggcttccaggtgccacttgccgacaatggccgtctggtaaccggccttttggagcattttcgggaaagtgggctgggaaccgtcaaagggagccgcatgttcgttgaagaggtacccgttcatgtgggaatggcggccagtgtaaatacaggcccgcgaaggtccgcacagggagttggcgcagtagctccggtcaaagaccatgccttcgtccgccagtttgcggaagttcggataaggcatgggagaatccttttcacaggtgcccagggtctggtaggaatggtcgtcggtgacaatgaccacgatattggggcgctgatccggcgtctgcttttgaggctggtccgcggaagcggacagggaacaggccgcaagcatcagggcggtggcggcatgacggttcattgttgaaatcatgaattaaacaggcgaatggttggagggggatgcggcagaatttgtccgcaagggcattcctgccggtccggaaaagaccacatccccgaaagaaaaaacgctggaagagagttttaggaaaaataaaacatcagtttcatatttcaatacaaaaatggggatggagcggaagcccatgaataagccgttccgcagccggacggcaggagaaaagccgttcaggcgccacgtgggccggagcgcttgttccggccgttgttttcatgggattctttctgctccaggagccatgttctgtcttcaaggctgagccttttcagggatgttctgctctggtgcccgtccagctcctgaagccagagagtctgggtcttttccgaataacgggaaagcttggcgaagacggtatttccgttggctcctgtccagacccggtagcctttgggaatcagcgtttttttaaactcttcatattgctgcttcgccagtttgacgctgttcttgatctggtcaaaataaagggcgttttgtccggtataataaccgcgcaacgtatccactttggagccgtccggagacatgaccagaagcacgggcgttcctctcacgccaaacagggagggagcctttttcacatactccagcatcttctggcgcttcctgtaaacaggttcgctttcaaatttttccgcctggtcgtaacagacgcggacgacattccttttcgcccagtcttcaaattccttcgtatggagaagttctgcccccagctttttgctgggagggctgcccacggaatggtggaaccagatgagaatgggttttccggtactctgggcttcccggagggcggtgggatagctttggatccagcgttcgttttccttacgctgggcgaaagcttcttccagcccggggatgggggcgtccgggtcatgagcgtccgtgtaatagacggccccgctgtctgccctggtcatttcctcctgtgtggtggcggtaagatgggtggcctgttgctgattcggagtagtgctcaacagccccgtcggcacattggcgatggaattggtcttgttatcctgcatgtattccgaaaggcttttttttacctttggttcttcctgttccggagaggttcccacgcaggaacagagagccgcggacgcaaacaggagcatggacagcctgggcagactcatgactgacctgatagcataacagggaaaaatgcgcaaccgggaattgttcaacggccgcggcggtttcagtatttcctggcttcctgttccttctgcttccggtcccgtatggcgatatccaggggatgcatgtagcggtcgttgatgtggctcaccctgccggtgcgcagcttcttttcgtaccgtttgccccggtttcccctgaacaggaattcggactacggaacgcggcccacggtccggtagatcagctcgtcgatttcctccttttcccggtagccggccagcctgatgtagcattcctcctcccggggatggttggggaagtagtgcagaaggtgtttcatggcccatattcaaacggaaaaatgtataaatccgggaaggaaacagaagaccccgtttggatgccttgagggaagaaaatgggttaatcccccgttttcagcaccttgatgaacgcttcctgcggaatgttgatttttccgatggccttcatgcgctttttgccctccttctgcttttccagaagtttgcgcttgcgggtgacgtccccgccgtagcatttggccgtcacgtccttgcgcatgggggagatgctttcccgggcaatgatctttccgccaatgcaggcctgaatggcgacggtgaagagctggcggggaatgacgtttttcaggcgttccgccagttccctgccgcgggaggctgccttgtcctggtgaacgatcatggagaaagcatccaccggttccccggcgatgagcatgtccattttaatgagcttggcggcctggtagccggcatattcataatccatggagccgtagccgcgcgtcatggatttgagcttgtcgttgaaatccaccagaatttccgccagagggacggtgcaggtgagcattacgcgcatgtcgtcaatggtctccgtattgtccacgctgccgcgtttttccaggacaagttgcatgatatccccgatgtattccccaggaagcataatgaacaccttgacgataggttcccggatttcctgaatttcctgcggttccgggagcaggctgggattatccacattgatttcctctccattggtcttggtgacctcataaatcacggaggggtaggtggagatgatatccatgttgaattcccggcgcagacgctcctggataatttccatatggagcaggccaaggaagccgcaacggaacccgaagcccagagctacggaagattccgcctggaaggagaaagcggcgtcattaatctgaagcttcgccatggccgctttcagggcttcaaaatcggaggaatccaccggataaatgccggaaaagaccatggggcggatttccttgaaaccgggcaggggggatgggcaggggcgcatgtaatccgtatacgtgtccccgatcttgacatcagccgcggatttcatgttggcgatgatgtagcctacgtcaccggcttccagggaatccgttcgggtcattttgggagtgaagatacccacttccttcacttcatacacttcgtccgttgcgaaaagtttgactttcatgccgcggtgcacgctgccggaaatgacgcgcacataggagactacgccgcggtaggcgtcgtaaacggaatcgaacaccagggcgcgcagaaggccgtcctgctccgtttcaggcggagggatgcgctgaacaacggcttccagaatatcgtcaatgccgatgcccatcttggcggaggcatggatggcttcctcatgggggatgcagacgatgtcctccagctggcggtacactttgggcaggttggcgctgggaaggtcaatcttattgatgacggggataatggccaggttcagatccatggccaggtgcatgttggcaagtgtctgggcttccactccctgggctgcgtccacaataaggagggctccctcgcatgccgccagggaacgggacacttcataggagaaatccacatggcccggcgtatccagcagattgagcttgtaagtctttccatccccggccttgtagaaaatggtaacgggatgggacttgatggtgatgcccttttcccgctccagatccatggcgtccagaagctgatcctgcttctcccgttcggaaatggtattcgtcttttccagcagccggtcggaaagggtggtctttccgtggtcgatgtgagcgataatggagaaattgcgagtcaattcaatggacatggtggtctctacccttctaacatgagtgccctgtgcgcggggagggtaacatagcccatgcggcggtcaagacttgaacatgactgcctcccgttccctgccgcgtcggcttcattcgctccgggaaaaccgtcattcatgacaggggccgcgccgggagattgaacgtgagggaagaaggaaggctcttaaccggtacaggcacgtgaaccttttcccgtgcggtcatttcttacccagccagcatatgaaatcttttttagcagccattttaagcctatttattcccggtctcggccagttgtacaagggccactttgtccaggccatcatctggttcctggtggtgggtgcggcttacggccttctgtattggttcatctttgcactcgttcctattgtcctgcatatcatttgtattttgcaggcctacttcatggacaatgaatgatgactgccgtttcggcttcacagccaggatggctgaaagggcagcgcatcctgcggatcggcagcggcattcattccctggggttacagaaggaatacgtcgttcatagcggcatcattcttcctcataccggtattttcaatgtttacggggttccatttgttgaccgcggaaacgtaaacacaactttttgactttgaattaatcaatattttcgggaagcgggccaggggaatcatcctccgataaacaaaaacccagagccgttccggagttgttccggagcggctctggagggtcaggaggaaggcctttcgggggtgggggccccctccttgtgttttctttcttgttagaagtcgtagcggtagccgacgcttccgttcagcgcgctggacccgtcacggatgtccgcgttcccgttcacgtagatggttcccttcgttcctacaggcacgctcagtccggctcccagctgcagcgccgtcgttcccactttcgctcccctcacgctttgcgcaaagccggggttgcccagcagagagacgttcgtttcccctctccggtctcccaggtcctgcgccgcgttcacgcggatttccgccagcgcttctcgtccgaagatgttgctgcccaccagccccatccaccggccgcccagcgccagcgtccccgtcgtccagtcctgcctgccgacgttcaggcccgcgttgcccgcacccgtttcctcatagccgtccatccgcgtcgtcaccaccgaggcgttgaacagcggctgcagcacgctgctgcggttttcgttgaggtatacgtcgtaggtgagttcatacatcgctccaaagccccacccgctggtgcttccctgcgtcccgtagcttccttccccgtagttgaccgtacggttgagtttcgcgtcgttccaccctcccgtcaggatgagcgtgtgcgcccagcgcctgtcctggtaacggccgaagaggctggcgtagtagctgtccaggtgcccgtcggcgctgtccgccgcgccggccgtcaggtcgccgtagttggccgtgaaggccgctcccaccgtgaggcggtcgctgaggtccgcgtccatgcctaccgtgcctccccaggtggtgagctggtagccgctttcatccccgcgggtgtccagtttggcgtaggagcccgtgccttccatccacatgtggaagcgggggaggtcgtcgttgacgtaggccgggttgacgcccatgagggtggtccggttcctgatccagcccatctggtcgcgcagggcgtccctctgtgccgtccccagcgcgttgaccgtgctcccagctgccgccgccatggcgcgggaggctccggagaggttgccgtcattgatcatggtgctgacgccgttcatgaattgggccagctgggagtcggggtccaggtttttgcgggcttcccagagcaggctggctccggtggcggagttccacgtgtcggccgcggaggcgaagaggttttcctgccggagtgtggcattgagcaggatgtcgtttccgtcgcggctcagtgtggcgtcctggtagtagacggcgaagaggccggatatccgggcggcgaggctttgcccgtcttccaggccgctgatgctgccggtagcgctcatcaggacgacgtcatggaggtcgctccccgcattcatggcggcgtttccttccatgttggagaggaggaagccggctccgtcctgcacggtgatggtgcccgccgtcagcatgggggcgccaaagggggcgtcctggttgaagttgtagatcagttccgtcgtggagccgttctggaaggtgatgctttccacgttgagcgtggtgttggcgctgccctgggcgtccccggtggcttcaatacgcagggtgccgttgtttccggcggtgatgctgttgtagttcagcgcgggggcgtccgcggtgcctttcaggaccaggacgcctccgtcacggacggcgaggtcgtagtccttattgccggtttgcaggtattgggtggcttgcccggagatgtccagggtgccgctgcctgccagcgtgccggagaaggttccggaggaggttgttgccgaggagatggagaggctgcctccgttcatggacagggtgccgctgccggagaggttgctgatggtgccggattccgttccggagagggccagcgtgccgtcggcggtgactgaggttccgtccagccgggcttctccgcccagggccagttccgctccttcctggatgcggagggtgccggttccggtgatggagccgtcgtttatttcgcctgttccggtcaggttgagagttccctggatggtcagggagcctccggcttccgtgccggtgatggttccgacttcggcgttgccgttaatggtcaggccgcctccttccagagtgagggtgtccagggtgtttgacgcgccgttgaggacgatgtttccttcacgcagggcgagggtttccacgtccatcgttcctccgaccgtcagcgtcccggttccttccttgatgaaggcgacgttgttgcctcccgtgatgctgccgcccatgacggtgtcctggccggccgggtcgatgtcgtcttctcccgtcgtcatttgtttgttgttgaggatgacgacggccgtgccgtctccggtgttgttgacgaccaggctgctgcccgtggctcccatcaggttgttgattttagctccctgtccgtcggattcgcccggggctccggccaggttgaccgtcagggtctggccgccgccgatgacgacgccggcgtagccggagagcgtttgataggagttgacttcatgggcgtttcctccttcctcctgcacgcggtagaggccggtggccgctccgctgagcaccaggctgcctccgtccgttccggtgacccggatgccgtagttggacagaaggtcggtagtgaaggcgatgtcgcccaggtcgccgacggtcagcgttccgctggtcagggtcaggtagctggaggagtcgtcggttttgtggtccagcagaaggttgacgacggcgtcgttgctcaggtccagcgtcagcccttccccctttatggacaggttcgggtcgcttcccgttccgctgccgttgctgatgacggcgccagacgcctgcgtgtcctggccgatgttttccgttcccagggcgatggtcagtccgtccaggcctccttctcctacggttacggttccgctgactccggtgagacgggagccggaggcgatattccacgttcctttcatatggctgccgccggcgccggagaggttcaggctgccttccgagatggtgattccttccgtggttccgtcaaggatggtttccgctcctgccgcgtccgccccgagtgtcagggttcccgctcccgttttggtcagggccgggctgtcggtcagcgcgtagatggtggccgaggctccttcttgcgcgatattgatttcatcaaaccgggtgaaggtgacgttttggaagtccccggttccaaaggttcccttgagttccagcgtcctgtttccttctaccgccgctcctgcgcttccgccgatggtgatgccgttttcttctccttcctccccaaagatgcttcctcccgtcagcgagacgtggtgctcgcctcctaccgtgccacagttgcccgccccgtagatgtctcccaggtaggtgccctgtccaagggtgacggtgatgttgccgccaatgctgacgggcagggctgtgggatcttccgccgtccatgtgcttcctctccaggagccgcccacgattttgcccgtgaaggtggagcctccgtcaatggagacgctggtgtttccgttggtggtcagcgtcgtgccgttgccccagttccagaaggagccgcccatgatgtctcccgtgaaggtgattccttcttttccgctgatggagacgcttgagtttccttccactttttgtacggctccgttgccctcggatttcgtgtttgcgtaactgcctccatagatgtttttgacgaagttgttgtgcccttccgtgccggagagttccgcatcgcctacattaatcgttaccgaggtgttgccctggatggtcgttcctgaagtctggttggccgtccacgcgcttccgcccgtgatgaagttttgggctgtgacgttgccgaagtctcccaggttgacggtcgcgctgttgctgtgctggatgttggtgaccaggacgctcgtgtttcctgtgatggtggtgacggcattgtgggaggaggtgcttcctccgatgatggctcccgccacgatggcgttatctttgacggtaacgttggtgtttcccgtcagggtagtgcttgctcccttgttgttcccgccgatgacgtgttccgccgtggcgtttccagagagctgcacatgggtgtccccagtcagcgtgctggtctggaggttggtgccccattcattggtgacacctccggcgatgatgccgaatgctcctccgttgatgtccatccagatgtccccctggtagttgaggttgccggacggcagggtcgccccgctgttgtataccccggacaggttgattttggttccgccggtgttggtgatttgatagactttgtccccgctggtcgtcagggtcccgttcagatatcccaggctgacgttggccgcactcccctccccaagagccagcgtaaaggcgttcttgaccgtttcttccaattcccctccttctcccgcagatacccacgtcacgctggatatcgccccgtcttctatcgtcagcacgctgccttctattctatattgccctgtatctaagcccgtaacggtaaaattcgtaccgaggttgcttcctaaatcaaacgtgtatccctgttctccctccaccaggctgtcaagcgcgccgccgatgtcaatggtgcctgaagtgaaagttacattttccttggtaaaggaggatccggattccgtataggttagcttggctccgtcaatggctgcgtttttcaatacgccggtgccgttcatgttcagaacggcatttgcccccagagtggcggaggtgaaatccagcgttcctcccgccatggtgattattccggaataggccagggaagaattattgattttcaagatgccaccttgggccgtgatattcgcgttgatgacggttcccgtcaggttttgcgtacctgttccggccataatcagatttattcctcccgtgggagtagtgttgccgtttactccggaatgctgcgtggttgccccgatacttcccccatacgtgtaatttccgttacccgttagggtaagattcgctctggaggaattagccgactggacgcgccccttatgtgttccgctgaagccgtcggcatcatttaaaccggccagagaggcagcattggaaatttgcaacgtcagggcgctggaactttgattgattgagcctgacaaatctaccgttgcgttggcgagagccgttcccgtaatctggagaatggcgccgccgggctgcgtccccttctgggaaaggataatgtttccggaaaaactgctttcttgggaaccaagcacaaacttggaggcatagccggcattgccgttagccgctaccagcgttaaatttccttctccggcaaatgccccgttcaaattgatggtacagccgccgttcgcattctgattaatggtaaacgaggagcctgccccgatataaagtcctgtggaataattgttgtttcctgaatttacatcaaggttgacggattggctcccagtaactgaatactcattggcgggttcattgttattaaaggtggagtccgctccccatgcgggggattcagatgttgggacggccagggaaacactggtgtaacaagccagaacagccgccagcagggtaataggcagatggagacgcattgcaaaaatgttagatgttaattttttatgtatataacggattgaaaattcgatgtcaagttgaaaataccagttcccgaattctcatacttttactgtaagtgcattatgattttttaaatttctaaaatgggattttcatcttttcatttacctccccttttgaagcaaggagaggcatactataagactttcattttgaatataaaatatcaaattttatattgcatgggacaatattggaatcatcgccgaattttcaatccgcttttcctttttcgtggaataacgcggagagtccataaaaaaggccgcaccccggaaacggggtgcggcccttgaagtgtgggtggagagaacaggttagcgttcgttgtcgaagttgatggtatcgttcaacatgtcttcggcaagttccgccgcttcttcttcttcgctggccgccgcgatttcttctgcgccctctgcaggttccacttcaatcttgctgtaacgggagaatccggtgccggcgggaatgaggtggcccataatgacgttttccttgaagccttccagagtatcggtcttgccgagggtggatgcttccgtcagaacgcgtgtggtatcctggaaagatgccgcggaaatgaaggattccgtttccagggaggccttcgtgataccgagcagaacgggcttggctgcggccggttggccgccctgggctacggtttgttcattgatgcggtcgaacgtggtcttgtccacttggtctccccacaggaattcggtatttccgggttccgtgatgactaccttgcggagcatctggcgcacgatgatttccacatgcttgtcgttgatttccaccccctggaggcggtacacttcctgaacttcgttaacgaggtgttcttggagacgttccttgccgcagacatccagaatttcttccggagaaacggggccttccgtaagctggtcgcccagatgcacgtggtcgtcttcatgaacgatgacgtgcttgttcatcgggatcagatggtgcaccagttcgcccgtgggtgtttcaatggtaatgaccttcttgccgcgggaagtattcttgctgctgaggcgcacaatgccttccacgcgtgcaatggtgcaggcgtccttgggcttgcgggcttcgaacaattccgccacgcggggcagaccgccggtgatgtccttcgtcttggctaccttgcggggcgtcttggccaccattgtgccggcggagatggtttctccgtccttcacagtgaggttggcgcctgcgggaatggcatgatgagccagaacttcgcgggtcttggcatcgcggatgaccacctgcgggtgaagttcctgcttgtgttccatcacgacaagggaggaggcaccggtttcccggtccgtttccttggaaacggtgatgccgacgatcatatccttgaattcgacgatgccgcccttttctgcaatcacgggcacattgtacggatcccaggtggcgagggtttcatccttcttgatagtgccgccgttgggcacgtacaggatggtgccgatgacgggctggtaggattccagttcgcggccctgttcgttttcgatgcggacggagcagtttttattcaggacgacgaagttgccgtctgcgttttccaccgtgcggagatcttccgtgtagatgacgcggccgtcgttcttggctttcacgatgggctgcttgaacgccgtggtagccgttccgcccacgtggaacgtacgcatggtgagctgcgtgccgggttcgccgatggactgggcggcaataatgccgaccgcttccccgatcttcacttcctgtccggtggccaggttcaggccgtagcacttggcacagcagccctttttgagttcgcaggtgagtacggagcggattttcagccgttcaatgccgattttttccagttgttccgcctgcttttcgttaatgaggtcgttgatgtctacgataacctcgccgctgacggggtcaacgatgcgttcgcaggaagtccggccgtagatacgggaggaaagggacgccacttcttcgtcgccgtcatagatggcgtgaacggtgatgccgttgctggtgccgcaatcttccgcatggacgatgacatcctgggccacgtccacgagtttgcgggtcatgtagccggagtccgccgttttcagcgcggtatctgccagacccttgcgggcgccgtgggtggagatgaagtattccagcacggaaaggccttcacggaagttggccgtgatggggcgttcgataatttcgccgctgggtttcgccatcaaaccgcgcatgccggagagctgcttgatctgcgccttgttgcctcgggctccggagtccaccatcatgaagagcgggctggccatcttggagccttcgttgtgttccagcttgcggtacagagccgcctggatgacatccgtagtctgggtccagatgtccaccaccttctggtagcgttccccatccgtgataataccgttcttatactggcgggtcaccttgtccagctccgcataggctttttcaatttccgtctttttctgggagggaaccaccatgtccacgatgccgatggagcagccggaacgggttgcttccttgaagcccaggtttttcagggcgtccagagtctgcacggtacgttccttgccgacggtctggtagcagcgccagatgatgtcgcccatctgtttcttgcctacgttgcggttaatgtaaccgagttcccggggccagatttcattgaaacgcacgcgtccggcagtagtgatgataaccttcttggtgacgtccccatacactacttcggaaggctttttgccgtagtccgggttgtgcaggcggatccagtcatggtagccgattttgcgggcggcaatggcgtattccacctcgtcaatggattcgaagaggggaagatggtgatgattatcctgattgttctgtacttccgcagcacgggtatgcgtcaggaagtacgcgcccagaatgatgtcctgcgtgggtgtggcaatgggcttgccggaagcaggggagaaaatattgttgggcgccagcatgagctgccgggcttccatctgcgcttccacggacagaggcacgtgcacagccatctggtcgccgtcgaagtccgcgttgtacgcattacagacgagcgggtgcagacggatggcggaaccttcaatcagaaccggttcaaaagcctggatggagaggcggtgcagggtgggcgcgcggttgagcatgaccgggtggcccttggtcacttcttccagaatatcccacacttccggcgtcttgcggtcaatgagcttcttggcggagcgcaccgtgtgcacgtaacccagctctttcagacggtggatgatgaagggttcaaacagaatgagcgccatcttcttgggaagaccgcactggttgagtttcaattccgggccgatgacgataacggagcggccggagtagtccacgcgcttgccgagcaggttctggcggaaacggcctcccttgcccttcagcatgtcggagagggatttgagggggcggttgccggcgccggtgacggcacggccgtggcggccgttgtcaaacagggcatccacggcttcctgaagcatgcgtttttcattacggatgatgacttctggagttttgaggctcaagagggttttcaggcggttgttgcggttgatgacgcggcggtacaggtcattcaggtcggacgttgcgaaacggccgccttccagaggaaccagcgggcgcaggtccggaggaatgacgggcagaacgttcaaaatcatccattccgggcgtgtgttggactgaaggaacccctgggccagtttcagacgcttggcaatcttgcgcttgttctgtttggagttggtattgtccagctgttcctgaagatccgcgacgagggtgggcagatcaatggccgccagcattttctggatggcttccgcgcccatgccggcttcaaagctgtcatagccgtattcgtcttccgcattgcggaattcttcttccgtcaggatggcccccttttccagaggggtactgccgggatctaccacgatgtagtcttcatagtaaatcacgcgttccaaatggcgggctgtcatgtccagcataaggccaatgcggctgggcatgcatttgtaaaaccagatatgggaaaccggaacggccagttcaatatggcccattcgttcgcggcgcacgcgcgcgttggttacttccacgccgcagcggtcgcaggtgatgcccttatgcttgatgcgcttgtacttgccgcaggcgcattccatgtctcgggtgggcccgaagatgcgttcgcagaacaggccgcctttttccggcttgaacgtgcggtagttgatggtttccgggttgacgacttcaccgaatgaccagctgcggatggtatccggatccgccacggtgatggcaacctggtcaaaggtccggggcttgtcgctcaggccgtgcatttccctgatggtgggggtgtcagacatatattgaaagtttaaagaatgtttgatgcccgcccccgcgttttgcggcacgggggcggaatgcggtggatattagaatttgaggtcggagaagtcgacgtccgccaggccggccatgtcgtcgctgtcaaagccttccgtcatgccgtccacgggagtgagatccgtgccgccgagttgcagggagggttgttcatccttgctgccggggcgtacgttcagccccagggactgcatttccttcatcagaacgttgaaagattccggagttccggcttccagggtattatcccccttcacgatggattcgtaaatgcgggtacggccctgaacgtcgtcggacttgacggtgagaagttcctggagggtataggcggcgccataggcttccagtgcccacacttccatttccccgaaacgctgaccgccgtattgggccttgccgcccagaggctgctgcgtgaccaggctgtacggacccacggcgcgggcgtgaatcttgtccgccaccaggtggttcagtttgagcatgtaggtctggcctaccaccaccgggttatggaaaggttcgccggtcaggccgtcataaagggtactcttccctcccacggtgccgtccttgccgtcaccgatccaggtgaaaccgtccaccttcttggcttcggacatgtaattccagatggtttcttcactgatcccgtcgaacaccggggtagccaccttgaagccaagggccctggcagcgatgccgaggtgggcttcaagcacctgccccacattcattcgggaaggcacgcccaaggggttcagaacgatatccaccggagtaccgtccgcgaggaagggcatatcctgttccgggacgattttggcaacgacgcctttgttgccgtggcgaccggccatcttgtcacccacgccgagcttgcgcttggcggcgatatatactttaacttccttcagtccgccgggttcggattcgtccccggattccatctgatccagcctgtgttcccgttcgtcatccagttccgtaaagcggccttcaaacgaagtgatgatttccagaatcttgttgcgaatcgggctgggttcgatttcgatgtggtcgtgaaccagggccagtttacgcaacagggtcttggtgattttcctgttggccgggatgatgatttcaccggtctgttcattgacgacgtccagcgggattttttcacccagaagaatatcggagagcttcttggtcaactggtcaatgagctgctccttcttctttttatgttcgtcgttgattttcttgaactgctttttcttttccgcgctgtctacgacgaggtcgccgcggtggtggccggagcctgtggaagaaatgcgcacatccatcacgatgccggtgcagccggaggggacacggagtgaggtatctttcacttctgcggccttttcaccgaaaatggcgcggaggagacgttcttccggagccagttccgtttccgatttgggggtgattttgccgacgaggatgtcgccgggcttcacttccgcgccgatgcggatgacgccgtcatgatccaggtttttcagggcttcatcaccggcgttcgggatatcacgggtgatttcttccggacccagcttggtgtcacgggcctgaacttcaaactcggagatatgaatggaagtgaaggtgtcttccttcacggttttttcggagatgacaatagcgtcttcgaagttgtaaccgttccacggcatataggccaccagaacattgcggccgagagccagttcgccctggtccgtgttcgggccgtccgccagcacgtcgccggttttgattttgtcgccgcggcgcacgatcggacgctggttgatgcaggttccggcattggaacgcatgaacttgcgcaggggataaacgtaaacgccattgtcgcggtccgtgcgcacactgtcgggatcggacaggaatacttccggacgcacgggcagttccccgtctttcgtggtgataatgacttcagccgtggcggaggccacgatgccgtccgcttccgccagaacgacggaacgggagtccctggcgcactttccttcgatgccggttcccacgtatggagattccgctaccatcagaggcacgccctggcgctgcatgttggagcccatcagggcgcggttggcatcgtcatgttccaggaaggggataagaccggcggcgatggaaacgagctgcttgggagaaacgtccatgtaatgcacgtctgccggatccacttcgatgaattcgcctttttcacgggcggttacgcgggaggtcgtgaagttgccctgttcgtccagcgggttattggcctgggcgatgagatagccttcttcctgatcggcggtgacgtattcgatggtattggtgaccctgccattttccaccttgcggtaaggcgtttcaatgaatccgaattcattgatgcgggcgtaggtacacatggagttgatcaggccgatgttgggaccttccggcgtttcaatggggcaaatgcgcccgtagtgggaggggtgtacgtcccggacttcgaatccggcccggtcacggttcaggccgccgggccccagggcggaaagacggcgcttgtgcgtcaattccgcgagggggttgatctggtccatgaattgggagagctgggagcggccgaagaagtcgcgcacgacggcgctgagggccttcggattgatgagtttgctgggcgtgacgccttcaatgttctggtcaatgagggtcatgcgttccttgaccaagcgctcggtgcgggcaaggcctacgcggcattgattggccatgagttcgcctacggcacgtacgcggcggctgcccaggtggtcgatgtcgtccaccatgccttcgcccttcttgaggcgcaggaggtatttgagggcggccaggaaatcttccgccgtcatcaggcgctggtccaagctggtgtccagcccgagtttctggttgattttgtagcgccccacgcgggtgaggtcgtatttcttgggatcgtcaaaaagcctcttaagcagggtgcgtgcctgagcggcagtagcaggatctccgggacgcaggcgtttgtagatttccttgagggcggattcttcgtcgtgagcgggatccttcttcagggttttgatcagcacgtcgtcctcgctctggtcaatgacgtcgattttcttgatgccgaactggaggagctggcgaaccacacccatattgagctgttcgaaagccttggcaagaaccaggtccttgtccttgatcgtgtccacagccacaaggttgtgcagatcttcttccgtcatgtcttcgctcaggggaagcgtgcggatgttgtagaactggctgacgatgtcacggtccgttttgaagcccaggtagcgcataaacgtcgtcgcaaggaatttgcggcggcggcggcggcggtcaaggtaaacgtaaagcaggtcgttggtgtcaaactggacctccagccaggagccccgatccgggatgatgcggaaggagtggagcagttttccgttcagatgctgggcgctttcaaagcaaatgcccggggaacggtgcagctgggacacaatgacgcgttcggcgccgttgatgacaaaggtgccgcggttggtcatcatggggagttctcccatatagaccgtttcttccttggactcgttgtcggatttgagcttgaaggtgacctgaagggcggcgctgtaggtttcccccgcgcggatggcctcgtaatcgctcatcttcggctgttcaatgtcataggagacgaagtcgagctcaatgttttcgtcatagctcttgataggaaagatttccttcagaacgccttgtaacccgatgtttttcctggccgcggccggcgtgtcctgttgtagaaaatcgaagtatgattgaagttgaatctcaataaggttcggaggttcgatgacttccttgatattcccgaagtagagtcgctttgacatgggctgctgtggcggagatgttatggtttgcatcctgaaaaacccggatgccgggttgggcggttctttccctgggggacggaaccgactggaagcgttttacgaaataaaaggcctctagccggtcacgcgggatgtgaagacgaggaagcgcaacaggagaaaaacggcttttctcctgttgcgcgggaagtaaaaagcttacttgacgtctaccttggcgccagcttcttccagcttggccttggcggcgttagcttcgtccttggagacagcttccaggatgacggcgggagtgccttcaaccagtttcttggcgtccaccaggccgaggccggccttcacttcgcggacggctttaattacggcgatcttgttggcgccggcttccgtcaggacgacgttgaattcggtcttttcttcttcagcttcggcaggagcggcggcagcgccggcggcagctacgggagcagcggcggaaacgccccacttttcttccagaagcttgacgaggtcggcagcttccaggatggtaagggtgccgagttcttcagcgattttgttaatatcagccattgtattgttttctagtttggtttcgagtcgcgccaagagccaacttggcatttcagttctccggccggagttccgacaaggaacctgtaggagagtcgggtccgattttcacacatttggctagagtgcaaccggaccgtccggtcaaggggttggtattaggcggcgggttcttcgctgccgccgttttctttgtccacatatgcctgaataactcgggcaagagcggaaccggccgcgttgatagtgccaaggagtttggcaagcaactggtcgcggggaggcagttcgccgatggcgcggatttcgtccgcggaaagaatggctccatccaggatcgccaccttgtattcggctttcttggaagccttggcaaaggtgttgatggccttggcggcgcctgctacgtcggatgcgccggtcacgaaagcggtctggccgacgaggtgttccccaatgtcgggaaggccggcatccgtcagagccgtgcgcatgaagttgttcttggctacgtggcactgagcgccgcaggcggccagggcggaacgcagattggtgaactcaggcacggtgatcgaggtgtagtccacgacgatcaggaacggggaggcgttgacgcgagcggtcaggtcgtcaatgatgatacgcttgtcaggattcatggtgtgctaaatcggttcgggttacagtttggcgatggaagcagtgtcaaccggcagaccggggcacatggcgcatgaaacggtgacagattcgatgtaggcgcccttggcggaagccgggcgggccttgacgacggaatcaatcagggcagcgatgttttcggcgatgctttcgttggagaaagacagcttgcctacagcagcggagatattggcgttcttgtcaaccttgtagtcaacgcggccggccttcacttccttcacagccttggccgtatcgtccgtgacggtaccggttttcgggttgggcatcaggccgcgcggacccagtacacgggcaaccttgcgaacctccgtcatggcgtcgggggtggcaatggccgtatcaaagtcaacaaatcctccctggactttcttgatgagatcttcaaaccccacgaattcggctccggcttcctgggcggccttggcggcatcgccctgagcgaagacgaggacgcggacgtttttacccgtgccgttaggcagggaaacgctgccgcgaaccatctggtcggatttgcgggggtgcacagtcaggtggaaggagacggtaacggtcgggtcgaatttcggtgccgggaaggatttcatggtttccacggcttccgtgatgctgtagttcttgttaggggtaacaagcttggctgcttcttgatatcgcttgctgcgtttggtagacatgtgtgtatttggcagtgcgttcggactggtttaatcctcctgcggtgagtgttacataccttcaacttcaatgcccatctggcgagcctggccggcaagaatgcgggcggcgcgttcagggtctttcgtgttgaggtcagggagtttggtgttgacaacttccatcagcttggccttggaaagagtggcgactttctttttgttcggttcgccggagccggaggcgatgcctgcggctttcttgagaagcacgctgcccgggggctgcttggtgatgaaagaaaatgacttgtccttgtaaaccgtgatgacggtcggcaggagatcgccggcctgcttttgcgtggcggcgttgaactccttgcagaatgccatgatgtttacaccggcctgaccaagtgccggacccacgggcggggaggggttagcggctccggcattgatctggagcttgatgattttggttatttcttttgccatggttttgctttgttagcggagaaaataaacgggaaggggggctgatggggggagacgcaaagaagattcaggctttttccacctgccagtattccaggtccacaggcgtggcacggccaaaaatggagacgctgacacgcagcttgcccttttccgggtcgatttcttcgatggtgccttcctggctctggaacgggccttcgcacacgcgcacagggtcgccgacggcgaattccaccttgggacgggcggcgacggcttccgcatccaacaggggcagaaggtcttccacctcgcgcttgcgcatggggaggggggcgttgcgggagccggcaatgctgatgacaccgtcaatttgctggataaagtaccaaaggtccttgttcagggtgccgtccgcttccagcaggtacatgttggcataaacatacccgggaaagagtttgctgtgacgttccgtttttttgccgttgcgcacttcggaaataagttccgtggggacttccacccggtaaatgaagtcggaaagctcggcgtccttcgccttgcggatgatgcggtcacgaacgctgttttcctgtccggagaggacgtgaaggacataccattgttcgtgaggctctggggtactgggcatgatcggagaaagaagtggggagagtaaaactagattgccaactggatgagatagttgaccacgctgtgaagaaagatgtcgaacgatgcaacaaacgcgccaaggaataccatggcaatcagtacgacgagagtggaaccccagagttcgcggaattttttgaaacctttcaccttggggtcgctttcccagggccaggtcgtcttcttaagttcgcccttaacttcggcgatgaattgagaaatcttgcgaaacatgcttcaaggtggggtggtgtatttggaaagaagtggcaggtcaggagggactcgaacccccaacttttggttttggagaccaacgctctaccaattgaactactgacctgttggagtctcttctttcgtgggaaatgagggggcctgcggggaggccccctcattaaacctgatgtagattcctctacaagttcctgaggaacttagtcaaggatttcgctgatacgaccagcacccacggtgcggccgccttcgcggatagcgaatcgcatggctttttccatggcgatcggagtgatgagctggacttccaggttgacgttgtcgccgggcatcaccatttccacgccttcgggaagggtgcagcaaccggtcacgtccgttgtacggaagtagaactgcgggcggtagttgttgaagaacggagtgtgacggccgccttcttccttggtcaggacgtaaacttcagccttgaagttcttgtggggcttcacggtgccgggtttgatgattacctggccgcgttcgatgtcttccttcttcaggccgcggaggagcagaccgacgttgtcgccggcctggccttcgtcaagcagcttacggaacatttcgatgtccgtaacggcggttttctgggtgtccttgatgccgatgatttccacttcttccatcttcttgatgacgccgcgttcgatacggccggtagccacggtgccgcggccggagatggagaatacgtcttccacaggcatgaggaagggctggtccacaggacgttcgggctgcgggatgtaggagtcaacggcggccataagttccatgatggaatcttcggcagcggcgtcgccttccagagccttaacagcggaacccttgatgatgggggtgtcgtcgcccgggaattcgtattcgttgagaagttcgcggatttccatttccacgagttcaagcaggtcgggatcgtcaaccaggtcgcacttgttcatgtaaacgacaatggcgggaacgcccacctggcgggcaaggaggatgtgttcgcgggtctgcggcatcgggccgtcggaagcggcaaccacaaggatggcaccgtccatctgggcagcgccggtgatcatgtttttcacatagtcggcgtgtccggggcagtcaacgtgggcatagtggcggttttccgtttcgtattcaacgtgagccgtggagatggtgatgccgcgttcgcgttcttcgggggcggcgtcaatctggtcatagccgcgtgcttcggcgaaacccttcttagcgagcactgaagtaatggcggcggtaagggaggttttgccgtggtcaacgtgaccgatggtgcccacgttcacgtggggcttgttgcgctggaattgctctttagccataatattatgtttaggtttgggctgctatgggtctagcttgaagatggagcttctggcgggaattgaacccgcgacctcatccttaccaaggatgcgctctacccctgagctacagaagcatagacttcttccgcctttcgctgctcctagagaagtcgtaaatccgcccaaacctgcggttctagcggataaatagcatcctcccgtgttgcctgacgaaaagcggacgctatgttacgtttttagatgcgggatgtcaatgaaaacatgaacattttttcagctttatgccgcaaatacagggagtccatgtataatatatttatcaggaatgtgttgaatgtttggatctgtttaaatcctccgtcaatttaagattggggtcaacgtcttcatccagagagtggaacagtcctctgcgggctttgaggcaggtgacataagcgatcatggcggcattatccgtcgtcaggtcgaagtccgggagaaccagttccactttttcacggtcacaggcggttttcaggcgggaacgcaactccctgttgcaggagacgcccccggagatggaaagggtgcggtgaccggaggcgcgcaaggctttcagcgccttgtgaatcaggacgtccgtcacggcccgctggaaagaagcgcagaggtcgcgcagagtttgccggggcaggccgtgaggatcgccgtttttcgtaattttgggcagtgtatagagaacggccgttttcaggccggagaaagatacgttggctgtatgctctttcatcagggcccgggggaaagaaaaggcttccgggtcgccttctgccgccaagcggtcgatttccggccctccgggatagggaaggcctagcattttgcctaccttgtcaaaggcttcccctgctgcgtcgtccagagagcggcccagcaggcggtagttccctacgccgcgcacatccacaaaaagggtgtgacctccggaaacgaccatgcccagatggggaacgggaccgccggggcgtttgaggaagggggaaagcagatggccttccagatgattgacggagacgaagggcctgcccgccgccagagccagagccttggccgtgctgttgcctaccagaagcgcagctaccaggccggggcctcccgtagcgccgaagacgtcaatgtccgcaggagctgttccggcttcgcggcacgcggttcggatgattccgggaagatccgctgaatggttgcgggaagctagttccggcactacaccgccgtgctggcggtgaatggcaatttgggaggagatgacggaggagagtatttccggagctttttcctctccggcagaacgcaggatggcgactgccgtttcatcacaggaggattctattcccagaacggtaagggattccggcatggaggaagaacagggaggggaggttaggaggactggtggatttgggccggcttgttgccggtaaccgtttccctggtaatggtaacggtgtccgcatttttcatgctgggcactttgtacatgacgtccagcatgagggtttcaaagatggaacgcagagcgcgggctcccgtgccgcgtttcatggcttcggcggccatggctttcagggcgtccggcagcacgtccagtttggcgccgtacatggcgagcagtttggaatattgcttgaccagggcgtttttgggttccgtaagaaggcggatgagctggctttcatccagcttggagagcggacagaagatgggcaggcgtcccacgaattccggaatcatgccgaaggagaagaggtcttccggcatggcctgtgccagtatttcctcttccgagtattccttgcggtcgcgttgttccgtgatggctccgaatcccatctgggtggcgccgaggcgtttgcggatgatgtcttccagaccgacgaaagcgccgcccacaatgaagaggattttttccgtattgacgcggatgtattcctgttgcgggtgcttgcggcctccggtgggaggaacattgcagatggtgccttcaatgattttcagcagagcctgctgcacgccttccccggagacgtctctcgtgacggagacattctgtgttttgcgtccgattttgtcgatttcatccacgtagatgatgccttgttccgctttcgctacgtcaaagttggccgcctggagcaggcgcaggatgatgttttccacatcttcccctacgtaaccggcttccgtcagcgtggtggcgtccacaatacagaatggaacgttgagcattttcgccagcgttttcgccagcagggtttttcctgagccggtggggccggccagcaggatgttggatttttcaatttccacatcgtccagggacttgtcgtccaacatgacagcactttggcgcaggcgcatgtagtggttgtacacggctacggaaagcacttttttggcgtagtcctgaccgatgacatactggttgagcgtagcgcacatttcttccggtgtgggcagcgggccttcataggaggccgggccggccgccgtttccctgagcatgtccgcggctgccgctttgcgggcctccgcctggcacatggcgtaagcggagggttccatgttcaggatgccgcggatgaagcgggttgccatcggaaggcctgtgtccttcacaatcatgttgacgcaaatttcaacgcaattgttgcagatgtaaaagtcttccgcaatctggatgagtttgtccaccttgttcccgggcttgccgcagcaggaacaggcaggaagatgaggggtggaaccggacatggtttttcaggtagagagagaaatggcggagggaaagggtcaggccttggtttttttcttgtcgccctggtcatcagagtgatgcgccagaactttatccaccaggccgtaggccacggcttcctcggcagtcatgtagttgtcgcggtcagcatccttttcaatttgcttttccgttttaccggtatgtttggccagaatgccgttgaggcgttttttgaggttgaacatgaagccgatggtgcgttccacatctgaagcggttccctgggcacctccggaaacctggtgaatcattacgtgggagttcggcaggcagaagcgtttgccgggagttcccgcagccagaaggacggaacccatggaggccgctatgcccaggcaatatgtatttacgtcacaagagacgaattgcatcgtatcgtaaatcgcgagacccgccgtgacggatcctccgggggagttgatgtagacgtggatgtcttttttcgggtcagccatctgaaggaacagaagctgggcaatgacggaattcgccacatcgtcgtcaatagcggagccgatgaagataacgcggtctttcaggagacgggagtaaatgtcaaaggcacgttcgccgcggccgtcctgctccactaccatgggcacatagtaggagtttgcgggggttgatttggaagattggtcttgaaacatgtttatggaagattggatgttgttttttcaatgtacgttacccgtccgaaagatgcaaaacgggggagtcgggcatgtgtgcgccaactccccctggtaaggtgttttgtgcagaggaggggttactgctcgtctaccgttactttggcctcttttgtcaggaagtccagaaccttggctgtcagcaggctcattctgatgccatgcacgcggccttcgcgctggagttcgcgaatgtaggatttgaggttctttttctgctggcgggcctggcgggccacttcgttgtaaagctccatttccgtgacggcaattttttccacctgcgccacttcctgaagcatgaagaagaccttaaggttgcgcttggcctcctgtttggcttcttcccgggcttcctccacaaacttatccatgtccgccggggcgtttccgctgtacatggcctgctgcattttctgctggaggatgccgtacacttcacgttctacgacagcttccggaaggttgaagtcaagcatgtccgccagcttttccgtgatctgatcggccttggcctcatcaatttgcatggctttgcgctgggccaggttttccttcagggcggttttcaattcttccaggtttttgccgggaagaactttttccgcaaaagcatcatccatggccggaagctgtttttcccgtacttctttcacagtggcatggaatacgagttccttgccgcgcagttccgtaattgggaaggtatccggaatggtgacggtgatatccttgctgtcaccggcattcaggccttccagggcggaggcgaagccgggcaggaattgatcgtcttccaccttcatccactggccgtcacggccttccaggaagcctacgggtttgcctacggcttccgctacgggtttgccgtccaacgtggttttgaagtcgataatcgccacgtcgtctttttgggcggcgcggtgcacaggggtgaattccgcgatttgttcagccagggagttcagagcttcctctacgtctgcttccgttacttcggaagagggaaccttgacttcgatgcctttgtattccggcaattcaaattcgggaactacggtcatcgtgctggtagcggtgtagttgccctggtcatccagagattgttccggctttccgaagttgagcactttcaatttggggttttcttccagagcggtggagcaggccgtttcaaaaagggtgtccagcagttcttcttcaatttctttcttgaagcgcttttcaatgatggacttgggtgttttgccggggcggaagccgggaagcttggctttggcggcataggaatctacaatggaggcgcggcgcgcagccgtggtttctgcagggatggaagctttcagcgtggctgtgcagtccggttgaatatcaacgttgatttccataaataatacggtcagtgttaattgaaagtggttctgtttcagctccgggatggcggcagcggtcaaaacacgagcggcgataactttaatgagagggtatctggagtgcaagctattgcacaggaatgacacaattgccctcctaagcgcgcacgcgcacgcgatgtaatagaatacggggcaactgtgttctacgcggaatcacgtcttgactatgcaagaggaaaagtcctttatatcccaagcattaagttcagcgctcatgattcgtcccgtttttttgtgtgtttcctttcccttgatagcatggtcggctgttttggcccaggatgaaacttcccttaacagaggcgcctatggttccgtgatgactccggaacaggtaatgcgggaactggggccgggcacggggcttcttcccggtgaccaggcgtatgaggggcggcctgtgaagagcgtttccgtgcggtacagaagcaccggcaagaccgtgtccgaagaccgtctgaaaaatttgctggctacgcagccgggcaccagttattccccggaagtggtcaacaaggacttggaacggttgttggaaagcggtctggtaggcggcaatacaacagtagccgtggagccttccggcgacggcgtggcggtggtgtttgaaatggcggcccagaatctactgggcggcgtggggttccgcggcaataccgcgttcgacaacagggatctctccgaggaatgcgggctgaaggggggggaagctctcagcgacaaggccctgagcagcgctattgccaagctgcgcacttattaccaggaagcccggtatccggatgtacgtgtttcctatttttaccagaaaacggaacggcccggctttgtggatgtggtcttcgacattaacgaaggaaaaaaggccaatattatcaagattgactttgtgggcaatgaacacatcagcgccaaggatctccgacaggtgatgaaaaccaaggagaagggctggttgacctggattaccaaatccggacgcattgaccgtgaacaagtggaggacgatctggcggaattggtgacttattaccgcaataaaggttatctgcgcgtcaagctggacaaggtggaatattttgacgccggcaaaggcaatgagcagaagctgacgatgagaattacccttaccgaggggcgccgctacaaggtcaaccaggttgccttcggccccaccagggtgtttacggcccaggaactgattcctggcctgagcatgtacaacggggatacctattccgcccagaaagtggccgacgacgtgacgatgatccgccgttattacggttctcgggggtatgcggacgcctccgtgcgtccggacattcaggaagtgggcgttgatcccaagacaggttacgggcaaatcaacattgtgtaccatgtgacggaaggcaatccctaccgcgtaggcaatatccgcctgaccgggaataaccgcacgaaggattacgtcatccgccaggaacttcccctccagtccaatgaccccatgaatgctgtggatttggataccgcccagaagcgcctccagaacctgaactattttgacatggtggacgtagcccaggtgggatccacgcggcccggctaccgtgatatcaatatcgaggtggcggaaaaacgtacgggatccctgaatatcggcgtggcattttcctctattgaaagcgtttacctgttcgctggcatcacccagtccaattttgacatgtatgactggtcctctttcgtgggcggcggccagcgtttcgcgattaacgcccgtgtcggttttgaaacgcaggatgccagtatttcctgggtggatccgtggttcctgcaccgcaagctggccttcgggacggaaatcttctacagcaattccacatatttttccgattattacgaccagcagaattatggctttgccatttctctccgcaagccgatcggggaactggattacgtgaaactggaataccgcctggaacaataccgtattgacgccgaagggaacgcccctatcttcttctggcaacaggacggagactacctgcgcagccatgtggaactttcctacaccattgatacccgcgacgcgcagatttttccccgcaagggaggcaaatttgaagtgctggccggttattccggcctgggcggcgatgtgcatacatacaatttcggcgtgaatggctcctattactggaatttgcgcggagacaccattttcagcatcaatgccggtgcggctaccgtggattcctatggcaaccacgatgtgcccatttttgagcgcctctacctcggcgggccatacaacatgcgcggtttccgtttccgggacgtggcgccgtacaatcccgccctgagcggtgatgagacgatgggcggccgttcctccttcttctgccagtttgaatattccattcctgtgattgaagaagtgcgcgtcgcggtgttttatgacatcggttttgtcaacggagattcttttgacttcagcacgtccaaaatagtttccgactacgggatcggtctgcgcctgaacctgcccatcggtccgctggcagtggactatgccattccgattcagaagaacaacgccattgaccgcggaggacaattccagttctatctcaattattcctattaattacgtttgataatttctctaccgtttgacgacatgagtaatttccgcattcttatcctggcgtttctggtggtggtgctggctgttctgggaatgatttatgtgaatatttcttcaagaatggatgtgattcagcaacagcagcagatggcctccgctccggcacctgtcaatccttccccgtatcttccgatgcccacgcaggctcctgcttctgccgttcagccggtggtggtggcggatcctgtagtgagcgaggaactggctcatgtttcggcggagctggaacggatgaagaaggagaatgaagaactgaagaagcgccatgctctggcggaggaagaacgcgatctgttggaacgccagaatatggaaaagggagatccccggctgcaatggcttaatgaaatcaaggatgcggagcaggtgggccgtgtgacggaatactaccgtgacgccaacctggtcctgttccagtccatcggccagcctgacttgaaagtggggcaggaactgggaatccgcagacgcgggagcattttcgtatccctgattatcgacggagttgacccggacgggaaggtgttccagtcctacgtgaagcgtaatacgctttttgataataatgacaaggaacccatcaagccgggggatgaagtcattgttccgcctgcgagctggcaggaaaacatgacggaagaagacaagtccggtatggcttctccctccgcccccgtccccgtggaagctcccaaaccggtgatgattcccatggagccgtgattcgggtccgtatttagccaagccaagtaaagagaagtgcacctgagagaaagattgcaatcgggcgccgggcccagcctgtcctttgaatttttcccgcccaaaaacgagcaggcagcgtcggccttgtaccagactatccgtgaactggagccttaccgccccagtttcgtcagcgtgacgtatggcgcagggggctccacccgcgagcttacccgcgaagtggtgttgcgcatccagcatgaatcccgtattcctacggttccccaccttacttgcgtagggcatagccgggaggaggtatggaatatcctggaccaatacgcccgggctggagtgcgggccgttcttgcacttcggggagatcctccccggggagcgaaggattacaaccgcgatgcggatgtttttcgccatgcggcggatctggtgacgtttatccgtgaatataatgaatccggccgtcacccggatccggatggattcgccataggcgtggccggcttcccggaaggtcatccggccactcccaaccgcctgcgcgagatggatttcctgaaagccaaggtggatgccggcgcggattatatctgcacccagctgttttttgacaatcattcttttttggattaccgggaacgctgtctgctggccggtatcaaggtgcctatcctggcgggaatcatgcctgtgaccagcctgtccggcatgaaccgcatggcagagctttccggaggcacctgttttccggccaggctgcttaaggcgctgaagcgtgcgggttccaatccggacgctattcaggaggtaggcatccaatacgcctccagccagtgcgccgaactgttggattccgatgtggacggcattcatttttatacgcttaaccagagccgggcaacgcgggaaatttacaggaatctgggactgaaggattccctgcagcttttggaacatggcgaagataagtaaaaagctgattgatttggttgggacaacacggtagaaccctcttcaacatattatggatatcaaggatattaaacgggccatggacaatatgccgatgggcgacggaagtgcgtttgcggaaatttccgtcggcccggccaagcatgaacagtttttggatgaacattacggcaaggttgcgctggttgtgttgctatgcgtccttggggctgccggatggattatttataatggcgtgcaggattccatggaaagaaaggcaggcgccgctctggtggccgctatgccggaatccccggcaaccggggaaatttccctggacgaacaggggcttcagcaggtggtggctgactttgacagttcccgcgccgccgtcaccgcctcttaccttcaggccattgccttgtggaacgccggcaaggaggatgaaggcgtggccaaaatgaaagcttttattgattccgctcccacggaggaatggaaagcccaggcttccgttaccctggcctgccgtctgatgaaccgggggaaggcggatgaggcggaagggctgttccgttccgtggtggatgcgggagatcctactttttccggttttgccaccatgtgcctgggggacattgcccgggctaagaaagacaatgccgccgcaggcgccttttaccgtgaactggcggagaaatttccgtccagtgcatttgccttgcagagcggaggctacctgctgcgcaagagcctgtttgatattcagagtcccgttcgtattgagcccgcagtagaacagaaataacccatgcgggtgtttccgaagttttccggaagatgaacgcttttcccatccgcatgtctgttttcttacagtgcatgcggatttccgtattcaggaacgccggaacagggggataatgaaaagcctgctgcgcgcgtagctgttatgattccgggaattccgttcaggactgtgacatatttaaacaaatcatcaagggattccgcgcttaccggatgtaaccgggctgccggtgttaatccttattttttatctcatgaacaggcatattaaatcattctggcttcttcccctggcgggaatgacgctttctttcatgccgtcctgcacgacggacagctacgggaacagttccgtaacgcccggtggagccgccgccatcggtgtgggggcgctggctgccggcgctgctattggggcggctgtccagcatgaccgcgacaaggacaggtaccgcaatgactggcgccaccataatcctcctcctccgcctccccgtccgcctcatcgaccccaatggcggaggtaagaagggagcgtgcgtgtaagggcggcgatattttggttcggcagggggccgggaggcgacgcgtttttccggtctgcccctttgctgaaatctcagacccgccgtatgccgcggagcgcccaggtcatgcgttgtctggcgctttccggatcattgaggatagaacccagcaagtcgagaacgggccgagctgctttggggtcgtgcacttggagctgtccggaaaggataaagggggctcccccgcagcagacaaggtaaatgaggatgttcatggggtctcccatgagcacggatccttcctgctgggcttcccgtatggtttccagcagcacaaggggatggcgcgtatggattcctgaaatgaaacggatggccgcctgttcccctgccagggcgtccagaaccagctgggcaatgaattggccgtgacgcagcaggaactccatgacgtctcctaggatggcttccagtttttcaaaggccggaagatgaatgttggcatgggtcctgatgccggtgaacagaggttcgtaccagcgttccagaagctcggtcagaaaagcttcccggttgccgaagtgatagacaaagctccctgtattggtgccggcccgcagggacaggccgcgaacggtaagggcgcgcagcccggattccccgacaatcatggcacccgtattgagcaggtgctctctggtggatttccgtttgggcatgaaggtgaagcttgaacctccatgtgtgccccttatcggcctgcaaggcaaggactcgttatgtctgttgctgtaaaaagcggaaccggggctcatcctctccccggttccgccgccggagtcctgaatgaatcaggaggttgctttcaattccttccgccgggaggcaatccagcgggagaagagtttggccgtggccggaatgataagcaggttcaggatggtggctgtcaccagcccgccgaactggacgatggccagggggccgagcagttcgcctccgggctggtcaatggcccagatcagcgggagcagccccagcacggtagtcagggaagtcatgatgatggggaccacgcgttccagagaaccttcccgtatggcttccgcgggttccatcccctgatgttccagggcccggtatctgttgagcagaatcaggccgctacggatggcgaagccgatgacggtcacgaatcccacaatggaagccacggaaagaatgggaggaatgtaagttcctccaaacagggaggacagcgtaccgggggaggcaaggaagacggctacgatgccgcccaccaggcacagcggtatgttcaccagagtcagcatggcgcgccggacgcttcccagtgcggaggaaaggagcagcacgatgagcaccatgacgatggcgcccaggacgtaaagccgttgtgatgcggattcccgtgctttgatagtgccgtcatagtctacggtacagcccatggcgttcattaccggctccaattgttcccgacaggctttcgcgaggtctcccaggttggaattgggggagggattgcaggaaatcatggctttccgcatggtgttgtccctcaggatgaggttggaaacttcctcccggtatacctgtgccacgtcgtccaggcgcacggtttttttattgggggaaatgagttccaggtttttgacatcttccatggacgttttaagtctggggtcaatgcgcaggacaatgttccaatggtcctggtttttgatgacttctcccagtttctgtccgttcatggccgtggaaacctgttccgcagcattcgccatggtcaggccgtaggaagccagggcttcctgattgtattgcacgcgaatggtatccaccataatttcccggttggcgcgtgcatccgccacttccggcatgttctccagaatttccttggctttccgggccgccaggcggagctggggcagctccgtgccgtaaatgttgatggcgatttccgagttggagccggacagagcggaactgatgcgatgggccagcggatagccgatcatggagctggtgccggggatgccgtcaatgcatttcttgatggcggagcgcaattctttctggtctttcttcagatccacgcgcacgagcagctcggaggcgctgacgggttctgcgtgttcgtcgttttccgcgcgtcccgtgcgctgggtgacactgagaacccccggaatctgttcaatatctttcatcactttccgggagatgcgctccgtttcatccagggaagttcccggcaccgtgctgacgaagactgtgtagcaatcctcgttgaacggcggcaggaaactggttccgaacgtggaacccagccacagggccagcagcgtaatggccgtcatgatggcgcagaccgttttggaaaagcgcaggcagaattccaggatgggggcataaatgcgtttaatgaggcgggagctgaaggaatccccgctttccagagtagcggcgtttttgcttttcttgaaccatatgtaacagagaaccggagtgatggtgacagctacaataagggaagaaagcagggccagcatgtaggagatccccaggggccggaaaaactggccttccagaccggacaggaagagcaccggagtgaataccagcaggatgatgacggaggagaaggaaatggagcctacgatttcgctcttggctttcatcagaacctcatacttgctcttgcgcttatctttcggcagggcggcgttcctgttcaggtgcctccaggctatttccacgaagataatggcgttgtccaccacgtctcccacggctacggcaaggccgcccagggtcatgatgttgatggccagcccgaaggcggggaacatcatcatcccgaacaggatggacaggggcatggaaatcagcgtgatgatggccgtgcgaaggttcagcagcgtcaggaagatgacgatcatgaccaccgctccggcaatgaggagggtttccgtgccgttatccagggacatttcaataaaatccgcctgccgataggctgcggtgtgcagtttcattcccttgggaagctggctttggctgaattccctgacggctgcatccacggcctgtgtcagggccagagtattggctcccggcaccttctgcacggaaagcactacggcgtcttcccccataaatccggcatctccccgccgcggcgcaccgtctatcttgacttccgccacatcctggagccggagtattccggaggcatggtccggaaccagggcgcggttgagctgttcaatattggcggtgcgggtatcctgctggatggggagttcctgcccggctacatcctccagataccctgcggggacggaagattgggattcctgaatagccgttttcaggctggaaaggtccaccccggccagtttgagtttgttgggatcataaatcacctggtattccggcagacgcccgcccagcaccgtgacctgccccaccccgggaatggccagcaggcgcgtgcgcagcttgtattccgccagttgcctcatgtccagctgggaggtctccttgtctccagtcagggcgatgagcatgatttcccccgttatggagacgatgggggccagctccggggatgtcccttccggcagggattcccggactgctccaagacgttccgttacaatctgccgggcctggtagatatctttgttccagtcgaaatccacccatacgaaggaaagcccgctgccggaggaggagcggacgcctttgactccggcggttccgttcatggcggactcaatgggaatggtgatgtattgttccacttcttccgcagtaaggccgggggcttccgtctggatggtgacacgcgggaccttcagttccgggaatacgtccacgggaatgttcttcaccacgaaaatgctgatgattgccagcgcaatcgtcagcaggatcacagtaatcctgttgttcaggcagaatgaaatgagaaagttcatggattctgattgctgaatacctaagattcaagggtttattccaaggggatccggggtatttgttccttaatcttttattttgtacatcgtttagtgttctccttcgtggaactggccgtccgcgtggaagtgcccggctgcttttttgcttccggcctctccggtgggcaggatgtatttcaattcatacccgcccttggtgacgatagtctgtcccggcatcagtcccttgacgggcgtttttccctgacgggaaggcagtgtttccacttttttcatgacaaatgtgtcgtttcccgccttgatgaaaaccacgtcgttcacccctaccttgacgacggcgctgttggggacgggaatgaagccctccgcggcggcgtcatgggagtacagatccaaccgggccagctggccggcatgtgtcccttccggtatgcggtccggggtaaaatacagggccctggactgggtggcgggatctacctgttcggccaccctcagggagccgttcagcagttccgtgtttttaccgctggtcagggccagccgggcttttgcataatggacgggatccgtcccataaatggtcgtggtaaattccagatcccctttattggtcatgacgagggcaggcgcgccctgttctccccaggccccttgggtcatgttcacggactgaacggaaccatccgccgctgcgtatatgtaaagaaggttatttttcaatacgccggactccatcaccagtttcaatttattgttgctggcgttcagggcagcccggaggctgtggatttccgcctctttgaattggatggaagtattcagttcgctgttgcgggtgccgattttttccaactgggcccggcgttccctgagggttccgagttctgctgcggcacggtccagcgcggccctggcctgggaggcgtttccttccatttccacaatatccggggatgccagcgtgtacagcagttcccctttgcgcacttgttgtgcggatttgacgttgaatgtcacgcgccctgcggcgggaagggcgtatgtggttaccgcatggggaggaatgaccatctgcccgtgaagggttttcgccgctccgtgggaggtttcctccactttctcaaagcgcatgtccagagaatggcgcgctttttcatccacatgcacgggaatcatatcccccggttggctggaatttttttccgcagactcttcgcgttcatggtcgcccgtgcatgcttccccttccgcgtgctggtgaccttccagttcatggtcgcctgtgcagacggctccgtccgcatgcctgtgttcttcgtgggcgtggccctgagtacaggtttcccctgccttgtgctgatggtcgtcatggccgtgatccgccgtgcaggcggaaccgtcctcgtgtttgtgttccgcaggggcaggctgtcctccgcgtgcggaatggagacagaaagcaggagccagtcccagcatgatggaaaaataaagatgtttcatattcattaaagatggtggagggttgatgtggattaaaggttggcgtgggtgaggtagcggagctgggcctgaacggccagaagcttgtccagattgtccaggaaagccaggcggctttcgtaaagctggtggcggttttccgccagttccagcagggatgcttccccaatgccgtgcagcttttccatgatccggacggaggcggcgaaggattccatgcgctggagttccgtgcggcagtggcggagcgccatctgctggcttgcgtcaagctggcgggcgttgaataattccgttttccaaagctggatggtttcctgtctggacaagtcccgtgtgcctcgggcttccgcaatagccttgcggttgcggttccaaaggggaagattgaaccctatttctccgcctacttccttttctccttcgtcgcgggtgaaggaggggccgagctccagttccgggtactgccggcggatttccgttttgaataatgtctccgtggtggcgtaagtcgccagttgtgccttgatttttggagaggcggtcaaggctgaagggccgggagccggtacggcggcgggaagctggaaactctgtttcgtcaggaaaccgagtttccgcaccgcagaaggatgcaggcccatcagcttgacgagttccatcttctgctccaattccgtttccgtcacggtttggagttcccggatagcgtcattcatccgctgggaggctacctgccgagaggaaaaatccacttcccccgcgccgataagctgttcaatcatgccgttttcccgtcggatggcatccagccgttcccggatgaccgtcttgcggcgctgggtaacggccagtttgctccatgcctgatccagggaactgagaaaatccagttcagcctggcggagggtccagaagtcggcctccttgtattgttccgccacttttttttccagggcggggaggccggttacgggaatggtgaagcccaggctgccggacatgttgaccgtattttcctggaggacttgttcaatatcccaggaaaaggagggatcgttccaccagcccgattgcctggctacttcattgctggaagccagtttcagccgggctttgttcagatccggattcatgaccaggccgatctggcgagcctggttctgagtgattgaggtaggggaatctacgcgggacgcctctttccaggaggcttcctccgcgttcaggtcgataggcgcgctgtggtagacgttgcatgaactaagcagggctgccaggcctattccggcgaagaatggtgtggatttcatgatggaaaagataataaaaacagttcgatccaatcaggtttggacaatgcggcgaataattccgcggaaacaaataaaagcggccgccgtattaaaggcagcgtaccgcaggaaacacccttaaggacgtttctgaaaaagagccgttaaatcagcaggggaagttgaaagccttcatgcgtcggaccggtgttcctgaaggggtcagggggaaccggtgttgcggaatccgatgtttggcttgttaaaagaagaggccgggccagatggtggaaatccggcaatgtctgccagatgacataaggctggggaagaggtgcatgaggaacgggaaccgtcagatcattaatctccagctgccggtgttcgcagaggtgcccggccaaagggctggaagagccggtgcggggcacatcgtccccgtggcattcgcagggggcggcatcctgatggcaggaacaggaaaaaatgaaaatttcttcatggcacgggcacacggaaaccatacccgttccgcctacgacgaccagcagaagggtgagcagcatgatgccggtgcgcaatgctctaaccatggtatgccgcgaatcctagaaaggagccgtgaaagcgtcaagagcaaaagtggcggatgtctgaaccctgaaggaaaggccgttatttttccgccgctttgcggagcagatccacagtgtgttcaaaagctacgccgcggacatcaatgatccgggagttttccgcgattgctccggtgatttcctcccggaatttaccggactgttcttccgtgagcaggtttttggagctcagggagcgcgtgatgagctggaggacgtaccctgtttccacgaaagactggcgtcccacggctttcttcatggcttccatgaattccggggcatgttcgggcggcaggccggctacggccttttcataagcacggatgaaggaatccaccggggctttggaaacttccgtcttggtgaggtcaaagctggattgataagcaagagctccttcttccgccagttgaagggcgttttttccgaatttgttgacggcagtcatatccgctcctttttccagcagcagggccgccacctggaaattgccgcgcatggctgccagcatgaggggcgtaaagccgttgccctcccggttgttgatgtctgctttcctttcaatcagcatgtcggacaggcggtccagcccgctccaggaagcccagtgcagcgcggtccacccgtccttgtccttccggtcgatttccacgcgggggtcttccagaagccgatccagataaggggcccgagtggcttccagcttcagcgtggtctcaatgttgttgtagttggcgtagcatacccacatgacaggagttctgccatggggatccgtcatgttgacaaaagcctttccttctgccgcagccagttcttccccttccttcagggtttgttcgaattccttcattcccttgactcgggcttccttctcctcctgttcggaggaagcgttgacttctttggcctccgctttcttcattacggtgataaggtccagggccgggttgggatctccggagaaagatttggagaccaacaggctgagaccgccgaggagggagctgaaagctaccaggatgagggaatccacaatgatgttgcgcgtgtgctggttcatggtctcgtaaggtcaggagttggcttccgtaagttcttccgccgtcagggcgggatccgtttccgcttcaatggcgctgatgggtggcgatgccgcgtcttcctcgggatggttcgaggtgatggtcctgcgggtcatgataatggcgatggggctgattacggccatggccaggtaaatggtccacatgaattccggggagtcccagaagccgatgtgcccggtatccatcttggcgcagatgccgtcatagcagaggtaggcgacgagcaggccgccgatgatgccattgatgggtttggcgatgaacatgggaagcgccgccagagacatgtaggaagccactttgtctttcggagctacccgcgccacatattcggagaagcggggagagaagagcagttccccgaatgcgaataccaagatctgcgccacaatggctaccagatacgcctgggagcgcgtttcgatgccgggcaccaggtagtaccattcaatgggaatggccatgaaaacgagagagaaagcggagatggacatgcccgcaatcatgaggccaacggtagagaagcggcccagcaccggaatgagcaggatgaggccggagacgatgatggccgggttgacggcattgatggagcctatggcgaaatcgtcatatagcgtccgcacgtagtatttgggcatcaccaggaattgcagcgtgaaaacgatgcgcacgcccatggtcagcaccaggaagaggataagtttgcggaaggcggattccttccatacctccatgaagagctggagaggtctgcggaggggggcattgatgttcgcctcccgttcgctgggttccgcgtagttgtcttcattaataaaacgggtggtgatgcagcccagcagcaccatcagcgttccaaagttgatgatccagtacccgccgtccacggcgccgaagtgcttgcggaaaaattcaatcaggaacacgttcgcaatgacggcggaaatgttcatcagcaggtagtagatattgaagcccgtggaacgcgctttcagcggggtgaagcgccggatggaagtctggatgacgggggacatgaacgccgtgccgaaggacataatcagaatgcccgccatgacggccagccttccggagtccacggtcgggctgaggtccggaccgaagcccatgataaggcgcccggcaatgaggatgatgaagccgatcaggtaagtgcgccgtatgccgatgatgtcgcagatggaacccaccgcgaagacgaaggcggagatgaaaagggtatacaggcctacccagagggcggcgtccgcatcgttgaagctgcaatagtccgtcaggtagaggacgaataccgtaatcatggaaaaataggccattccgtcgaagaactggacgacgttggtaagccagaaatccttggatacggttttcaggattttgaattccgaaaaatatttgaggatggggtttgcggactcattcatggagagatggaagcggtaaggaaaagttgacgacggtgaaagagtgggttacacgcatccccgtttcaagatttttttctcccgaaggccggtttgaccggaaaaatgcgcttcaccgccaggaacccccctctatctgggcaagatacgccggaagcctgccacgtggcaccatgacagcgctttcaggcattgttccacagccatggcgtccgaaggcagcacgggccacagcccggcttccttcagccctgatttggctatttccgccgctttccattcgcggaactgggtgggaagggcggagaaagtgaaaaaggcccagcaggccagcccgatggccagcgcgatctggaatttcaacagtccggccgccagcattcccagcaggataagagctgtgaaaaagggaatcatcgtggcgcgcgcagaggcggttttgcgggcttttgccgcctccgggtcttcccggaccaggctgctcatggcccaggtatgggctacgcaggccagccggcctgcggtcaccttgccttcccatgccgggggaaggctgatgaatccgttttcatccactccgggaaaccgggctttctccagtttccgctggcgtttttccgcaccgtccaggcggtggattaatccagccgggccggggaaaccgggcagttcccgggattcgtaggtgcgcaggggaatgatgcctttggtgaaacgcagcgcggcaatgacaccgagcacgaccacggaaaggaaaatcactactgcgaatagcatagacggctttttctcatatgcccgtgtgtccgtcaatctctccggctggcatgaagccgtccttcccggccaacagccgggtgcggatgcggacatcgttttttccttcttttcccgcccggaacgcttggaaaacggtgggatggcgtttatgtcggaatgatctgcggttccgggtgttcctctgggcgggcacaacattccggcatggattttcttcatgtcggaggcgctggatttgggttgattttccggcgtttttcatgtaatggctgaccgcaatggtccatattcgggaatgcatgaggaggtggctgccgtttgtcataatggcggcttccctgggtgtgtctcccgcccaggatgtggcgagccccgatgccgcggatctggatttggacctggtcaaactgaaaagtggccccaagggcagacagagggaggccatgaggaagatcctcctgcttgtgcatctgaagcaaaaggaaacgtggctggcggaatccacgggggatgaggccgtgcatctggcggcggagatttccttccgccggtatttggcttcagtagatatggacggatgcccggaggaattcaggctcgctttcctgcggtatgcaaagctcctgaattcctttaaagaaaaagatttgaacagtgtcgcggattttcctgcggtccctttgcaggctgccggaagggaactgttccgggtgttgcttacttaccgtctggaaccggagcatctgctggaggaaatgaaagcgatggtggatgaggaaattgaggggaaggaggagctgtctgcaggacagatgatggatattgtccggggaatgcgggaagccctgcaatccggaagccgcccctttccagcggaaaggcctccggaagacagggtttccgggatgtagcggcttttcatggatggcatgccggtaccgtggggaatcttgtggaggcatgccggaaatccgctccggctattccggaaggaaaatggattaagacggctgtacgtcagggtttccaggcggcggccatcagagtctggaaatggggcgggttcggctccctgtccacaatatccgtgtggatgttccggaatcccgcttccttcagcatgctttccagggcggcgggcgtgaagcccagccagcggtccgcgtaaagttcacgggcttcctcctgtccatgctggagcagatccagcaccaccaggcaaccgccggatttcaggatatcccacgcagcttccagcgctctggacggcttttgcgcatggtgcagggcctggctgagcagggccagatccaccgtgccgggtttaatgggcggcgcttcgatgtcgcccaggcggtattccagattgtccagcccgtgtttgcgcgccagctcctgccccagctccaccatgctgggggagttgtccacggcgatcacctgtttggcgctgggggagatgagctgggaaacgaaaccttccccggctcccaggtccgccactacgtcatagttcagaatgcggaggagagctccggccagcgctttccaggaacggcctggcgcgtagttcttgcccagacggcacaccacttcgtcaaaataggcctgggtgcggtttttgcgcttgtccaggataacctgaagggcttttttgtccgtttccgcctccggcaattcctcgcaggctttcagggctacgttgtgcagatcgcctgccagggaaagagtgtaaaagacgtttttgccggaacgggcgtcctccaccaccccttcctgccggagctgggccagctgggtggagatgcggctttgccccatgccgagaatttcctgaagttccgcgacgctcagggattcttcattcagaacgttgatgatgcgcaggcgggtgggatctgccaggagtttgagcgtttttagggttgacttcatagcggaataatatatcaacacatcgagatttatcgatatgagcagaaacacccctcacatctttacgtcggaatccgttggagaaggccatccggacaaggtggccgactacatttccgactctattttagacgcctgcctggctcaagacaaaactagccgcgttgcatgtgaaacgttggtgaagagcaatatggtcatcattgccggagagctgacgaccaaggcggtgatcgatccggaaaaaatcgcccgccaggccattcgggagatcgggtactgcaacaggcaggacgacgacgttttccatgcggataccgtctttttcacgaatctgctcacggaacagtccccggatattgcccagggggtggacgcccgggaggcggagggcaagggccatgcggagcagggcgccggagaccagggcattatgttcggcttcgcaacgaatgagacgccggagctgcttccggcccccatcgtgtttgcgcacaagctgctcattgagctggccaggaggcgcaaacgcgggcatgtggactggctgcgtccggactgcaagtcccaggtggctgtggcctatgacgaagacgggcgtcccgcgcatattgaaaacgtagttatttccacccagcacacggaagacgtggaccatgacacgatttactcatattgcgtcaaactcattaaaaatgtgcttcctgcggagcttctggatgagaggacggaatatttcatcaaccccaccgggaaattcgtcgtgggcggtccccacggggattccggcctgacgggccgcaaaattattgtggacacgtacggcggcatgggacgccacggcggcggagccttttccgggaaagacccgtccaaggtggaccgttccgccgcgtatatgtgccgctgggttgccaagcacattgtggctgccggactggcggataaatgtgaattgcaggtggcttacgccatcggctaccccgctccggtttccatccgggtggatacgttcggtaccgggaaggtggaggaaatatccattgaaaatgcgctggaaaacatcttttccttcaagcctgcggatatggtggaacagctgaacctgcttcggcctatttaccggaagacgacgcactacgggcatttcaccaatccggagctgccctgggaacagctggacgaaacgcgcctggcctccctgaaacaacttcttcattaattcctacgacaacgcttacagacatgttttcagaaacggaacaatacaaggtgcgcgatatcggcctggcggatttcggacgcagggaactggatattgcggagcatgagatgcccggcctgatggccgtgcgtgaaaagtacgctgcagccaggcccctggagggtgtgcgcatcatgggctccctgcacatgacggtgcagacggccgtgctgatagaaacgctgacggctctgggcgcttccgtccgctgggcgagctgcaacattttctccacccaggaccacgccgccgccgccatcgccaaatccggcacccccgtcttcgcctggaagggggaaacgttgcgggaatactgggactgcacgtggaaggccatgaactttccggacgggctggggccgcagctgattgtggacgacggcggagacgctaccctgcttatccaccgcgggtatgaaatggaggaaggctccgactgggtggataccccgtcggaatcggaagaagaggaagtcgtcaaggccctgttgaaaaaaattgccgcggcgactccgggcattttccatcgctggcttcccgagctgaagggcgtttccgaggaaacgaccaccggcgtgcaccgcctgtaccagatgcaggccgccggccgtctgctgattccggccatcaacgtaaacgattccgtaaccaagtccaagtttgacaacctgtacggttgccgtgagtcccttgtggacggcatcaagcgggccacggacgtgatggttgccggaaaggtggccgtcgtctgcggctacggggacgtaggcaagggctgcgcccagtccctgcgcggcatgggagcccaggtggttgtgacggaaatagaccccatctgcgctcttcaggcagccatggaaggttaccgcgtactgacggtggaagacacgctgggctgggcggatatttacgtgaccactacgggaaactgcaacatcatccgcatcgaacacatggaaaaaatgaaggaccaggccattgtctgcaacatcggccacttcgataatgaaatccaggtacacaagctccagacgtatcccggcatcaggcatcttaacatcaagccgcaggtgcaccgctacacgttcccgtccggcaacagcctgtatcttctggcggaaggccgcctggtcaacctgggctgcgctacgggccatcccagcttcgtgatgtccaacagcttcgccaaccaggtgctggcccagctggaactgtggaatacccgtaaagaccgttccgtgggcgtggaagtgctgcccaaggtgctggatgaggaagtggcgcggctgcacctcgccaagatagggtgcaagctgactgtcctgcgtccggagcaggcggactacatcggcgttccggtggaaggtccttacaagccggacttttacaggtattaaccttgtcaaggttttcttctcctggccgttccgcgcaggcctgtccggcggaacggcttttttgttttcccgatgatggagggaagcaggataacggtacgtttatttttcttcctgttttttatgcaggttccctgctgttagtgaaaaaaaggaagactttttatccggtctttaatgttcaaatacctttgcagcaggcaaaacgggagcaatcttggaatgctgaccagccagagcctcggcctgcattgcagaatgttccaaaaccatttgagtttggtaagaaggctgttatcgaatgaagcataggggaagagcaggagccttctctgttccgcctgaatcagcctcatcaggcgatcggcagcctggtatgttatttccccggacttatgctttccgtatacctctttcatgatcattatccaggttgttatcaggaattccgatctcttgatcaggattgtcctggggttcccgctcttaaaattgcagatattactgttgtgtctccgatagtacgaacaccgtttgccggatgcgaccatgcctgattttttcaaataggcgcgcatggacagcattgtatcgtccgcaatgccggggcctgaaggcaaatattcgaagtcgctgaacaaagacctgtggtacatggcatttccgccaaaacagctgtaaacatgggaaatgtcaaaaatacattccctgtagggtttgacgacgacggaatctgaatctggcaacatgcgtccataagcgggttgtccatcttcatcgatttcattataagaatggcagtaaaccagatgaccgggatatttttccgccagagatgccaacgaggagatcctgtcttcccgggcgatgtcatcgccgtcaaacttgataatccattccccccgggacaaatgaacggcacattgcaaattccctgcaattccccggttgctttcgttacggtggagaataatacgccgtccttctccctctttttccaccatttcttccaggcattcaaaagaaccgtcctgagaaaaatcgtccgaaataattatttcccattctcctggataatcctgttttaaaatagcccggaactgttccttgataaaacgtttctgattgtaacaaagaagaatggctgaaatcatgaaatcgaataaacagtttaagtttttttaaactgtctaaaaataacgaattccaaatccggagtcaaggttaaattttgaaagaaaggaacttctgaaaataagcttccccaatgaccggaatcttccgtcttcatgattccatccgggtaaccccatcaattcccattccggcagaaacatccatacctgccggaaagtccgtatttcaaagaaaattattgatcatcagttttatttcctttctgcgaagaggctctcctgtcatgcagaaacaaccgcacgcaatctctttttaattacagcggatttggaattccccaatcgaatttggaatccgtgtaatatgccccgcactctttttactgtgcgtgcactcagagagcaaatccctttttttcaataatttatgttgaagggtacggtttgtttctcaacatcaaacggccatggatacttcttcccggaaaacgtctcttgttgtattgttcaaccatcagtatgaacgtaacattccggtaatcagagagctttattcaagacgcttttccgggttgcttcaattaatgccctactacaagggagatgcccctgacgtatgttccgtcttcgggaattctttccagttctataattatattttgcagtccagggaaagaatcaggcagttggagggcgattattttcttatcatcggagacgatcttcttttaaatcccaggtttgacgaattttcaacgccgtccctgctgggaatccatggggaggatacgtgttaccttgacggttttgtggacgtttctctgccggtgtgttaccggggaacggcggaagcccaccatttttccataacccctcccggtattgatgcggaaagcgtcaacaggaacgttccgtcctatgaggaggccaggcggattttaaaatccaggaacctcatgcggcatgatgaattgtcgcgcgtacgcatgtttctgcccaaatggagccccggggggattcatgcgaattggaaagtgttgaagggcagggtatggcatctgctgaattactggaagcaccggattaaaaaataccggtattcctatcctgtcgttttcggatattcggacattgtctgcattccgaaagggaaattagacgatttctgccgtatccttgaagtgttctccgcatggaacatgtttgtggagctggccattcccacggcgttgcagcttcttcccggaacaaagctgtctacgctggaggacacgcagtacaagtcgggaaacgtctggtttccccaggatccggaacactttgaagccatgaatgccgtcattgacgggctcgtgtcctcttccggaggagacctcggcaagctgcttgcctcctttccggaggaatacctgtatctccatcccgtgaaattgtcccgtttcgccagatagtggcgtccataaattgtttttttatcccatgatgaaatatgctgtgatcggagccggggtttccggattgtccatggccggaatgttgctgaagaaagggcatgaggtagtcgtttatgagagggactcccggcccggcggcctgattaaatgcacggaagtacaggggaacctgtatcatcgtgtgggaggccatgtgttcaattcccggcggcaggaagtgctggactggttttggtcccggtttgacagggagcgcgattttgtttccgcccggagacgggctgttatttccctggagggcggggctgtggtggattatcccattgagaaccacctcgaccagtttcccgaggccgtccgttcctccatcgtccatgagctgctggaactttacaggaatcctcccgcggagccccgctccctgggtgagttttttctgaaccgtttcggaaaaaccctgaacagcctttatttcacgccgtacaataacaaagtgtggaggcaggatatcagccaaattgccatggattggctggaagacaagcttcccatgccgagcgtggcggaaatcctgttgaacaatattgggcacatcaatgaaagcgccatggtgcacagttctttcttttatgcgaaaaacggcggttcccagtttctggcggatacgctggctcgcggcctcaaggtcaggtatcggcaggaagctgtaaatatcctcccgaaggacgggaaatggctcgtacagggagaattgtttgacagagttgtctttacggggaatgtcaggcagcttggggattgttttccctgcatggatgaattgcgcccgtttttcccccggatttcagaattgcgctttcacggaaccacttccgtgctttgccggatttcccccaatgattacagctggatttacatgccctctccatcccaccgttctcaccggatcatttgcacggggaatttttccagaaataataataacggggacatcaccaccgcgactattgaattttccgagcaaatgacggaaggggaaatcaggcgccagctggagcttattcccttttcccctgtgtatctggcccatcactgggaagaatatacctatcccgttcaggatgtttccagccgaaccctcatacgggaactaaaggagtgcctggaaccgaaaggcatttatttattaggccgttttgcggagtgggaatactacaatatggatgcggccatgggggcggcccttgatttggataaaaggctggctgcggagcagatgacacggggataagtcaaattctggacattgtggtgtatttgaacgggggattgtaaatccgcctgtttcaatggaaaactttaacggagaatcatctccgtgcatggaaccacggattgaaacaggatttttttaattaccaaaaaaccattcaacacgataagttatttatagttatttctttataactatatccaaacttttttaaaaacaggcggatttacaactcgttataggtgcggacgcagaagatgtgttcccgtttttagggacatggtttccaccagaatctgggagtatggctatccgttattgttctttcgcgacccgcggctatcatttgcggcaatggatgcagatgatgagcctgaggctggcggattcctcagtggagttgtcctgttggaatcttaatcgcctggaaagggaaggaatcagggaggctattccatggtttgacccgaatttacagggtgccgggttttgggtatggaaacccttcatcattctcaaggagctggaacatttggaggaaggggattacctgctttatacggatgcggggcgcccgccggggaggcttttccatcattccttggagccgtttgtccaatggctccgggagaaggggcaggatatgatgccgggcgtgaatatttcctattatacgggaggccttacgcggtggtgcaagcagagcgtttttgatgaattgaagctggatagcgggtcttttgaacaggctcccctgattcagggctccttccttttcttgaaaaaatcggaacaaagcctccgaattctccgtgaatggatggatttgtgccgtcagttcaaattggtgtcttctgccactacggaagaagagagccgttgccgcgataattttgtagctcatacgcacgatcagacgctgctgtctctcgtggcggcgcaacatcatctggactgcctgtattccgggaagggcgtcattcatctggaaggccgccgggcgtttgagcggcatcccggttttgacgacaaagacccggactggtttttggaagagcttggcgcaaagaaagcggagcatcccttaatgcccgtgctttgctgcatgcaacaggcgtttttcctgtatgaaaaagccatgaataaattgatgaagctggcgggcttgagacccctccgcgggttttacggttgatggacggttgtgtgcggaaggggagtttgcctgtttcggcctccgtgacggatttctccggcctgctatggacgaaaataaaaaagcgccggaaaaaccggcgcttggaaaggtagtttcccgtgtggcttttaccaggaagcgtcgaatttggggataggcgttcctttgcctccggggctgttttccggaactttataggttttgcgcagttcgtggtaacgcttcttgagctgttccaccgtagtcttgtaggcaggatcgtcaatgacgtttttcatttgcatgggatcctttttcatgtcaaagagcatccattcgccgctgatccagatgtaggaaagcgtgtagcggtccgtccggatgccgtcgtggcgcggggcgttgtgttcgccgggattttcgtaaaaacagtagtaaatggcatccctccagttgtcgggagttttgcccgtgaaagcggtgggaagcagggatacgccctggaaggtattcatgttttccggggtgtccgcccctgccgcagaaacgatggtgggagcgtagtcgatattctgcaccatggtgttgttgcggatgcccgcgggaattttgccgggccatctcatgatgaggggcatgcggagggattcttcaaaaatccagcgcttgtcgtacatgccgtgttctcccatgtagaacccctggtctccgcagtagatgaccagcgtgtctttcgcaatcccctctttgtccagatattccataaggcggccgatgctgtcgtccacggacagaaggcatcccagataatcctccatgtaggcatgccacttccattccgcaaacgctttcgggtccttcagttttccggatttcatgccgtccaccagggatttggtgcgcttggcgtaatagtccgtccaggttttcttttcttccggagtcatgcggttcaactcgcccaggtcccagccgtaaccgggggaaacgatgcttttgcgcatttcttccggaacctggtccttaagcactttgaggtcggaataaatcgccatgtgattggcgactgtctgctggtttttcttcaggaattccggacggttggcatagtcgtcatggaagttggcgggcggcgtcatgctggaagtgtccaccttgcccaggtggcgcagagcaggacaccaggcgcggtggggggccttgtggcccacaacgagcaggaaaggtttgttcttgtcccggttttccagccactggatggatttgtccgtgaccacgtccgtggcatatccgggaaaacgctttgtctggcgtttgccgtccggcttgaggctgataaagtccggattgtagtagctgccctggccggggaagatttcccacgtgtcgaacccggtggggtccgattccaggtgccatttgccgaaaaggcccgtctggtatccggccttctgcagcattttcgggtaagtgggctgggagccgtccagcggtctttgtccgttgaagacaaagccgttcatgtgggaatgcctgccggtcaggatgcaggcgcgggaggggccgcacagggagttggcgcagtagctgcggtcaaaaaccatgccttggcgtcccagtttgttgaaattgggcagggccacgggggaatcattattgccggtgcccagcgtctggtaggcgtggtcgtccgtaatgataaagaggatattcggttttttattttcctcagccttggtttgagctgagagaggagctgccgccagcagggccagagttccggcgatgatggttttcaaaggtctcatattgcctggaggatataggatgacggcgccgtgtcaatgtcataggattccttttgccgggattctgcgttatggtattcttgccccatgctttcctctgctctggaagacacgctgcgtttgttcggcaaggaacggttccgtcccatgcagagggagcttgtggagtgtgcgctggagggccgttcctgcatcggtattttgcctacgggttccggcaagagcctttgctatcagattccggcggttctgggaaatgggctgacggttgtggtttctccgttgattgccctgatgcgcgaccaggtggcagggctggaaaaactgggcgtggccgccgccaggtatgattcgaccctggcggaagaagataaggtcgccctgatggacagattgaagtccggaggcgtccgccttctgtttgccgctccggagtctctggaatccccgtggattcagcaggttatggagcttgttccccccggcttgttcgtggtggatgaggctcattgcctttcggaatgggggcacagtttccgtccggattatctggggctgcccgtttttttcagaaagcacgggttccgcagcgtcatggcgttgacggccacggctacggagcgggtgtgccgcgatctggccggcctgtttggcgtgagcgatgaatgtattttccgggctgcgccgtaccgtgcgaatatcttccgccaggtggaaacgttgaaggatcaggataaaaccgcgcggctggttgaattgttgaaagagggaggccgccgtcctgccgtggtgtacacgcggacccgcaaagatgcggaaaacctttcctacgaattgggaaaagccggtttctccgtcaagtcctaccatgcgggcatgcccccggagacgagggggctggttcaggatgagtttctggcaggtacggcggacgtgctggtggcgacgattgccttcggcatggggattgacaagccggacgtgcgttccgtggtgcattaccatccccccgccagtctggaggcgtatgttcaggaatccggccgtgcgggacgcgacggccttccttccttcagcctggtgatgttgtccgcccgcgacagcgtggccgtagtcaaccggctgcatgcggcggagccggaccggcacggcatgaaagggctggtatccctgttgtcccgcaggggggagcacattgtttccctgtatgaggcttcctccgtttatgatttgccggatgtggcggtggatcggatgctgtttgacctgaaacgttccggttccgtacgggagaaggggacggggttcaagtattacagggtgcgccctctgttccggatggaggaaattctgtgcggccgcggcggggaggaatgcgcccggctgcaatggatggatatgcgccggcagggagaggtggaggatctggctgtggaatggggaatttcatgggaagaagccgccgcctggcttggtgacctggctctttccggggaatggaaagtggagctgcgccaggcagcccttcatctgtattcggaaggatttgacgcggaagaggctgcggaggaatttgagcagtatttttccagatcccggctgaacgggctgaaacgctggaaaacctgcgtttctacgctgacgtcttccgcctgcctgaatagaagcctggatgcctatttcggtttccgggacctgtccgggccttgcgggcattgtcctgcgtgctgtgggatgttgcctgcggccatggaagaagaggaacttcccccgttaccggaagagctgcgctccgccgtcatggagctggcggggcagaggaagcccgcgctggcccgcccttcccagttggcgcgctttttgctgggactggcttctcccgcggccatgcgcgcccggttgtggagccatcctctctatggggcgctggcggacaggaaatgggaggatgtgtggattgaggcgcatgccctgtcgggtagttagaggccggtttttccgccttgggcggcttcataggcggcaataatgcgtttgcaggaattttccgcatgcagcagggaacaccaatagcgggatatttcctccgggttgcgttttccggagtcccaggcgcggatttcttccaaaagtgccccggagaggctttccggagaatcgttcgggctgagtgtgcctgaatcatgggaaacgtaccattgcaggcagttcagctggggtgtgaggcgaggccctacgacagaggccccggcgcacagcgcttctgcggaggcaaggtgcgttccttcggacaaggaggtgcagagactgattctggcctgggattgtttcttttgcagttcaatattgggaatatagccagccagatgaatccgggtgcgaagaggctccggaagattgccgtgccattcccggagaaagtcaggaatattgccgtaaatttccgcttcccagtgcggggcgtgggcaagcgcctgttccagcgtggacatcagcaggcaggggcgtttatagagaaggtcgtcccagcggcctacggccataatgatgttgcgcttctctcctgcaaagcggcaggtggaagaaatggggttgggaaccagagacagtttccggacgatggattttccatagagccattccctatctgcaacggattggagggctgccggaatggggaaggcgaccatgtcccctgagtccaaatgttttctgcgccccctgctggcgaggttccatgtgtgctgtttcagaaggcgcagcaggaaaaaagcggaacctttgattttcccgtgaatgaaaacgtctttggtgtacatgtttttcgcgatgggaagccagtattgccacggaaaaaacagcccggatgagtccatgtacactaccagaaagattcccgcgtcatggatggctctggcgatgggaaggtatttgcccactccccaggcgtacaggatcactccgtcaatacccagggatttccaccaggctgcatctttcaggttggcgtattccgtgcggatgaggtcgggatcatctccttcctgggcaggtgtgggcatgatggccctgctttccaccccgattctctgaaaggccttgcagaaagcgcctgaatcgcgggaaaagaaagtatggtctcccttgaaggacaccggcgtgcatgtgtaccatttcatgatgttggtggggtggaagatgaatggaaaacgcggagctcgccaagaagggcttccatggatcggagccatgcggcgggggagtatgtggaggacaaaagttgttgcccgtgcgcgcccatggccggccagcgttcttcttgcttcagggcggtgtgcagcgtctccgccagggattccacggaaggttcctgtgcaatccagccattcctgccgtgggtgatgagctccggcaggccgccgttcggggtaacgatgacgggcgtgccgtggagccatgattccaagacaaccataccgaaggtttcctcccagagggagggcgctacggagaggccgcaggcggcgcggacggctccttgttccttatggggaatgaacccggtcaggcggatggattcaagatggcgggaagagatataacgctccagttctccgcgcagggggccgtctcccatcaggtagagaatgcggccggggggggataggagttcccacgcctgaaccagttgcaggactcctttttcctgcgtcaggcgtccggcgtaaaggacgtcccggcggggcgggccggcggaaggggcggggttttgccggatgaaatgtggaataaccctgattttatcctccggtattccggtttggatgagaagttcccgctggcgccggctgatggcaatgtaggaggaaaagcggctccaggctcccatgcggcgcgttttatacaggacggcggcggccagggatgagtacgcggcgtttttcctccaacaggcgtgcatgatgccgggaaaatagttgccgccttggcaggaaaagcagggcgccccgtcccggtaaaatactccgttgaggcagccggagcggtaattgtgcatgtagtggatgacgggagcgggttgatgcagggccagttcatagacgcagggggacatggccgggaacgtattgtggatgatccatgcgtcatagcggttttcacgcaggcattcgcgcagtttttgctccacatccctgttgtggagcaaataacccattttcgtcagggcgccgtgggggctatggaacagctcctccgttgaatagacaaagggtgtgacatccgctatggcacccaaagcctccgtaatggcatggaagcagatttcttcccccccaacctcgccgtaacggctgaaaatatgtagaatgcgtgggcgttgcatggctgcggcggcacagggggttatccctggagttcccttctgagtttcgcgggatccttcaatagctcccgctgaatggcttcctgctgctggcgcagacggtcttcccgtaactgaagggattttttcccggctcccagcccggcattgacaaagggattgttgtccccgtatttggaccacgggccgcggggaatgcggtaaaattccacaaagcgccagtggacaatggctgttcctcccgtaatgcccagatagtcgcgtacggcaggggagatgtcaatgcccgcccctttgttctgggtattgacgggaggcttgtctccaaagacgtagggccagtcttccgtggtgaaggggccgcagtcttcccattgggcaaaacaggaacgcttgttgtagacgatttgcacccatctgcccttgcagacggattgcccctttcccgcatattcgcggcggaaccacgggatgacccgtgacgcctccgccttatgctcccctctggaaacgtcattataagggagcgccacgtaaaaggggttttgccgggggatgaatgttttcgggcggaagtccctcgtgcggcaaacgggatccgggttgtcgaagccgccgaagttttcccgccatgcggaatcccacgaacttttgtggttggctaccggattgcgttccgtgggttcttcccccacccagaagaccgtggcggtaatgttgagacgccagggataggtgccggggctttgcctggacgtcctgggaaggatgcggggagcgggccgctttcctccctctgcagcaacaggcgatttgacgatgacccggggcaggggggcccgttgcgttggggtgacgatgacggggcctttgggccgtccggaactgttcgccagggcgcgggtggcgctccggcctgtatggatgtccgccctggcggtttctgcggaaaccagaaccggcagcgtgagcaggcatgcggacaggagggggctcccgaagagccccttccgtaatgcctgttgacgctgccggtagtttaccatcggtgcagttgggtgacgaagcggtgatccagtttgccgggataatccgtattgaaatgaaggccgcggctttcattgcggcgcatggcgcagtccacgatcagggaggccaccgccaccaggttgcgcaattccagaatgtccggcgtaatgcggtatccccagtagaagtcctttacctcccggtgcagcatccggagccgcgtggctgcgcggtccagccttttattggttcgcacaatggagacgtaatcccacatcaggcggcggatttcatcccaattatgatagatgacggaaagttcgtcaggcagggctgtatctccgtggtgccaggctgggatgtcgtaaggagtgggggaatcctttctcaggggatgcagggagagcatggagttcagcgccctcttggcgaccaccacgcattccagaagggagttggaagccagccggttggcgccgtgaagaccggtgcagccggtttcccctgcggcgtaaaggccgtccaggctggtctggccgttgacgtccgtcagcacgccgccgcactggaaatgcgctgcgggaacaacgggaataggttccctggcgggattgacgccgtagcggttgcatgtctcgtaaatcaggggaaaacgttcctggacgaacccttccggcttgtgggagatatccagataaacgcacatgctgcccgtcctcttcatttccgaatctacggcgcgggcggtgatgtcgcgcggggccagggatttgcgggggtcgtacttgtgcatgaattccttcccgtccgcgcctatcagcacaccgccttccccgcgcacggcttcggagatgaggaaggagcgcgcttccgcgccttccgcgcgggtgttgaagaaacaggtgggatggaactgcacgaattccatgttggcgatggtggcccccgcccgccaggccatggctacgccgtcccccgtggcggaatcattattggtagtgtacagatatacgcgcccgcagccgccggtggcgagcagcacgcggtctgaccggaagatttccacttccccggagactcggtccagcacgtaggctcccagaacgcggtcttccgtgacgaggcccagcttggtggtcgtaatcaggtcaatggcgaaatggtcttccagcagttcaatgttggggtgaagcttggccgcctccagaagtttggaggtaatttccagtccggttgcgtctttggcgtggaggatgcgccgtttggtgtggccgccctccctggccagttcataatcctctccctggttgccggggtcaaagttcactccccattccagcagttcccggatagcgtccgggccttcctccacgatagtgcgcacggcctgttcgttgcagaggcccgctccggcgtccagcgtatccgcaacatggtcttcaaaggaatcgttgcggtcccatacggcggcgatgccgccctgtgccttggcggaactgcaatccagaaatttgccttttgtaatgattgcaaccttgccgtgttccgccgctctcaaggcgaaactcaatccggcaacacctgccccaatgactaaaaagtcgctcgtcttcatcttgaatggtacggaattgtaccatgacgcgggctgccaagtcacgcccaatgatggggcggcagggcatatttgtctggaaaagaagtgtgaaacacgctaattcatgggcatgagaccccaagggaacgaacaggaagcgcgccggaacaagcatgtgcgcagcgcgccgtccaaaattgccgtgaaggcgctgggagaggaggtgctggacgggattctggacaaatcctccaaccctctgctgcttattctggactgcgtgcaggacccccacaacctgggagccatcctgcggacggcggacggcgcgggagtggatgccgtcatcgccccccgggacaaatccgtgggcattacggagacggtgctgcgcgtttccgtcggcgctgcggaaaaggtgccttttattcaggtaaccaatctggcgcgcaccatgaagcagctccagagccgcggcatctggatattcggcacgtcggacaaaggagaccgcggcctgtatgaaacggacttcacggggccggccgcactggtgatgggggcggaaggggaagggatgagaagattgacggaagagaactgcgatttcctgctgaggattcccatgaagggaagcattccgtgcctgaacgtatctgtggctacgggcgtatgcctgtatgaaatggtgcggcagcgttcctgattccatgactgtttttctccttccctcgtctttatgattcaggaacttgatcttgctccgggggaacgcgccaggtttatttcagacatccatttcggccatgccaaggcgctggcccgggagccggaagagctggggtttcttctggaggggtgctcccatctggtagtgtgcggggacctcagtgaaacccgtgaaagcccctgccgggaggaaggattggaaaaacggtcccgtttcctgcggatgtgccgggatgccggggtgcagcccgttctgctggccggcaaccatgatccggacgagaaagccggacttctgaaattgcagggcggccgcatctgcgctttgcacggccatgcgctgttcagggaggtggctccgtggggatgggaatatttgaaaaacaagcaggtttcccgcgaactgatcgccgcgttcccggaggcggaggcagatttgctgcggcggctggagctggcccgtgccatgagtgtgctggtgcctcctgtttacacgcgttccggaacacatcaaaataaactggtgcgttttttagctcattctgcctggccgccggaacggcccgtgcggattcttctggcatggctgacgatgatgcggcgcatggggaaatttgcagaccgtttttttccggaagcggaagtcgtcatttttggccatcttcaccgacgggcggtgagcgggaaaaaggggcggcggctgtacgtcaacctgggtgcctgtttccgccatgccagatgctgggcggcggacgtaacgccggaaagaggagtctccatccgcagttatacgcccggaggatatgatggcccggaggaaattctccgctgattgatgcccacggaaaaaaagtgaggggaacgcgtccgtgtttaggcgataatgtgttagagcaccggatgactagtccatacagtttgtggacgcgttccccatagaatttggccgcgcctgttttccctggtagccggcgggacagtttttcccggagcttttcagggcgcagccccggcagcagcaggggcgcgaggaggaaaaaaacctggagaagaagggctccattctggcgggtacgccgccggagcactttctttcaccgtttctttccgaattggggctgaccatgaagcaaagttagtgtaatctaactcatattgcaagaaaaaagtttgtctcgcctaatatttttcaagaagaggttgacttggtcagagccttggctattgttttttgttagttaaacctaataagcatcaatcatgatacatgaaaaattttccactccggagttgagcaacagcctggaggattatattgaagccgtccgcaacattgagttggaaaagggatgcgccaccgtaggggaaattgcggaagccctgaacgtgaaaaaaccttccgcctcactggccatgaagcagttgaaggaacgcggcctggtggaatacacgcagtattctcccattgtcctgaccagggaaggccgttattacgcggaccgggtcatttcctgccataccatggtgaaggagttcctcattacggtgctgaagatggaggaaaaacgcgccgatgaagtggcctgttgcattgaacatatcatgactctggaggaaatctcccgtttccagcttctgacggatcgttgcagggaaagaggagaataaaatactcccacatgattttccggggggacggttcatgagggaatggctcatccctctcttttttacttcggaacccggactgggggaaggcatcggcgtgtgctgcgcgcgctgacgtacactgtggaagcgttatggaggaacgcggaaagggccggggtaatcagcccgaacatgcccagcaggatcagagaggagttgaacccgatgataaagcggtagttacgttctattttttcaaggacggcacagctcaattcccttaaaacaaccagttcagccagagagctggacaacagggaaatatccgccacttcacgggcgatatcggaagaatccttcatggagacggaaacgtctgcacaggaaagagcgggggaatcgttgatgccgtctcccaccatgcacactgttttgccggatttcttcaattgctggataaagcgggccttatcttcaggcagaacctgggaacggtattccgtgatgcccaactggcggctgatggcgcgggctgcggattcgctgtcccccgtgagcatgatgatggaggaaatgccctgccgtttcaaccgggcgatcgtctctgcggcttccggcctgggcgggtcgctgacgccgatcatgccgattgctctgcggcctatggcgagaaagatgttggattttcctctggcgtgattgcgtatggtcagcctttgctcttccgtgagggggatgcgttcatcttcaaagagaaaatggtagctgcccacaagaaccttttttccatgaaggcgggaggaaatgccgtgggccacgatgtattccacctccgcgtgttcttcttcatggtgcagaccctcctccagcgctttgcgcacaacggcccgcgccacgctgtgggggaagtgttcttccaggcatgctgccgttttcaggatatattccctgctgcagtcgctcaaagggatgatctgcgttacctgagggcaggcggaagtcagcgtccccgtcttgtcaaaaacgatggtgtccgttttggcgaacagctccatgaatttcccgcccttgatcatgatcttgcgcgctgcggcctctttcatggcggagatgacggagatgggggtggcgagcttgatggcgcaggaataatccaccatcagcacggagagagccttggagatattcctggtgaacagaaacagcgcccctgccgtgagcagggtatagggaacgatagaatccgccagcttttccgcccggctttggatgcgcgctttcagttcctccgaatggtcgatcagggcgatgatattgttaatgcgggactggtctcctgcggcgtccacccggatgacgagggaacccgtttccagcgtggttccggcaaagacgacggacccttcccgtttggaagccgcttccgattcccccgtcatggcggcctggttgacttccgcttctccggacagcacggtaccgtccacagggatgacgttccccgcgtccacgcggattttctcccccgggcggatttgctccatgggaacctggcgcatgcctccctcttccacccgccagacgcggtctatatttatgctcaggctggccgcaagcgccgcccgggtctttttccgagtgtaattttccagcaggtctgaaatggaaagaaggaacatgatggaattggccgttccgtaagccttcgtgcctatggaaaccccgatggagacggcgtccagaacggctacgttgagccgtccgcttcccaggccggccattccgcgccgtaaataggaactgtaattccagaatactttggccattctgagcgggggcggcagaaacaccttgcaaaacaggaaagaggaagctttccccgctatgcggagaaaaaaggaccgggccagtttcctggcctccgcgcgctcttccggttcgtggctgcggagtgtttccggcctgagcctgtccagcgtgcggaaaatggcctgggggctggttccttcatacaggatgaacacacctccgttgcagggggtggccttgacggagtatacgcctttctgtttcaggagcctgcattcgatgccgtaagcctggtcatgattgaatgcgcagcggccgctgcgtacacggagcctgccgggcgtatgatggataacctggtaatgcatggataaggaaaaagaaaagggggaaacgcccttctccgtgcgtttcccccgttgggggcggtccattccgctggcggagaaggaaacgggcaccccgctgtttggtgatggacaatgagattgctactgttccggcctgctgtttttcgcggcggcctcatggcacaggtcttgggcttcttcccggatgtttgccagttgttccatggccttctgctggatgagcatggccttggaaaggccctggacggccaatttcctggcaacgggactttttactactttcgcgccgatggcggcggcgatcattcctccgacgaagccccagaggcctttgttgttcatgtaactcatggtaatgttttaattgggttcatccggctttggcggcatgcagccgcttcttttccggaaggattggattatatccaatccagcctgcatttttttagcgtgcccccgtattctggtcaagctgaattagctgaaactaatttttttagtaggcatgaaaatatttttgcgatatttttaatacgttgaaaacaaataaaatataatgaaccaacataatgttgtactgagcagggcaagggcattgggaagaaaaagtgttgactgaatagttagttcaatctaactttgccgcgttgcatgaacttgacccatacaggacttcaccgtttcttccgccgggtctgccggtacaggaaactggccgggctgctcatccggcgtcccagataccgtctgctctgcggagactgtgggttctgtatgggggcatgcggcagagctgtgaaagagcaagcccgggagaacggaagcggagctctttccctgtaaaaggaaagcgcccctctccacctctggatcaatcatataagtattataccacaaacatccaacgataagactaaccgttttctatgaagaagcataacataatagcaatggcgttgacgagcctcatggcgcttcctgtaatcgctcaagacagcacccctgctgttggtgatattttgcagggcatcaatatgttcactccggaagaaggcgatcctgcctacaaggtgaaggccaatgagaaatacggcacccaatggggtgtggatatggcctacggactttggaatacggaaaaggtttccgatgttaagcgccataacaacctggctcttcttcatgcccagcttaatcagcgccttattgaagacaaggccaacgggggaacctggttgcgtgtggaattttccggttcatgggggctggatcgtgaatccgcacagagcgatacgtttttcactgaagcctatgccacggcttccggcttgcatgctgacgcgatggggcctcatgaaggaatattccctgaagtggcgctgatgcaatactttgcagggaagcgcgcttgcctcatcgcaggtatggtgaatcttaccaactactttgatgctgtcagcattgccaatgactccttctcctctttcaccaatgacgggtttgtgaactccactatccttcctttggtggacagcaatattggcggtattctgcaagttgaactcaaccgcaataattacatgatggttgccgtttcccgcacgggatgcgattccggctacaatccttttaattccgattattgtgatggttatgccgtggttggcgaatacggccatatctttgccgacggcgctgcgactctccgtatcaatccgttttataccagcacggatgtggacatggacgacgggaccggggaacgccgccgccaaaatgccgggcttgtcgcgagcatcgaatatactccctgcgatcctctgaccatttactctcgcgccggatttgccgccaaacaatacttgagcaactccgctgaattctccgtgggcgccaacattaagctcttcccttcccgtgaagatgacttcctgggcatttcctacggtgtgttcaaggggcagaccccctgtgacggagagcgcgctgagcataaccgcgaacaggtgctggaagtcatgtacagcttccaggtgaatgattatttcaaagttgttcctcacttccagtacatcgcgaatccggcttacagcacttccagcgaaaacattctctggggcgttcaggcagtcttttctttctgatcagctggtcctggacatggccgccttttctcttaaatcaggcatggccggagtttcatgaaaacataatgacattaaatcttccttgtctgtctccatgcagtgagcggaatcctgcgtgagaaagatatagaaggggtctgcatgacctggcggcaacgccgcattctcgatcaggtagaggatgcggcgttgcttatttgattacggagccatttaccctcctttattgatgtctgctggcggagcttggatcggcaatgtatgccgggtcatggaatggccttcagcctttccttatctaccgtcaaatactgactgttgaaggtaggaggcttccccaaggctattccgtagaatttttatcccggggaaaaataaaagccgcctgaaaatgggctttcccgcctttggctccgttcccggaaaaaacggaaaagaaggctttttgccacgccggaagatggatgggagccgcaacgtttccgggggccgaagcgtttaaaaccatattgacttaaacgggaattatcttaaactgacagaatgagtaaggttcaatgggaaatttcaaatgatgaagtgaccgaccgtgatactgctctgcgccgcttgcaggaaggaacgaccggccacgtggtgtgcgcccgcgacggcgcgtgcctccagtcttataaggaagcggatggcgtgtaccattgcgaaattgtattcaagacggattcctgctgcccgccggtattcgccgccccggaaggggtgacgggaaaggagctggaaatgctttacgatcgttttgccaatggggacgatttttcctttgtggaaaaggaatgggaacctctgatggccgtggaataccgccatcgccacaatgtgatgtggttcatcttcctgttcattgcgctggtaattgcggccatggcggcatatcagcacggttggattgagtgagaggggagaggctgtctgtggcatgcgccgtagcagaaaaacctgcaaaccgcagaaaatggtttgcaggttctggatgggataaccggggccgggatttaatcctgtttttcgtggtcgtgatggtggccgccgcagcaatttccgccgtcaccgcaacagccgtcgctgtcgttgccgcaacatccgcagttgccgcagcacttgccgcgcttgctgaaaattttgtataacgcgtaggccaaggccaggaaaagaagggtggcgatgatatatgttcccatattggtcagtagagttaaggagttggtttagaagttatttggaggctgtataaggtttctttgccaccaggtaaacgaaccccagcaggagcaatagggcaatgccctgcccaatgccgaaggaagcttccgcataaagccatgctcccagctggtaaatcaggaaggccaggcagtacgccagggcgcacatgtagccgatggcgaagaaggtccatttggcgctgttcatttcccttctgatagcgcccatggccgcgaagcagggggcgcagagaagattgaaaatcatgaaggagaaagcgctcaggaaggtgaaggctcccgcttggaccaggcggtccccggtttccctgatttccgcatcttcatcttcctcttcttccgcttcagcagcggattctccggaaccttcctccagggatgcctggagctcccggccagcggtggacatttcctgcgtttcgggggaggcctccgttttttccgcttcatcttccccggaactgccgtccgcatacaggacgccgaaggtgcctaccacgttttccttggcaatcaatccggtaatggtagccatggtgggtttccattcaccccagcccagaggctggaagacaggcgcggccacattgccgatggaggccagcatgctgtcattctgctctacggaatccaccttccagttatagctggagaggaaccagatcagggcgctggacacaaagatgacggtcccggctttttgcacgaaagccttgcagcgatcccatgcatgaatgatgacgttcttccaggccgggatgtggtaaatgggaagttccatgacgaagggagtggggtccccggcgaacatggcagtctttttcagaataaggccggaaaggatgatggcgcccaccccgatgaaataggctcccggagccacccaggaattttccgggaagaaggctccggcaatcagggcaatgatgggagttttggccccgcaggggatgaacgtggtggtcatgatagtcatgcgcctgtccttttcgttctcaatggtgcgggtcgccatgactccaggaacgccgcaccccatggaaacgagcatgggaataaaggatttcccggaaaggccgaatttgcggaaaatgcggtccatgatgaacgctacgcgggccatgtagccgcaatcctccaatatgcccaggcacaggaacagaaccgccatttgcgggaggaagcccagaacggctcccacgccggcaatcacgccgtcctggatcaggctttccagccatggggcgcagccggcgttttccagcaggcttcctacccattccggaacccattccccgaagaaagtatcattggcccagtctgtgccccatgcgcctatcgtctgaatggagatgtaatatacagcccacatgacgacggcaaaaatggggaggcccagccagcggttggtgatgatgcgatcaatcctgtcgctgcccgtcaggctgccggggctggctttaacgacggcgtctttgatgatgcgggaaatggaattatagcgttcattggtgataatggattcactatcgtcatccatttcccgttccatggtttcaataatcccgttgatgcgggattgttcctcgggattgagcgcgagctggtccgcgactttctggtctctttcgaaaactttaacggcaaaccattttttctgctgatccaggcatttgccggtgatgatttccccaatttctccgatggctttttccagatggtccggaaagtggacggcctgcggggtccgggcgtcgtccgacgcagtcgtcgttactacggcgtctatcagttcacggatgccggtccccttgagagcgctgatttccagcacctggcaaccgaggttgcgtgcaagtttttccgtgtcgatcctgtcgccgcgcttccggacaatgtccatcatgttcagcgctataatgacgggaacgcccagttcgcaaagctgggtggtgaggtaaagattgcgttccaggttgctgccgtcaaccaggttcaggatgagggagggatggtccgtgaccaggtaattccggctgacgacttcctccagggtatagggggaaagggaataaatgcccggaaggtcttcaatgatgatatttttatggcctttcaggcggccttcctttttttccacggtgacgccgggccagttcccgacgtattggttggcgcctgtcagggcgttaaagagcgtggttttcccgcagttggggttgcccgccagggcgatggtaatgttgctcatgaatggtttccttgtcttgatatatgggtgcccgtcttgctgtaaagtcaggaaacgtgcggtaatagaggcggaatcaatggatatggatgttctccgcttccgatttgcgaatggagagttcgtacccgcggacagtaacttcaatgggatctcccagaggggcgactttgcggatgaatatctgcgttcccttggtaacccccatgtccatgatgcgtcttctgaccgggccttcccccgccagtttgccgacggtgacggtttccccgatgagggcatctttcaatgtacgatgtttggtcatagaataatggttggttgttggatggaataactcaggcaacgaatattttgctggcaagcgccttgctgagcgcaatcctggagcctttgacgttgataatgaaattaccgccgttttcggaaacgatggagaccgtgctcccggcaacgaagcccaggctttccagaaaacgccgggtttcatccttgccatggattttgttgacttggcgaatatcgccgatgttgagcatggagagtggcatggtgcgtgtatgaatcaaatccggaaagaagttagttttatcaaactgataagtcaatgatattattaggctatatttgttcaatcaatgtaaaatacatttaatataaattgtttatgtattagtttaatctaagtgtagccgacagggaagaggaagggaatggaagtttcccggcagtgcctgccgtaggaactggaaggaaaatgcaaaaaagccgcgccaatgaatgttcattggcgcggctggaaaaagagcttttcttcagattcaggaggcagggcaaacttcgccctggacgggtttgccgttgtattctccggtaagcgtcttcaggaaagccaccagaaatctcacttccttcttgtccagtttatcgtaaccgagctggtaatggtacattttcgtaatggcttcctccagcgtctgtgcggaggcgtcatgcatgtacggccaggtgagttccacattgcgaagggtcggaacacggaagcggtgcctgtccgattcctttttggagaaattcatcaggccgttatcgtcgttggtcttggcgcgtccggcaaagaaatcgcctttgaggtcggcgtattcaaaggactggcctcccatggcgggaccggtgtggcaggtctggcaaccaagcttcaggaaaagcttgtaaccttttttggcgttctcgctgatggcgttttcatcccctttcaggtagcggtcaaacgggctgttcggcgtgataagagttttttcatattccgcgatggcattcgtgatggtctctccggtgaatccctgggggtaaacctttttgaattctgcggcaaaagcggtgtcctggtccagtttggcagcgatcttcttccagtcatccggatgttcgtaccccatttccaccggattcaggggcggtccgccggcctgttcctggaggttggctgcgcgtccgtcccaaaattgcttggcatggaaagcggcattgaaaacggtgggggcattgatgccgcctttctggccgcggactccggtggaagtgggcaggttgtccgtcccggctttttccagggaatggcaggaagcgcaggaaacggtattgtccgtggaaaggcgcacgtcatgaaaaagcttgtagcccagggccactttggccggatccgtggggagggcgtccggaatgggggcaagaggggaaagggcgtattcctctcctaccatatcgccgaaaattttcaggcgctcatccttgatccactggagcatggcgtttttctcccggagagtgagcgtactgccccagtgcaccatggtgtaggaagtggggggcatggaattgatttgaagcacatgttccagcttggaaagggtgacggcagtgggaggttcttccatattgtagctgcgctgcccgtccctgatatggcgcgccagcaggcctccggaaagagtattgaccagttcggaaatgtgagtgccgggcttgtggcagtccgcacatttggaattcatggtctgtgcggtaatttccgccgcctgggcggacgtcagtggcttgacattctggttcggcaggaacaggggggcgacagccgccgtcacgatgaccgtgccgcccagaatggctcctgccttgatgaaggaacatgttttgctcatgagattctcaatgacgtggaattgcccggatggtaaaaggggaaggataaaaaatcaagatttattctaaagttcgccggcctttctcaggtcttcgttaatggcttccagaacatccgcttccggggtgaaattggcggcatggtaggagctgcggaccaacggcccggatgccacgtgcctgaagcctttggagcgtgcaacttcctcataccgggcgaaatcatccggatggacgtatttgaccaccggaagatggttgcgggaggggcgcaggtattgccccaacgtcaggaccgtgacgccgtgctccagcaaatcgtccatggagcggaaaagctcttcttccgtttcccccaggcccagcatgatgccgctcttggtagacactttgccgtccacgcactccagagccatccggagaacgcgcagggactgacggtactgggcgcggaagcggacaatgggcgtgaggcgttccaccgtctccagattgtgtccgaaaatatgcggacgggccgccatgagcgtctggatggaggagggcttctcattcaagtccgaggcaagcacttcaatgatcgtggaagggctggcttttctgacggccctaattacctgggcgaaatgcgcggcagcgccgtccggcaaatcatcccgggtgaccatggtaatcacggcgtggcgcagcttcatgtgcacgacggcttccgccacgtgctgcggttcttcaggatccagcgggccgggcttggccgtgcgggtggcgcagaatccgcaggcgcgcgtgcaccgttctccggcaatcatgaacgtggccgtaccctggttccaacattcataacggttggggcagtgtgcttcttcacagacggtgaagaggtttttgccttccacaagctgcttgacgtcccagaattcccggccgttgggcagacgaaccttgatccacgacggtttgcgttccgttccttccgcagtctcattgtcgttccagcgttccatagtcccgctagcttgccgtgactctgctgctttggcaaatgcaaagtgttttattccggacttcattccccgttttcatccggaggggaagaaagacgcgcagacaattttttccgttcttttgccgccagacgcgccgcacggaaaaactcctggagatgaagcaggcactcgtctcccagtacgccgggacgcacctcgcacttatggttcaggggcggattggaatccagcagattgatccagccccccgcagccccggtttttgcatccgggcagccgaaaacgacgcggtccggacggcagtggacgatagctcctgcgcacatggggcacggctccttggtgacatacagggtgcagccttccagcctccagtcgcccaaagcctcctgtgccgccgtcagggcaatcatctccgcatgggccgtagcatccttgagcgtctccacctggttccagccccggccgatcacgcggccatccttcaccacaatggctccaacaggcacttcccctttcacgagggcctttctggattctttcatggcttggcgcatgaaccattcgtccgaaccgggcatttccatcattacggaggttatcatggatcgggcggcgcggttctggcaagctctttctggaagattcttattgtgttttatacggtaagtgcgccatgccgcggaaaggggtggggatgaatgcgtttttacgttgattccggagaatgggtggcataagtatggactatgagcttttcagaaccctgtgccttggccgttgatttcggcggcacgagcatcaaaatgggcgtaacggcgggggatcgtattctggcgacggccgaccgcatccctactgccatgttcgaaagcccgcaggcaatcattgatgccatgattgcgtccgcccgcaccctgcgcggacaattcccctccgcctgtgtgatgggcatgggaatgccgggatggtgtgattaccagcggggagtgctttaccagcttaccaatgtgagggtctgggatagggaaattccggtgaaagagatgatggagcaggccctgggcctccccgtcgtgctggataatgacgccaactgcatggcttatgcggaatggaagcttggcgccgggcgcggcatgtccagcctggtgtgcctgacgatgggaacggggataggcgggggaatcgtggtgcatgaccgcatgctgcggggaaggcggctttccgctgcggaactgggccagaccagcattcattaccaggggaaaacgggaccgttcggcagccggggagccattgaggaatacatcggcaacaacgaactggcggcggaggcggttaaacggtatgccggggcgggaatcatcaagacggtggatgaatgcacgcccaggcatctggacgaggctgcccggtccggatgtcctatagcccttcaattatgggaagatacggcggaaatgctgggctgcctgatcatgaacctgatgtatacgctggtgccggacgccttcatcatcgggggcggtgtggccaaggcaggggatttgttgatgaagccgctgctggagaacctcaggaaacagttgtttcctctcctgatggaggatttgaaaattctgcctgccagatttggagcggaggcggggttgctgggagcgggagccatggcgatggatgaattcatggggatggggattttggaacggtttaaggatcagaaatcaacgcagactttttgttagtttgggctaatatagggcttgccatgccggagaggcaggcgtacaagcgggacaggtcatgagcacggaacattcccacgaacattttccggaaggtgcttcctgttgttccggaagctgcggttctggaagctgttgctgctccggagacgccatcgggcctgttcccgccgtgctgggcattgccctgttcatcagtgcgctggcggcgggcggcgattccctggccggtatggccgcctacgtgggctcctacctgctgataggctgggatgtactgaaggccgcctttctggggatgatgcgcggccgcgccatcaatgaaaattttctgatgagtattgcttccctgggggcgatgttcctgggggattattccgaggcggtgggggtgatgctgttctaccgcgtgggagagtaccttcaggaacgtgcggtgggcagctcccgccgatccgtaagcgaactgatgagtctgaggcctgaggccgtccatgtgaaaaaagccggagccgtagatgacgttcctccttccgaggttctgcccggctccctgattgaagtgcgccccggcgaacgcgttctgttggacggtgtggtaacgggaggtttctccgtgctggatacctccgccatgaccggggaatccctgccggtggaagccggatccggaagccccgtgctggcggggtacatcaacgggcagggtgtgctggaagtgcgtacggagcgggactggcggcattccgccctggcgcgggtccaggaacaggtggaagccgcatcaggccgcaaatcccctctggaggggaggctgtcctcattttcccgcatttatacgccgctggtgatttccatagccgctctggtatttttgctttatccccttgtgacgggcggaagctgggcggacggtctgttccgcgccctggtcctgctggtgatttcctgcccctgcgcgctggtactgtccatcccgctgggcttttttgccggaatagggagagcggcgcggcaggggattttgctgaaagggagcaactatctggatgccctgcggaaggtgaagacggtggtgtttgacaaaaccggaaccttgacggaaggcgttttttccgtggatgaagtgcttcctcgtgacggcgtttccccggaggaactgctgtactgggcggcccatgcggaactctctgcctcccatccgctggggcgttccattgtgaaggcatatgaagggactctgtttccggaccgcgtggcggaactagtagaggtgacgggcggaggcgtttcagcccgcgtggaagggagaccggttctggtggggaaaaagtcttttcttcaagaggccggcgtaaggacggaggagggagaagaccatggcgtgaccgtttatgcggcgttggacggcatacttctgggatgcctccgcctgtctgaccgcgtcaagccgggagcggagcgtgcggtgcggaaattgagggaactgggcgtttccaacctggtcatgctgacgggggattcttcttccgccggaacggaagtggggcttaagctggggatggacgaggtattctgcgggctgatgcctgccggcaagctggagcatgtgcgccggctgaaacctgaaacggggctgcttgcctttgtgggggacggtatgaatgacgccccttccctcgctgctgccgacatcggcattgccatgggcggcgtagggtccgatacggctcttcaggcggctgacgtagtggtgatgaagggagatcctttggccgttccgctggggatgatgctttcccaagccacagagcgcatcattgtgcagaacatcgttcttattttgggcgtcaaaattctggtcatggtgctgggtattctggggctggcggggatgtgggccgccgtgatggcggatgtgggcgtctgcctgcttgcggtgggcaactccatgcgtattttccgggtgaagctggacatgtgacgaaagggaactctcttcctccccctgtttatgggaggatgcccccatcccgatatccggatgctgccgcggaatcttggaacagcggaagatatcctgataaaaaagcctccgttccggcgggcggaacggaggacgggggaaaaacaggccgggcagaaaatcttaccgcagccccgtcagcagaagttccgcgttattctgtgtcttggagatattttgcaggagagcctgaaggccttcccatcccggtttcatggcgagctggcggcgcaattgcatgattttgacgaattcctgttcgttatacagcctgtcgtcattgcgggtgccgctctgggaaagggaaatggccggataaatgcgccgttcggaaagttcccggtccaggcggatttccagattgcccgttcccttgaattcttcaaaaatcacttcgtccattcttgattccgtgtctaccaggcatgtggcgatgatggtcaggctgcctccttcttccacattgcgcgccgcggaaaagaatttgcgcggtttttccaatgcattgaatcccaggccgccggacatgatgcgtcctcccgtctggttggcattgtagccgcgggccagcctggtgagggaatccagcaggatgacgacgtctctgcccatttccaccaggcgtttggcccgttcgataaccagatcggaaacctgggcatggcgccgggaaggttcatcaaaagtggaggcgaataccggagcatccacggtttcttcaaaatccgttacttcctccggacgttcgtccagcaacagcacaatcagttccacttccggataattggccctgatggaacgggcgattgttttcagaagaacggtttttcctccgcgcgggggggccacaatcaggccgcgctgccctttgccgaagggcgtcatgaggtccagcacgcgcatggcggcggaattgacccccttgttttccagaaggaggcgttccttggggaagaggggggtgaggcgttcaaaatcgctgcgcgcccggtagtcttccgcagggatgtcctccacgctgatgacggaggctgcagaaaggtacttgtcatgaggccgcaatttgcgcagcctgaccttgatctgctggcctacgcggagatgcaggggtttgatgagattgccgcccagataaatatcatccggagaggtgcggaaacttttcaccggatccctcagcatggcgtaattatccttggcttgttccatgaccccggaaactacgacttcatggccctttgccagaagctgtttccccaattcaaaaaccagctgggacttggtgagggaggccgcgttccggatgggcagcccttccgccatttcctgaagatcgttcagggggcgtttccgcagttcattgatgtcaatctgctccagaacaggggctgcttcctcctcctcccggactgcgtttccactattttcctccggagcggcagccggctgttccccggaggtttcttccggcgcgggcaggggcttggggagggtttcctgcggaatatctccggcgggggaaggggtgttgtcgagttcttcagtcatgaaaaaaatgttggtaaagtctttgggtttgctggcggagcaggtccggggggccttcattccagatgacgaagtcggccgcagccactttttccatgataggccgctgggccgccagaatggcttcaatcatatcctcccggaatccattcctgatagccaggcgggttttctgcgttcccctggaaacagccaccacgcacacggcatcttggcaatagcgcgccgaagtttcaaaaaacaggggcacgtcaatgacaaacccgtccacctccgtattctgacgcgccgccagcatttgcgcaagacattcttgatgcagcagggggtgaatgatcccttccagcgttctgcggctttccggattccggaaaacaagctcccgcaaaaaatgcctgtcagcctttccggaggagtctacgctggctgggccgaagacgctggagaggggggctttcagcgtaccgccatccagcaatctgcccgcctccgcatcacagtcaaacaggcgcaggcgcgcgcctccctcctccatcagcagacggatgaatgtagatttcccggtggctattcctccggtaacaatcagggttttcatggggggaagggaaagtaaggcgcttctgggatataaagagcgggtgaaagggttaccctttcacccgctccaatatggacgttatgcacgcagcctacatgggaggcagcaggccttcggaggcgggaagggcgctttccggagcggccgcagtgggaagggcattgccgcgtacgggctggcccgtggcgtcaatgatctgtcccgttacgaagatcatcagattcttcttgatgtggttgtcggagttgctgcggaagaagcggccgatgagaggcaggtcaccgaagatcggcactttgtcttccaccgtctgcacgttttccgtgatcaaaccaccgattgccacggtatggccgtcgtagatgaacagggacgtttcaacggaccgcttggagaagatcggctgctcgatgcggttttccgtcagcgtcagggacatcggcttgccgtcggaaccaacgccggtggactggatcgggctgccgtagttcacgaagccttcaaatcccacgatgctgggcttgaagttcaggtcgatgatgtacttgttgtcgccaatggtaggcaccacttccagagttacgccgacgggcttcatttcaaacacgccgggggtggcgggagtgacggggaagctggatatctggggctggatctgattgcccagcaggccgtccacaatgttaccgttgttcccataaccgtaaccgttgttatagccgctgttgcctacggagttggggagttccggcggttcgtattcggtgggataccagaattcgcggatgatttcaatcttggcggtttcaccggacttggcggtcacgctgggggcggtgaggacgtcagagccttttttctgggacaggccgcgcatcagcatctggaaggagccttcgtcataaatgcccgtcagggacatgatgccgggagcggcgtttttctgggaggcttcagagcggttggtgctgttcagcagattgtccacggagttcttggtgatggcgtagtcacccgtgcggttgccgccggtaacgaggccgttgatggtgtcgctgccgctgtttacaggccagccggtcacgccgccgggagactgggtaaagctgtcggaagtggaaccggtgccgtagttcgtgccgccgcccaggaaggtgctgcggtcattgcttacggagaacggggtgacaatccagtcaaagccgagttcttccgtgttttcctgggttacttccacgaacttggtcatgatgcgcacctgctgggattcgccgcgggtgttttcaatgagctgttcgatcaggtccaggttgccggaagtgttgcggacgaccagggaggaattgccgttgacaaggaatgccgtggcgccttccgggaagctgatgccgctcttttgcagcaggctgcggatggagggcatgggtttaaggccggaggagctttcgccaccgccgccaaaggggtcgtcgctgacttcgccgccgccgtcgccgacggtggtgcggagagcggactggaagcccgggggcacggagaaggtgcgctggtacagatccacgtcattgccgccggcaggaaggatggtcactgcatagtcttccaccttctggcgcaggccggcattgctgcagatgaaacggagcacttccagcatgggaacattagtcagcttcaactggccgattttgcgggtgcggatgctttcctgcggggctgctgccggagcagcttccgtgacttccgcagtttcttcgccaaagccgtcttcatcagttgcgggaacggcgggggcgacggcagcgggctgggaatcattgatgacaaagttgatgccgcgttcaccgttcgggcctaccgtgcggtccagttcaatggactttttgcgcagatagtcaatggcgtcttccacggtggtgtcttcaaaagagacggaggggatgatgatgctcttgagcttcatcagattggccgtggcgccgttgatgtccgtgatcggtgcgttgtcagtgccgtcggctccggtcgggacttccatcgggatggggcgttcccacatcttgtccacttccgccagcatggtgctgcgggtttcgtcgtaagcggctgcatagtaagccattctgcggcggttgaccgtttcctgtccgcggcgggccgccacgttgtacgggtcgatggagagaaccttgttgaattcggcgatggctttgtcgtagtcgccgaggtcatagtaaccataggccatgtgaaggagggtgttcaccttttccacgtttttcacgtgttcgggggtgagcgccggattcgtgcgaatcggatccttcatgtattcgagcgtctgcttggcaagcttggcgctccggggattgagcttgatggcatcctgcagaagcttgtcggcttcgtcatagcgccccactttgatgtattcctgagcaacggcgatgctggcgtcgccaatatggttggcgatagcttccttgcgctggtcgttgatcggcgcggaaggcagcatgttgtaagcggcgttgtatttgtccagggcttccttgtacttgccttcgcggtacaggttgcggccttccgcaaggagctgcatggcttcctgggtttgcgcttcgcggcgggccatggctgtgcgcgctgcactggactggtattggtaactgcccgatccggcgtaggacgatcccaaggcactggaggttccgacggcgccgccatcaccagcctgcgcaaacgggcaggaggcagcaatggccatcagcgcgatcagggaacgcttcggttgataaagtggtgcgtgatccatagttaggttcttctttttacatgtttttcggatttgtgaagcttttttttcagaaaagtttaaatccggctctattttttcttgctcagtgttgtttgttctccagtggttttgttggcaatggttacggtctgtgtagcattatcaacggttttcagcgtgtagatttgtttggcgtctcccggaatccggaagtcggaaccttcctctacttcaaagctggtatcccgttcggggccggccgtgatagtaaggtttactttcttatcaatgattggaatgacgtattttgttccgcgcctgatggtgtaggtttgtccgtttttggtcggcttcaaatccttgacgacggcttcctcgtccgtttccaccatgtccaggctgggattcttgaattcctttttgacaacgctgacaagttcgaatctgggctcgtcttttgtattcttacgggtaccgaacttgccgttggtctggacgatgtttttccagatttcctgtttggcgcggttcatgcccttaaaggtaaagtcattgccatccgcctgggtgaaagccaggtagaagccgaactgcttgatttcgtcgacaaaaagtttgctgaccaggggaggatggctgttggggtcgttgggatgggttttggccgcatattcctcctgcaccgtaaatccatcgttgtccgggtctcgggtcaggacgtccgagtaaacgaattcattttccagtccgttgtccaggaaccatttgttcgggatgttgccgtggataggcggaccggagatgatgtcaaagggttccattcccccctccttaatccagagattgggggcgacgaagcccacatacttctgtgtttcctgggcaatcggcttgagttcgtgggaggcggaaagctcctggcctacttctgcggctttcttgatgccgggaggcggttcgatggctttttcagaaacctgcgtggtgaatttgtatttgtcattcagtcccagaaaggtcagcgtaccataggcggccactcccaggcccaggacgattccggatgccaacaggattttgtcgtaattttgtttttcagacatgttgaaagtatttgctgcggttggtgttgccttggttaatcttcagacggttcctgagccttgggctggttgaagtggaccagattcagggagacctggacaaagacctgctccttgcccatgtaaggcttgatgacttgctggatggccggggctgcaggtgcagccgcctcatccgccggagtcagggaagccgcacccgtggcgggttgggccgcggcaggtttggcggctgccggattggcgatgggagggggcatcatccgttcgttgcggatacggatggagttgaccgtgaacagatagtcctgcatgccggttatggcgttcatggctttcaatacactttcccggtcgccctggaaggctatttccagaggcatgggagtccatggggcctggtcggcttcgtccgattcttccggattgttcgccggggtttcaatggggagctgggggcggtacaccttgatgaatttggacaggccgcattccgccagtttgttgaccaggctgttgatggctttcaattcaaaacccagcgtggaggccgcctgaacagagggagcctgggtgctgtaaacctggaaaccgagccaggaggatgtgtccgttatgagaatgttctttttcttgcaggaggagatcagggaatccctgaatgttttcagttcattctggaatgccgtgggcgtggtggggatcagcgcggaggaggcaaggaagggcttgtaggccgtttccaggctgcccacggccttggcatagcggttcagttctttttccagctcttcgttggatgagcggctcggagtgatttccgcagcattggcggacttgatttccttggcggcgatgctgatttttttgtccagttcactgcgtttggaattgacgatgtaccctgtcgcggataaccccaggaataagagaagtcccacgcccgcgaccatggcggcgggcttgttgtctgtaatccaattgctcataaaatatgtcttgttcgggttgggtaatcttatttgttaaagttcacgggaatgggcgtttttaacggaagcaccagcttgaagggtacaaaggcccctgccgccgcgtccaccttggcgtccttggctcccagttccatgatctggcgggcttccagtttgacgtctccgggcttgaaagtgaacagggattccttgttcccgtctatttttgcctggaggtcctggatgattctctggccgcccaggctgcgccggacgaatccggtcaggcggatggcgttgacgctgtaaacgcccgcttcatcctcgctggatgcgttggcggaggcctccgtcctgatgtcatccaccagggatgtatttttgtccgatgtgaaggaatccttgatgacggaatatcccgtaatttgggtggtatcctccggattgaagtgggccagcggttcaaaatccgtaaaccagtagggataatccttgtgttccgactgttccagcaggtgcctgatgatgtccgcgtagccgtagcgctgaagcgtgagctgctggtaggaagccagggtggagtccagttttttcagctcctgttctttctggcgcagggcggattgtgccgatttgatggaagtaacggtgggctggacgccggcgaggatttcctccgcctttttctcgcccatatatcctgtgacggcataagctgcggcaccaagaacggcaatggctgccccggcgatgatggcgggcatttttttctggttggcccgctttttggcaactgcggtgggttccaggtcaatattgagggaggccctgccgatggagtgaatggcggtgccgatcaatccgcccaggatgaaggcttcgcgggagatggtgttcacgtccacgccggagcccacgcccacgttgtgcatggggttgaagaaggagatcggaatgcccagtttatcttccaggaattccttggtatagggcagggaagctccgccgccgcacaggtatgccttgacgggagcgcttccgctcatctgggcgcggtaatggttggtgatccgctggatttctgaggcaagccgggtcatggccgtacggatgacggtagccagattggccgtggcgggatccagcccttccgtttgcccgttgctcatggaaacgagcccgctggtggttttcaagcgttccgcttccaggaagggaatattgaattcacgggcgatagcggaggttacgaagattccccccgcggaaatgctgcgggtgaagaaacgtccctgttcgctgtaaatcaaatccgtggatttggcgccgatgtcgatgagcatgaccggttctttctcatccggataactgtccacatacgcattgtacagagaggtaagagcgcagtccactttgccggtggaaaggccgtgggagatgatttcatcattcagggagtccaggtcttccgccttgatggcaaccaggatggcttcccgttccagacctttggcgggaagcagatggtagtcccacacgacttcgtccagcgggaaggggacgtgctgctgggcttcaaagcggatgagctgttccacatcggtatcgtccagagccggaagcttgacgaagcggatgaaaacggattgtccggaaacggaatagttgacgacgcttcctttgacgttgagttcctggacgaggtcggcgatggcttcccctattttcgtcaggcgcaaaccttctgctgacgggtccagcactacgaggcgcgtagcatagcggtccaggataagggcgtctttggaagtcttggaaaagacgcccattgaaactctctgggaacctacgtttaatgcgacgattggtcgtgaattagccatgggtgatttctgttaaataagatgaaatgatagaattaatggaacgttattcgccgtccgccggaggttccacaggagtaccgaacggggcggggacggaactggaagccgcctgctggctgttgggcctcataatttccggataacggtcgtaccagaacacggagaaaggagtttcatccttgttcagcagggggtaataagaggtctccacgatgctgggggactggatggtccaccatttttccattttgccgcgttcggaggaataagtggcgacaatcttgccgttgtattccaccactacgccctggtacttcacccattttcctcttcctccttccacaccggtaatgcgcttgacggaggacggggagagatacacggaagcgtacgtgttttctcctaccggaacattgacgtatttgacttccttatacagtttcaggtactggcgggagcggtccggattgactaccgcgatgtagaatttgaacgtcagggcatcaatatagccggatttgggggtgggagcggcttccaccttgaagggaatttcaaaatccgcccatttcttcggtttcggcagcggccggggatcgtcctgcgtcaggacgttgggggactggcgcatatacagggacagcttttccagggagacccgcacctgcattctgggattgctggtggtctgcgccgatgccgcagggacgaaaagcaccgcagctagcatggccgtgatagtgttaaggatggatttcatagcacaattcaattccctgattagttacaccaaaaaccgaactgtggctagcaaaaatctcttgtttctttccatgtagcgtgtgtggagcatgacacggctccgcccgacggttctgcccgggcggtcaagaaaaaaacatgcggcatggctgcgggcttgacctggcagaggtgtttccacatgctcggcccatggcgattgattctgatctgctgaagaagttttcagaggcccacggtatttcggggcatgaggatgaagtgagaagcctggtggctcaggaacttgaaggatatggggaattttcttccgatggttccggcagcctgttctgcaccggcggcggggccggcccccgcgtgatgctggccgcccacatggatgaaataggctttctggtgcagaatatagcgtcgaacggtttccttcagttggtggggataggcggctggtggccgcataccctgttaagccagcgtgtcctggtaaaaaaccgctcgggccgcggcatccggggggtgattggttccaagcctccccattttctgccggaaggccagcgcaacagcgtcatgagcatggaagccctttttgtagatgtgggcgctgaaagcgcggaacaggtgaagaatgaattcggtattcacctgggggatcccgtggtgccggacgtgaaattctccccgttggaaaatccgttccgggtcatggggaaagcctttgacaaccgcgccggtctttctgtgatgatagaggcattcaagaaattatgccgggaagggcatcccaacaccctgattgccgccgcgacggttcaggaggaggtgggcacgcggggcgccaggacggccggcgtcgccatgcaaccggattgcgtgattgttctggaagggccgccggcagacgacacccccgggtttgccgtgacggattcccaaggggccttgggcggaggcgtgcagatcaggctgtttgaccccacggccatcaccaatccccggctggccgccctggccgaaaaaacggctttggatgcgggcatcccattccagttgacggtgcgtcgttccggcggaacggatgcggcagccctgcatctttctggaaagggtgttccctctattgtgctgggaatccccacccgatacattcatgcccataacggcgtgctggatctgcgggactaccgcgccgcggtggaattgacggtggctctggcccgttccctggaccaggaggccgtggaagcccttacccattacctgccctgaaagaaacgctcatgaatccgaccgtttacgtacatgacctggaccctgtcatctggcagataacggactcaattgccctgcgctggtatggcctggcctatttaacgggcttcatcggcgggtattatctgctttcctggctttcccgccggaagctgtatcctgtcccccaggacaggatggcggattttgttacttatgtggctatttttggcgttttgattggcggaaggctgggatatgtgctcttttaccagattcccaatcacggctggtcccagtttctggcggatccgctcatgatcctgagggtgtgggaagggggcatggccagccacgggggaatgattggagtagggctgtacacattttattatgcgtggaagcaccgcgtcaagtgggtggcgcttctggacggcctggccattgtagctcccgttgggctgtttttcgggcgcatggccaattttatcaacggagaactgtatgggcgcgttgtcccgcccggctcttcccagggaatgatttttccggcggagctttcccaggatccggacttgttcgtgcgggtggcctcccgtatttatgaaacgcccggattgctggacaaactgtccctttccggcgtagccgtgccggaacgaatgactgccgcctgggtgaccgaccgggtgagggatacgcccgccatcagggaaatcgtggggcagatgatgcaggatcatgcacgctacccctcccagctgtatgaagcatttgcggaaggtgtgtttctttttgccgtgctgtggtttgtacgggtaaggtttccccgtgcgtggaatggcttgttctgcggtatttttgccgttctttatgctgcgggcagaattatttgcgaagagttccgggagccggattcccccttctccatgggattgacccgcgggcagttcctctccgttttcctcgtgctggtgggcgccgctttcttcgtatatgccttcaagaccaggcagacggttcaggaatgcgctttctatgaacctgaaaataaagacgggaaagaatcgtctggaaaggccgtttaaaacgggtccaggtcaaattcccctgttttgggaatactgctggcgggaccagccttgaaaatatctgcaatgcagctggaaaaaagccgcaaattccgttggtcgaaggcaaaacgttcaaattcctttacggaaaacagggtgatgggatccgtgttgtaagctttgaattccatgatgccggcgtccgtattcgtatttgacaggcgtccctcaatgcctacgtccccgctcatgaagcgtcccaggatcagggaggttcccggaaggggggagactagggaaacaagatcggacatgatgttgccgcccacgtccgtaggcttcagcttgactatggcgaggctgagagttacggatcccggaacggggcggtcaaccaacttccatttcatcctcccgcctgtctgtctggatttgttttccagcacgttgcggatgtctttctgcagcccggccctgaattgtgccgccagggacggggattccttggggaatctggctttgatatagtcaatattgacgggggctacatatactttcagccttggagaattccagacggcctgttccgagggattataccagacgcctccaaaacagctctgcctggagtccgcgtgaaggggatgggtaattaaaggggaaacgggcattgtccgggaactggaacaggaaaaaaccaaacctgttcccagcgccaggaatagccgtggaatagcgccgtgcatgcagaataagacggtatccgcccgggtggtgttcgagtcatgacccgattggcgccagggggggaccggagggggtggctccggaaattccggggcggttttatgtctcctaacggacgggtggcgggccggcagggaatgggcgaatggcataagaatagccggagcggggaaacggcacggtcagaagaactccggacgacaaggaaacgcgcaaggttgccccgtgtccggatgcatgattgacaagccggaaaagcggggcatgctgttgatatgagatacgagccgcttccttcttccttttttgccggcaaccgtgaagaacttgcttcccgcctgcctgccggcagtatgctgattctgcacgccaacgacgtatttcctacgaatgcggacggcacttttgccctgcatcagaatgccaacctcttttatcttacgggagttgaccaggaagaaaccgtcctggttatgaccatccgggaggacggctgggatgagattctgctgttgcgtgagacaaatgaacagattgccatctgggaaggcgcccggctctcgcaggaacaggcgagagagctgagcggcatccaggacgtgcgctggaccgatgaatatgatgcgctgctggaggccctggtgccgtccgcatccatggtctttgtggaagccaaccagcatccgcgatgcacatgcccggtggaaacgcgcaatgcccgcatgaccaaggagctgaaggaaaaattcccggacgctgttttgaagaatgtctatgaaatcttggcggacatgcggcaaatcaaaaagccggaagaaatcaaggctctcaaaaaagcctgcgacatcaccaatgaaggcttccgggaattgctccggttcatcaggccgggggtgggcgaatggcagattgagggattcctggccaacgaattcatcagccgcggtccgcgcaaattctccttcctgcccatcatcgcttccggaaaggatacctgcgtgctgcattatatccaaaacgacaaacggtgcgaagacggcgatctggtgcttatggacataggcacggaatacgggaattacaactccgacatgacccgcaccgttcccgtgaacggaaaattcaccccccgccagcgcgctgtgtatgaaagcgtgctgaatatgatgacctacgccaaaaagattctgaaacccggaatcctgaaatcggagtacgaacgcctggtgcgcgtttttgccgccggggaactcgtcaagctggggctgattacacccgcgcaggtggcggaaaaaccgtccgatcctcccattgtccggaaatattacatgcacgggtgttcccacttcctggggctggatgtgcacgatgtaggcgaagccaaccccgttgtgttgccgggcatggttttcaccgtggaaccgggcatctatattgcggaagaaggcataggcatccgtttggaaaacgacgtcctgatcggggaaacagaaaacatcgacctgctgggagacgtgcctttgctgcctgatgacattgaacggctcatggcccggtaaaatgggccggatacggttctgaacttgacaatggggcccgtgtgggttttcattcccgtcccatcatgtcgaagaaactcaaaatagctcttcccaaaggcagtttgcaggattccaccgtggaattgttccgcaaggccggctacaatgtgtatgtgtccagccgcggataccgcccggcctgcgacgacgacgatctggagctcttcctgatccgtgcccaggaaataggccgttatgtcaatgacggtttcatcgactgcggcattaccgggcgcgactggatttatgaaaacagggcggacgtggaagtgctgacggatcttcaatactccaaggctacctccaagcctacccgctgggtgctggtagtcccggaaaattcccccattacctgtgcggaagaccttcagggcaagcgcatcgccacggaaggcgtgggcatcacggaacgctggcttcaggaaaagggtattgaagcccacgtggaattctcctggggagctacggaagtgaaggtgccggaactggtggacgccatcgtggacatcacggaaacgggaagctccatcaaggccaacaagctccgcatcgtggacaccctgatgatctcctatccccagtttatcgcgaaccgggaaaccatgcaggacgagtggaaaaaacagaagctggaacgcctggtcatgatgctcaagggcgctctggaagcgcgccggaaagtgggtctgaaaatgaaccttcctgctgcttccctgaacggcctggtagaggcccttccgtctctgcgccgtcccactatttcccatttggcggaagaaggctggctggccgtggaaacggtcattgacgaatccgttgtgagggatatcattccccagctcaaggccctgggagcggaaggcatcattgaatacccgcttaacaagctggtttactagatttttttctcaccacagtaaaacaacaaacgaaccacaatcatgggatcgctcaaaaaacgccgtaaagcaaaaatcaacaagcataagcgcagcaagcgcatgcgtcagaaccgtcacaagaagcgtttgcgttacaagtcctaaggtttgtgcgcttcgctgctcaagctggcagtctgtccgattttccggaaaatcccggcgtcctccgtaccacggaaggacgccgtttttacgtatttgaagccaaaaaatattaatttgatttcatgttgaaatagatattgatgctttcttttttttcagtagattaggaggtaagttatgaggcgtgcgtttatttcgataatctctatattactgttttttcagggaaatgtcttggctgttgatcagacaagatgtcgtgtagaaagaagatatcttgccttttttactccttggggtaaagagcctcctactccacctgacattgttgaggaggtattgggtgatatggtggaatctattcttactgaagctctaagcgcagaaactgagatagtggatatggatcatctagtaggggcctccatgaaacatacttatcatgttcatctatggtatgcctacagatttgttcataatcataaatttaaaactccatggaaaacggggatgaaaacacatttaactgatgggatgaaggatttttttgatccgaatattgaagggaaaaaaagtgctcaaagcgccgtgtctacagcaaaaagaaatcttcttaagaaatttgaaaaggaacttaaagaagaatgtgaaaaacatcattgataaaatattatgaaaaaaattatattaataaaccttattttactttctgcgggctttctttatgcacatgaaaaggatatggcgcataaagttcttagggatagcgaagtcaatttggaaaagaatgactcttcttcccccgtcgttgtagaaggtgtagaaaaccgcggagaactggatagctggattgaaaattatgtggaaacaaattatcctggttataatataggtgacagagaagtggatctttccagcaagaaatcaatcattgaaactgtgtatttaaaaaacgaacagggaaatgtaatagaagtctgttttgatattacggattatcgaaagaaatttaacgagcttcataaaaaagaaattattaaaatttctagagatctccggaaacaaaaaaaacttgtaaaagaagataaggaaccaggaagttcccatgattttcccattgaattgagagatgctaaaactgagaaggaagttttggaagcacagaagaattatatggagaaaaattttcccggttatcaagtagtttcaagaacaacatgggtatttgggaaaaagtttattgatcgagttcggttggaaaaagaggatgatactagagttttgatgtttgatgtgtcggttcatattaatgaatacaaaaagacccatgagattaatttgaaagaaattgctcctggtatgattagtgtgcaaaaatgaatttttaatagtaagaaactattctagactagagaagtatttgttgcgccaatgcctgagttttatttttgtgtatatgagataggattggcgagtaacttttagaagtttttggtcatagaagatttattaaaatataaaccaacttgttaattgtaaacaaaatataataaactgagcagttcatattttaaattgagctgtataattgctgtttttaacgttttcatgcttaaatttctgttcttctctctgtattttttatcagtggttgctgctgaaaatttatcctatcatcgtctagcatggcagatggagggaggggatgtacggagtattgccggactgtgtcgccaatatgtacaaaagaagttggaggcggaaaaaacgttttccgtggaatccctgttgaaggatcgggagctggcgcaggcttgctatatggcccatttctttgcgttggtggggaaggagaggacttatatccttcatgatttaaaggacaaggaatttgtgaaatggctgctggatcatccggaggtatttgagaaattggcgtttgccagggcgtcgggaaaggatactctggcagtcctgcgcaacatttggctgaaggaaggaaaggaactttccggggtaggccttaacatggcgttgggggcggcgttgatttcttcatcccgggagccggaggcatgcgaagcgcgatatgatttttacaaaaagtcttttacggagaagaaattgtttccgcagttccttacgctggagccgtgggaattcggcattcttttccgggggcgggaaagtattgaggaacttgcctgggcacaggattatctggcgggcaaaaagaagatccaggcggggaacgccgggtatgcctgctgcggattgattccctaccggatgaagaacaagcagggaatcagtgtgcatgcgggtggagcgttttacgattataagccgatttccttgcagatttacgtggagtatggaggggtgtgtggtgctgtgtccaagggagcagccggttttgtgaaggcgaaggggattccttcctacacgatcggacagccaggccactgcgcgttcgtatggaagggaacagacggagaatggaagatagggaataacatttatggatgggtatggtcggagggcggttccggagggccttggaagggagccgtttccacgattacgacgctgccccgtttttggaagggagaggatgcggcagcgtccagcttgtgttattatttgtccctgctggcctccgattcacaaaaagcggatatcctcttgaaagaggccgtgaaacggaatgcctccaattatcctgcgtggcaggctttgacgaagagaaatgcaaagcggcccgagaaagaaaaactggttctgctagaacggttcaaggaagctttccccgaaaatcccaccatgtgggaatactttctgaaaaaagaactggggctggattggaaaaaggcgaatggttatgccgtttaccctcgattgctgacggaaaatgaatcatgggattccgtggatgcctatatgcgcaatttttgtgctttagcccggaaggatattccggacatggccggaaagctgccttatgaagtgaaaaccaagaggatttttttcagaaactggctcaagttttatcagcagaacaaggtggacaggaaggtgagggtgcagacctgcgccgtgctggaaaaggcgcttcctccgttattgagccatgaaaaaacggcgcttcaatttcttgggttttatgaacaggtgcttgacttatggaaagacaaacagctgttcgcgcgggccgatgcttgcttgactgcatggctgaaagaggcggacaaggcttccgtacgcaagaaaatggcggaaataggtctgaaagtggctgaccagctgggagacaaaaaatcgctggtacgttatgcggaggttcatgctgaacattaaatagagaaattggggaacgatcgtctattctctcttagactggaaaatgggtcaaagatattaacttgtcttccggatttggagtccaatatttttgactgtgcttttatgatgcctttgcttcttcccggaaccgtttcagggggatggtgatggtgaagacggtttcccggtgggggatgctggagacggtgatggttccgtcgtgggcttccacggcgcgtttcacaatggagaggcccaggcccgttcccttgatttccgaggagtggtgggtttccacccggtaaaagcggttgaagaggaaggggatgctttccgcaggaatgcccacgcccgtatccgtgacggtgatgacgcaggcgtcctgtgttttggcggcggccgcagtaatggaaagtcccggctccgtgttttgcttgagggcgttttccaccaaattgaacagaatttgcgtccagtaaaagggatctccataaagttcccaatccgtgggaatgtccatgtgcaggacggcctgttttttctcccggatggaatccagacgggagaagacgtcgtccgcgcaggaggtgaggcggaaccactgctccttcagaatcgccttgtggcctgattcgagtttggagatcatgagcatgtcttcaataatgttcatcagcctctggctgttctggtgcatgactccgatgaatttgcgggccagtccgggactttcctccaccagatcgtcctccatcaggttttccagatatcccacgatgatggtgaggggcgtacgcagctcgtgggaggcgtttgccacgaagtcccggcgcatctggttggtgaggtagttctgcgtgatgttgcgcagcaggatgcgcttttctctgattggggcgtccgtgatggcgctgtccagatgccacgccgtgatgccgttttgcacgccgccgggggaattggcggcgctcagcgtgaattccttggtgacggggccgtccgtatcgaatgcttcctgaacatgccccagcaattcctggttgcagaccagggcccccactttgcgcccttccagcttttcttcctgaaaaagttctttggccagcgtattagccagcacgatgtgtccggatggaccgatgagcaggaaggcctctcccagagcttccaggaagcgccgtttgtccgcgatggcctgttcctgcgcttcttccccgcgcttcagcaggcgctgagcgtcccgcaaggcttttttccgggctttcatggcggaccggcatacctggatcagatgccagttcaggtacagggaggccagaataaggatggttaggatgtagtcgatggccgacatggaaccggagtgttaagccttttcctccgggatgcggcgtcccggcagggtaaagcggtagccgatgctgcggatggtttcaatgcagtccgcatagggagccagtttctggcgcagccgcttcatgtgcgtgtccagcgtacggctctgggcctggtggctgtacccccatacgcaactgagcaggtcgttgcggttcagggtctggccttcccgttcaaccatatggatcatgagcttgaattccgtggccgtcagatctacttcctccttgtcgatatagaatttgagggcgtttttgtcaaaagtgaaggggccgtattccgcaatgacgctgcccggcgtgtgctcacaccgtttcagcacgctggccacgcgcaggacaagttccttggggctgaacggtttggtcacatagtcgtccgctcccagttccaacccctggatgcggtcttccgcctgggccttggctgtcaggaagatgacgggaatgttctgggtgcggctgtcccggcgcagttccctcagtacgccgtgtccgtccatgcccggcatcatctgatccagcaggatcagttccggcttgtcccggcgcgccacttccagcgcggtcaggccgtcataggccgccaggggcgtatggcccgcacgttccaggttataggccacaaggtctgaaatggcgtggtcgtcttcagcgataagaatggttgccatgtctgttttttacgatgaaagaaagggcggtgtcccgatattagatgtgacgattcgttcacatttccccgcccgggaggcggttccggacagttaaagcctcttcttatgcaaacatactgtaacggaagcgtttccgttttgcaaggctggcccagattcaacttctcttccctgcgtcatgtgatacacttgccccgcaacagttgtattgttatgcgaagcgatagagttaaagcagggttcgagcgtgcgccgcaccgcagtttgatgcgtgccactggaatgacggatgaggatttaagccgtcctttcattgccatttgcaattcttttaatgaagtgattccgggccatgtccacctgaacagggtggccgccctcatcaaggaggaggtacgcaaggccggaggaactcccgtggaattcaaccttcccggcgtttgtgacggcattgccatgggccacggcggcatgaagttttccctggccagccgtgagctgatcgcggacagcgtagagacgatgctgagcgcccatgcgtttgatgccatgatctgcatccctaattgcgacaagattgttcccggcatgattatgggcgccctgcgctgcaatattcccactattttctgcagcggcggttcgatggccgccggcatggcggaggacggcacggtgctggacctgaacagcgtgtttgaggctgtcgcccgctttaaggcaggcaagattaatgaggaggaacttcattccctggaatgccgcgcctgccccggcgccggttcctgctccggcatgtttacggccaattccatgaattgcctgagcgaggtgatcggcctggcccttcccggcaacggttccctgctggctacttcagaggaacgaaaggagttctggaagcagactgcccgccgcgccgtggagatggcgaaggcggacggccccctgccgcgagacatcgtaacccgtgacgctatcgacaatgctttcacaattgatatggccatgggcggcagttccaataccgtgctccatacgctggctatcgccagggaagccggcgtggagtatgacctccagcgcatcaatgatatttccaggcgaaccccgaatatttgcaaggtggctccttcctcccgcttccacatgcaggatgttctgcgtgcaggcggggtgagtgccatcattcatgaaattgccaggattcccggagcccttcatctggactccatgaccgtcagcgggaaaacgctgggtgaaacagtggagggatgcggcattgcggatgaaaccgtgattcatccgttggaaaatgcctattcccgtgatggcggcctggcgattctgttcggcaatctggctgaggagggcgctgtggtgaaaaaggcgggtgtgcatccggatatgatgagtttccgcgggcccgccgtgattttcgagtctcaggaagaggcctgcgaaggcatccttgccgggaaggtgaaatcaggcgatgtggttgtcatacgcaatgaaggccccaagggcggccccggcatgcaggaaatgctggctcccacttcctatattatggggcagggccttggcgcggaagtggcgcttattacggacggccgtttttccggagccacacacggagcctgtattggccatatttccccggaagcggcggaaggcggcctgatcggcctgctgaggaacggggatattattgagtattccattccggaccgcacgctgaacgcctgtttgagcgaggaggagatcgcacgccgccgtgcggattggaaacctacctataacagggtttcctcctcctggctgagccgttaccgccagcttgccacgaatgccagcaagggggcagtcctccggcgcggggaataatagtttcccttttaacagcagccgcttcccgtgatagccgggaagcggttttttatgcctattttccttgctctgtagtctggcaggctgcatggtcggattgcccgcatccggcattgaaaaaactgcctgggtaaagcggaaccgcttcctgtgaagggaagcggttcctaatcaacaattcatgtttttccaagaaatgttttatttggaaattctgaggcggtcgctcatttttttcagggaaagggcaattagttcattttgagtggatggatagcgtttctttatttccgatggtgaaagtcgttttcccggagttggtgatggaaagggagcgtcccttccgtctcgtcccgtttgccggaattatggataatagggtggaaacgggtttgagcggcgcgtacatttcgggaaaatagcctcttcctgcgcagagagggaaatgattttgtaaaaaattccgttgctgtccgttatgctgatgatgtaactcgttttcagtattcgcaggagggcgatcttgataagtctggtttaccggaactgatgttgcaggaaggctgcggaatgacgcaggacgggaccaggacatggcgttccttgttgaaggaagcgttggagattgccttcccggttccctgcggaaccgggaaggccggaatggacatccgttagaatgagtaactgacggagccgttgattccctgggccgtcagtccggccctgctttccagagagtatccgatgcgggccccccacctgttgccgaaggcggcgcttatccctgcgttgacgcgcagagcggtgcggcctacgttgacgccgcgcgccgtccaggcgcccaagtcactgctgacagtccctttgggattgaggcggctgagatcctgcgtcacggcaactgtcacgctgggcgtcagcgtggcattggttcctgccgcgtaggtgcgggagagggtgatgcctacgggcagcgtccagttctgggcgcgcgctccgctgaaggtccgggccaagtctccgtgttcggagaagctgtccgttttcccggtcatgaattccagcccggcaaatggtgcgatgaccagtttgttgcggaattgttccgtccaggtggcgtagatggcggctccgaaagagtcagagtcaaatttcccggcagcggaggtgtccgccaggcgggctttcccgtcaaaggatgtggttccgaaggctgcatacccgtccagagacaatttggaggttccggtgggcgtgtagcggccgtagagcatggccatgaaagaatccgcatcatagctggacagtcctcccttgtcctggaaagttccgtaagattggccgatggccactcctgccaggacggaggaggagagcttgcaatccgcgcccacggcatagccgcctgcgtcgtatttgtagccgtcaatgccgctgcgcgaatgttgatccgtccaggaacccaggccgcccacccatacggagccgcggcctgaagccaccggcgccatggcgatgggggaacccttggcgtctgcagactggacgggcttcgctgccgtaatattcagtccctgtgcggcggaaatggctccctgcgtcctgcccagggcggcaaaacccttgagagcatcgttggaagcccaggccgcattgatcacggtttccccactgacggattgaatcatggctgccgccgcgtctgcgctggaggttcccagaagggtttcgaagaacctgtgtgcggctgaaccgtcccggacgcccgtccggacctgttccatgccggctgcggcgccggatatgttcccggaatatccctgcatgggggcggcgactccgtgcatattttgtgtcaggcggatagttccgttttcatggggcgttgcgcttgtggagacgaaagcggtgttgaacagaggcagttcgcttacttcggctccggtgatggtgacgttgtccacggaagaagttccggcggcggtgtgtgtgaggtcgcggccgttgcccgcttcatcgacattccagagcttgatggaggagtggccgttgaacgcgatgtcattgaggagcagggaggaaccttcccccatttcaatcacggcgtttccgttaatttccaacgtgtctccagccagtacggaatcttccgtcagaatgacgcctgcgccattcatttcgtagtccgtcaggtcttcaactcccaattgagctccttccatgaccatgatgtcatccacttcggccaggtggcccacgatcagggagccggctccggattgctggatcaatgttccgccgaatccgttatcctccgtatcccggcctccgtaaagcaggtcgccgccgcctgcctgaatcagcgtggcggcgccacgcgtccacggaccgtcgtcaagggagtaatagtctgcgtcggaaatgccgctgttgatgatggtgatatcgttcgcgtccgtgtccgccagaatgacggagccgtcttccgcaaagatgtcgttagcttcttccccggccgtgttgccgtcaaagaaggctccggagccaatcagaagaatgcggttctccatcaggtggatggcgcctcccagcccggaggcggcgttatccgtgaaggtgacgtccctgccgagccagatattggccccttcattttcaaagaggccctccacattgtcgccatcctgctgcgcgaggttgctcgtcagttcggaagcgatggccccgccattggctccagccgtgttgccggagaagacagttccgtttcctaccgtgatatccagcacttccgtggtcagtttggaggtgcgttccccgtccgtataggttatggattcggcaatattgttctgggcgaagacggctccgccggatcccgctgccgtattgctgatgaagctgttgttttctccaataacgatgtctccatgtgcataaagggcgcctcccctggagatatccatggcagcggacctgcccggggccttgctgttcatgaatgtgttgccgcggcccgtggtgattttgttttcgcgttccgtgacggtaactgttccgttgagaatatttccgttttcatccgtatcaatgatgctggcgcggataaggctgttgtccgcatcgctgaaggtgctcatgtggtaaacgggagcatcttccgttccctgataagttacattgtcccccagcgtgatggtattttccgcagctacggtggtcatggtcagcgtaacattgtctccaatgactacgttccctccataagttccttccgcatattctccggaagccagcacatagtctccttccgtgttttgcttgagcgtcccttcaaaggagacggttccacgggtggaagcgccgtcgtctccaatggagccaactgtgtcccctgcccagatatcggccatctggctgccggaaagatcgttgtcgcctgtaatttcagtattgcttccgatatagatattccctccttccgcgtaaatatccacatcgtccagcgtagagtttgctccaatggagacggtggcctggtctcccgctccggtggtcatgcgcacggtgcggattccgtcttctccttcggttatggacagggaatccagttccacggatacggcatccagtgtgacggatgtcagttttgctccttcgccgatgaagatggaaccttgcgcatccatgtcatagttttcaatggaactgccgttgccgacggtgatgtctccgaacagccccatggtttcctccatgctggttccgggaaggtaggttccgtcttcaccttgtctggcaatgccctgggaaaggacaagggcttctgtcgtgatttccgccctctccttggctgtcagcgtactgttatctcccagcagtatttcacccccagtggattggctgtcgccgcccacggtgctcaggttcgtatcctgcatcgtcacggctcccgcgctgaagtcgatccctccgtgagcgccgacggtttccgactgaccgatcaggatgccggaatcttcattttcataaacggatgtcgtattgacggcgcctgtagagatgagcgtggaatcagataaggaaatatctccatgggaaacaatttggccgcggactccatcattcatggataaatccatttcatggatacggacgttttttcccagatccatggcaatttctcccggtgtagaggtgactaccgtggagatgagggctcctgtttcgggatcaattctggtttctatggaggcggaatgcccggtagtgacctcattccggctgagaacggctccgtctccggccaccagcttgttgttttccagcacaagccaggttccttccagcgtggaagcgttttctatggaaagggtgtttccttctccgtcccatccgctgagcatgccttccgtcatgttgcccacgtgaacggttccacggccgctcacgttaagatgctgcatgttcacggcagacatgtccttgtagttgaagttggagatgcttcctttcccgtctgatttgaggacaatggaggcgtctgcgggcagggagcccaattctactccttcaaagtcgatggagccggtaatggtcaacgtgtctccatcagccatctggttccaggctgtttgaaattcttccagggtggaagctgtatattcggcggcgaaggtttggcttccaaggacgcacatggctgccagaagggcccggcgcaacgggaggggtaaacgaaggttcatggtttgttatattcagattaattcagggaaaagtggagatgaatgacttttccctgctgtttatgtacaggattgttaatcctgtgtttctgaatatatcccattcgttttttccgctttgggcacataaatgctcatggtgcctcggaagattgaatcaacggtttatctaacaaatagaattgtggttgtacataaagaattgtccgtaaaaagagattaatggataaaaatattgtaattttttcttgataacaggattaacaatcctgtgatgtatcaggtattaatataaaaaacatgatattcggaatggcgagacatggaaaaaaccagaaggaatatctggctgcggaaatgttattgaaaggtagcggattgaatatgctggatgctgccagcctcgcagtagagctgctgagcctgtgcggaggcagccgcagcatgcgccgggccagaaaggcaatttttctgggtgctgaggaattgaggaaaggggaaaggacggtttccttttccgccgccgtggaagaaatgctgaaggcgaagcgtaatcttcgccctacgacgttgcgcgatatcaggtatttcaccggagctttgatgcggaggtgtccggaattgaaaggttttccggtccggaagctgacgccggagcattgcgcccattttctggaggctgcttttacatcccacaggcagcgttacaagggccgggcggtgatgagcggcgttttgtccttttccctgcggcgcggatggtgcggggaaaatcctgtcgcccgtgtggactctccttcgtttcgtgaacggacgattgccattttggctccggaagagataggaagccttcggacggtggtggaagctccggaatttcgtgactgcgctccggctgtttgggtaatgttgtacgccggaatcaggccgggggaggtggtgcgcctccattggcgtgatgtggatttggaggagagggtcatttccgtaaggtcccgaaccagtaaaacggggggaatcaggcatgtcaccattcatgctgtgctctggcggcttctggcgggatacggagcaggggggccggccggactgttatgtcctcccaattggccggtgcgctggaggctgctccggaaaaaagccggatgggggctgcacaaccgctttggagaatggagtgcggacgcgctgaggcatacttatgcttcctatcacgccaaatggttcagggatttttccctgcttcagctggagatggggcatcgttcctcctccctgttgcgggagcggtacctgaacatggaaggggtgagccgcgacagggcacgccttttctgggaagcgccggaacatggctggaacaacaaaaccggcattgcaggaacggactttctatgaagggacggctgtttgactgccgcagccggaaaagggcggcatgagggagtccccatggttatgccctgggcaggaagtagccgcgctgtttttctgagatgggcatgtccaggcgttccataacggccagcatgtcttcccataccttgcgtttttcccgcgggctgtccgatctgagcagataactgggatggtaagtgacgcgtacgggaatgccgttaaggtcgtggaacctgccgcgcatggaactgacggatccctgttcccccaacaggcctacggcggcggtaccgcccaaggctacaatcattttcggctggatgacccggatttcatgcatgatgatgggcaggcatgcttcaatttcttccggcgtgggtgcacggttattggtccgctggttggggagggccgggcggaatttgacgatattggaaatatagaccatgtctctggagagccccatggcccttaatatctggttgagtttttccccggcacggcccacaaagggctcctgctgcacttcttcataatatccgggagcttccccgatgagcatgagtttcgtatggggattgcccgtggcaaagaccatggtgtcccgcagggagttgagttcccgcgccggtttccagttctgcgccagattacggaggtattgcagcttgtcttccattgtcccttccgggagggtaatggcagaggccggttccctgttttgcggaaacagctccggcggttccggctttccggcaggagcggagacaggagcggctgcctgcaggggcggcggttccggagaagcgggtgctgatgcggcgggacggcctccctgcctggaagccacgtaccatgttctgagaacgtttctggcttcatccgtcaggctcgttcgcgttgttccctgctggatcagggaatcaagataatggcggaaaaggctgttcggtgtagcgctcatgggaggataaagccagattagtccataagaggccgtctgtcacgacgattcgcaggctccccggccttcatggaacgctcctctccgggaaatgacacggtaaaagatggtatcttttgcaagggaggtagcaaattggggctttccggttcaggaatggaaatgcagccggctctctcaaaattttacttagtttacgtatgtctttttctgaagaattaaacggtttgatggattgccccactcccctggtacgccgtttcatggcgttgctggaaccggttgacgacgcccgcctggaggagatggcgcaggagagccggcgtctgacgcggctgcatttcggccggaccatccgcctgttcgcccccatttacctgtccaacgaatgcatcaataattgcaagtactgcggtttttcccgggataatcccattatccgcaccacgcttacggtggatgaagtggtgcaggaggcccgctacctgcacggcctggggctgcgcagcatcctgctggtggccggggagcatcccaagttcgtttccgacgggtatatgcaggaatgcctggacgccctgcattcctttattccatccctggggctggagataggaccgttgccggacgaccgttatgcggagatcgtccgccatggggcggaacaattggccgtgtatcaggaaacctataaccgggaagtgtatgaaaccctgcatacggcagggatgaagaaaaatttcaactggaggctggactgcccggaacgcgcctaccagggcggtttccgccgcattcagataggagccttgttcgggctttcgccgtggcggcgggaggccatggcacttgccgtccatctggattacctgcagaagcattgctggaaatccgcgctttccgtggcgtttccgcgcatgcgtccctacgccgggaattacgagtatgaacctgatccggacttgatgctggatgaccgccattttgtccagcttatggccgccctgcgcatctgtttccccaagataggcatgtccatcagcacccgtgagcccgcgccgatgaggaatgccctgatgcatttgggcatgacccacatgtccgccattgcgcgcacggaaccggggggctacacgggcgtgggaacggctgccgcccatttgacggtgcggggcaaccgggtggatcttcccgatggccggaaagggaattgcaaggcgacggagcagtttgagatttccgaccagcgcacaccggagcaggtggtcggagccatacggaatgccgggctggagcctgtctggaaagactgggatgccgctctggatgtggtgtaggagaaccttctcccgtctcatttctctggaatgacatccatatcaccgtgatgttgtgatggagcattgacggcatgctccggctgtcatatttccggtagcgatgattcgttattattgggggaggttttggccgttcctcctgtttgcgttcggcattgaggcggtggaaaatctgtttacggtatttttcgaataccgcaacatggatttcgggttgcttcccctcctgaaaacggcgtacgtttttgtgacggagtttgccgtcaccatgtgctactggcttattccctatgccgtttatttgtggattctgccgcgcgggaaagcaggagggaaggcggacgggcggctcacctccgcatggtttttcctgtttgtgctcgccaatctgtttgaagatgtggcggaagcctttttctggaacgagtttgaagccagcttcaatttcattgcggtggattacctggtttacaccaaggaggttatcgggaatatttacgagtcctatcccatcattcctattctgggcggcattctggcggcgtccgttctggccgtctggggaatgaagaggttcctgcttcccaggaacggggcggttcccgccggatggaaacgaggctgtgtggtgctgttcctgctggcctgcgtcacggggggatattggctggtggatatcaaggatgcggatgccgtgaacaaccgttataattcggaaatggccaaggatggcctttacagcctgttcagcgcttttctcaagaatgaactggattaccgcgcttattaccggacgctgccggatgcggaagcggcggcgtttctggcccgggagttcacggcggatgacacgtccgtgccggaggcttcgtccggcagcgtaaagaggcaggtgcgtccttccgggggggctatccgcccgaatgtcgtggttgtggtcatggagagcatgggagcggaatttttgaacgagcgccgggaagacggggctgacgtcactccgtgcctgagccgtctgggaaaggaaggcattttttttccgaatacttatgccacgggcacccgttccgtacgcgggctggaagcaatcagcacatccctgccgccgcttcccggcatgtccatccttcgccaggaaggaaatgagcatttgcagaccataggttccatattcagggacaagggatatgatctcaaatggatttacggcggctacgggtattttgacaacatgaattattttttcgggaacaacgggtttcaggttctggaccgtaattccatggatgattccgaggtgacccattccaccatttggggcgtttgcgatgaagatttgttccgccgcgccgtacgggaggcggatgaatcctgcggacgcggcaagccgtttttgcaggtggtgtttacaacgtccaaccaccgcccctacacgtatccggaagggcgcattgacattccttcccacacggggcgcatgggggccgtgaaatacgcggattatgcggtaggcgcctttgtggaggaggccagaaccaaaccctggtttgacaacacgctgttcgtgttcgtaggagaccacggcgccgggagcgcgggaaagcaggccctcaatccggaaacgcaccgcattttttccattttctacgctccggctctgctgaaaccggaacggcgggacactcccgtgagccagattgacgtgctgcccaccctgctggggctgttgaactggccgtatgatgcggccttttatgggaaggatgccttgaagccttcctatcagtcccggtattttgtgagcaattaccaatatatcggctatttgaaggggaaagacatggtggtgctcaaaccccagcgcggagtggaatttttccgggacggagaggccgttgagccggacgggcggatgaaagagctggaaagggaagcggtttattactatcagcacgcttccggctggcgcaccggtttgaaggaataaggcctccgcaaggtgcggaggccgtgattgtggcggcctccgcccgcgcacggaaaatgcgttcaggatttgcttccgtccctgtaatcctggagagcgtcccaatggaacgtgaaatgcttctgcatgtgcagcccgttggcgagaatgaacatgagggaaatgcggaattcgttattgttcaatccttccagctcttttttgtcaattttcatggagaatttcccgctcttttttccaaggcgccgggagaaggaaacggcgtcatagtcctggttgaccgcataaggaggatcctggatgtaaacattcagagctttgacggtctgggggcttttataattgccggaaaccagaatctggtctcctttaaaagaaatggctacgtccccgacctccacttccggcttgccttcgtagaattgctgggccggggtgacggaaaacacttcacaggcatccagcagggcgcagctggccggggtcaggaacgtgggactggtcccgaacgtgtaattgcccgaacccatcagggccgtgccgtattttttaccgtccgaggcggtttggtggttgtgcggcagattaaggccgtgccccaattcgtgggccatgcctccataccatttggtcagcagccttccttccttggttttctgccccaggtgtttgatgtcgaaggccggataatccagggcgaaacagttgcgccccatgccgtaaaagggaactccgccgggattgtcggggccgttcttttcgtcattccaggtgggcatgatgatgagcgtgtgctggctttttttcctgtccggatgggctttgaaaaattcgtcaagttcctgggccgctttccagccgcctccgttttcataaggataatgggccgccggatttttggccttgtattcaatgatgttcacgcggcctggggatttgatgtccaggccgaaggaacgcgcgccatagccatgccgctgcatttccttgccgtaaaactgctggaggtaaaggagcagttcgctgaggcgccgttcataatccggaacgggttccgtatcgctgcccagaaaataaacgatattgagctgacgggccgtttttttcagggcaatccggtctttcagggcgtccggaacggtgacttccgcaaaggatgtaccggaggccgctcccagaaagaacagagaaaaaaatgcggagagaagtcgtttcaacatacatgccaaagtaggggcgtcattgttaaagacaaggaaatttactgttctcgccgccattggaggaagcgtccctgggccgggagggaaataatgggggaaagaatccgtcatgtggcggccgataagttcggaatggctgaaagatagaggttgcgaaggcagtaaatatgtgacattgtttattaaagcatgcatttccaatctctatatttatctgccgtggcggtaagtgccgtttctttcgggtggggggctctggataagccttccgcctccaatttgatctggtctgatgaaccggccgtagttgtttatccgcaggaagacaaaaattccgagggcagttttggcaagtacagaaagcctgcctccgtctgggaagcggaggggtatcccattggcaatggtcgcgttggagccatgattttcagcgctcccggccgcgagcggctggccctgaatgaaatcagcctttggtccggaggagccaatccggggggagggtacggttacgggcctgatgccggaacgaaccagttcggcaactatcttccctttggggatttgtttgtggactttaaaaaaggcgaccagccggcttccctgtctgtggaagattttacgcgctccctggatctccgggacggcattcataaagtgaattacaaggcggacggcgtaacgtatgaccgggaggcattctccagcacgcctgccaacgtcctggtgctgaactataaagccagcaaacccggccaattcagcgcggatttttccgttaacagccagcttggagcagatatttccgccaagggatccgtcatcacctggaaggggatgttgaaaaacggcatgaattatgaaggccgcgttttgatccgtcccaaaggcggtacgctttctgcctcgggagataaaatttccgtgaaaaatgcggattcctgcatggtcgtcatcgccatggagacggattacctgatggattataaaaaggactggaagggtgaatctccctccaggaagctggaccgttatgcggccaaagccgcttctgcggattatgccgccctgaaacaggcccacatttcccagtacaaggccatgtttgaccgggtgaaggtcaacttcggaaaaacggaggaggatgtagccaagctgcctacgccaaagcgtctggaggcctataagaaaaatccggcagaccccgatctggaggaaaccatgttccagttcggccgctatctgctgttgtccagttcccggcccggcacgctcccggccaacctgcaggggttgtggaatgattatgtcaaaccgccgtgggcctgcgactaccataacaacatcaacgtccagatggcgtattggggggcggaacccgccaatctttccgaatgccatgaggccctggtcaattatgtggaggcaatggcccccggctgccgggacgcttcccaggcgaacaaggggttcaataccaaggacggcaaacccgtgcgcggctggacggtgcgcacctcccagaatatcttcggtggcaacggctggcagtggaacatccccggtgcggcctggtatgcgctgcatatatgggaacattatgcatttaccggtgatagaaagtatctggaaaaacaggcatatcccctgatgaaggaaatctgtcatttctgggaagaccatttgaaggaactgggagccgggggcgaagggttcaagacaaacggcaaggatccgagcgaagaggagaagaaggatctggccgatgtgaaagccggaactctggtggctcccaatggctggtctcccgaacatgggccgcgtgaagacggtgtgatgcatgaccagcagctcattgcggagcttttctccaataccatcaaagccgcccgcattctgggcaaggacgccgcctgggccaagagcctggagggcaagctgaaaaggctggccggcaacaagataggcaaggaaggaaatcttcaggaatggatgattgaccgcattcccaagacggaccaccgccatacgtcccacctttttgccgttttccctggcaaccagatcagcaagctcaagacgcccaagctggcggaagccgcccgcctttccttggaatggcgaggcacgaccggagacagccgccgttcctggacgtggccgtggcgcacggctctgtgggcccgcctgggcgaggggaacaaggctcatgaaatggttcagggactcttgaaattcaacactttgccgaatatgctgactgctcatccccctatgcagatggacggcaacttcggcattgtaggcggcatttgtgaaatgttggtgcaatcccatgccgggggcctggacatcatgccctctcccgtggaagcgtggcctgaaggttccgtgaaagggctgaaagcccggggcaacgtcacggtggatttttcctggaaggacggcaaggtaagcaacgtgaagttgtattccgcccaacccaaggtgttgcccgtgcgcgtcaacgggaagatgacccgcatgaaaaccctgccgctgaaatcgggagcgggaacttcgcagcccgcggccaggtaaaaaaggaaatccataatccggttttagttcgggaactaaaaatagtcatggcttccagtcctttcgttagggctgggagccttttttatcccggacctttgcggaagggacgttatttgtttcaaaggaggagcttgctgaatggcgcgttccgaaagaaggaattcctctcgggatgtaaagattgggaagggttttcgcaggggcaggtcctttgccccgtcttaaggaaagaagggctgcgctctcatttcttttccatctgcctgagcagggagcaaatggcgcaggaatggagggaacacaggtcttcgtgaatttgaagcaatgcctggtggtgccaggctttcgcaagaaaggcgtgtgcatccggcctgccgcccagcagggattggtggacggagaggacttttgttcccgcctgtccggcccggagggaaagataatgcttccatgcatgttcgtcatctttcatcggaagaaggtggttgatgatgaagtccagaattctatcccggcccatcagggccatggggcggggagacggtggggaaggaagcgttacatgggtgctccagtaggggtgtgtaagggaggagaggtacttcgtcagctcttccgtatgtccggcaaggcaaagacgcttaaacgcatcaaaatctgctgcgatgacggccagcgcccctacgcgcctctgcggatggttggccggcctgttgccggaatacgtccagggaaaggagcggtccggcgccagttcaaattgcgcccgcaggggccaccattgagcccagagttttttgtggagttctacggcttccggtgtgcaggaggccggaagaacgggaaggaggaagcccgccgtaccgaaaagcagggcttccggacagttccggatggaacgcaggggcgcccgcagggccaggtggcgcatggcggttttgttggcgtgatagcccagcgtttccgccaggttttcaaaaagggcctgttcctctcctgcgtatttggcgcgttccgcatggcggcggtgcttgttccggaacctgtaggctgccgctgattggaggagtgtttccagaaactccggagccatggatgccagcagtccggagtggcggcagtggcgtaccggggcgttgccggaaggggatgttcctgaccgcgccagcgtagcggggggaatgacagccagaggaacgcgttcatgcctggcattgcgggtgaaccatttcctgcggctgggcgcgcaggcgaggtgcaggacaacgccgttaaaccccgggttggaaccgtgcccgtggcgttcccagtcttccggcgtggaatccagttcgatatctcccgattgcgggacgccattaatgcatatcctggcgtttagaaagtccggtccggcggatttattccagttcccgaaatccagaatgtgaacgtccctgcctgaatcatccgtaaaagaggttccgaatactccttccagaagaagaagctgaagagtccgctcgtccggaagggcggaatgattggaaacggaatgttccctgacggcggccggcccttcttcccttgctgcggaaagggcttcctcatacagggaggccatggagcgcaggtccatgtggaggggaggtatttttattgatctttctgccgttccaattcttctttcaggcagtcggttacgttgcggaatttttcttcgttctcttcgctcatttcgctcagggtcaaatgggagttgagaacgtggagagtttgctccttggcatccaagtgaacggaaggggcattttcagtacccagggcggcacgtatctgctctacttttcccctccagggggctgtgggcggttcaatgctgagcagggcgtccagccccaggctttccagggcgctcaggcagcgttcgctcggggaagcgatttggacggatcccccgatgggaagcagccgtcgggacaggcccgcaagagtgcccatgaaggtggagtcaatgccggagcaagtttccagatcaatgacgatcagacgccctccggaagcgatgtaatcgtcccccagggatttgacagtcggactattggcaaaacttccgcgtccggaacaccggatccaaagaaattcatcaaaaaggccgaaaaggatggaagaattgttattcacgtcgttagaaaatggaaaccatatgaataacaagagaaacctctgcggtcaagtcaggatttaatttgcgcgccgccggaagaaggttcgttttctcgcatgcagaaccttttcccgcggcgctcttttcgttattcggagggatgcctcaggagttcttggtgccttcccccgtaccgggcaggaaacggtaataggtttccagcatcagcgttgccaggcactggcggtagatgttttcagatttattgctcatgccggaaacgtatcctacgtcatttttccggaaactgccgtccgcattctggccgctgagcacggcgtcccggaatgctttgttgtaagaggtccatacgtctcctccgcggttcatggcagcctgcacgcagtagtaatgcatgtagagattgctcttgacgttttccgtgccgcttccctggccccactggaggtttttgacattgtttttgatccagtccagacccttgcgggcggcgctgtccgagccgttgcccgtcatttgcagagaaagcacgcccacgcctaccagggaggaacggggcatattgccgttttccttataggaaaacttaccgtccggcatgacgttcttgcgcacgtagcttgaggccttgcgcagcgtggagcggatttcccctttggtaggcttgatgccgccgtgttcggcagccttgagggcctgtacgttccatccggtgacggaaaggtcgatgtccggattaatcttgttgttgtagctgtagccccaacccccgttggggcactgggcgtcaataatcctgtccacggcttttacgacgaccttttccagattggagatggaggggatgtccatctgcttgcagaaggtgtaggcttcgcacagggcataggtggctaccgcgtggtcataacagatttccttcagggcgggctgttccgaaaggacggggtttttcatgcctaagtccaccaggaaggaaatgcctttcaggacgttttctccgaattcctcggaaagaggggtttcacagtgggccaggtaggccagcagggaaatgccggtcatggaagcgcggaattgtccttcaccccaggagccgttgccgttctgctgttttttcagccagcggagggatttgactacggcttcctcgcactgcggggtgcccccgttttccgtgatgcgcttcatgcggtcgttcaaatcgcagcgcttggagatgatgccgggaatgcctcccccgtctccgtcgcccgtgccggtgccgaagccgtcgccgatgtcgatgcccatggaaagttcttccgagggaacgtccacctcaatatccgggttgaccaccgcgacgtccgccgtggcgacggcggcgatgaccttcacctgcgcggaggtggaggaactgctggggcgctgggtggtctgggtaacttccggcgtgtcgatgtccgggttgtcgccttcctgggtggcataggcgaccatggggggatcttccggaacggccacgatgatgtgcaccaggtagaggaggaggcccatgagggcgatgccgaggaaggagacggaaatggcggcggtcagtgtcttggtccgctgcttcttcaattccgcaagggcattttcagtactttcaatgtggagactcatagagggaggtgtctggttagcatcaaggcaaaaactcccgcatttctgaaaaatggggagaattgccctgtacaggtatgtattgctggcctgcctgtttacaaggctggcagcatactaaagccagacacgcctgtctgtcaatcagattaggaattcctggtgccttcccccgtgccgggaaggaagcggtaatacacctccagcatcagcgtagcgaggcactggcggtaaattttgtcgttgatggaacctccattgctgttcacgagaccccccggtcccgggaatccgttcggggtgaagcttccatcggtggcctgggctccgagggtggaatcacggaaggccttgttgtacgctttccatacatcccctccgcggttcatggcggcctgtaccccgtaatagtgctggtagaggttggaggaagtattgttcgccttccagttaaacggctggttggtgttcttaagcatccagtccagacccttgcgggcggcgctgtccgaaccgttgccgcacatttgaagggaaagaacgcctacgcccaccagggagggacgtgctgcggcgtcttccctgccttcctgcatgtaggtgaagaggccgtcgggcttgccgcatttccggcaataggccgcggctttgcgcagggccgtgcgtatttcgcctttggaggggcggatgccgccgtgttcggcggccttgagggcctgtacgttccatccggtgacggaaaggtccgtatgagcgcccgccttcgtgttgtaattgtaggcccagccgccgtcggtattttgattgtccacaatcttatcaacggcctttatgacgactttttccagattggagatggaggggatgtccatctgcttgcagaaagtgtaggcttcgcacagggcataggtggctaccgcgtggtcatagctgacttcgttcctctggggaaccagggagagaacgggatttttcatgccctgatccaccaggaaagagatgcccttcaggacagtttccccgaattcttcggaaagaggtgtttcgcagtgggccaggtaggagaggagagccatgcccgtcatggcgcatttgtaattatggggagccccgccccaggaaccgtctttattctgctgttttttcagccagcggagggatttgactacggcttcctcgcactgcggggtgcccccgttttccgtgatgcgcttcatgcggtcgttcaaatcgcagcgcttggagatgatgccgggaatgcctcccccgtctccgtcgcccgtgccggtgccgaagccgtcgccgatgtcgatgcccatggaaagttcttccgagggaacgtccacctcaatatccgggttgaccaccgcgacgtccgccgtggcgacggcggcgatgaccttcacctgcgcggaggtggaggaactgctggggcgctgggtggtctgggtaacttccggcgtgtcgatgtccgggttgtcgccttcctgggtggcataggcgaccatggggggatcttccggaacggccacgatgatgtgcaccaggtagaggaggaggcccatgagggcgatgccgaggaaggagacggaaatggcggcggtcagtgtcttggtccgctgcttcttcaattccgcaagggcattttcagtactttcaatatgcaggctcatacagtatgtgaagcttcctgagaataatagaatgttttcccggttgaggctagttcaaaaattttgatggtctatagggtggtaaatgaccagatatgaacaagatggaattttataatgaacggcttatattggttgcatcgtatgtccgacgggagatcggacatttccgtagcgggagcgcctgccgggacacgggctgtgttcctggtttgccggaggggaatggaaaaggctttttgaagccgggaaggagaagcagcgcaccgggaaccgtttgtctttgaatgtttttatctgtggtcggcagagaaagaaagagcggttccgggagaggagcgtacgaagaaatttgaaaaaacaagccctgccatggaaggcatggcagggcggaaaagagggtggccttttgcgggtagaggcattaatagtggccgcggcgcgggccggtcatccacttccatgcggtttccacaatggccccggcatccttgcacctggcttcccagccgaggatttccttggctttcttcggattggcaatcaggcggggcgggtcgccttcacggcgcgggccgtagcggacgggaatttttttgccggtgactttttcagccgtttccaggatttcccggacggaaagtcccaggccggttccgaggttgaagcattctgtggccccgcctttcatcaggtagtccaccgctttcaagtgggcgtccgccaggtcgttgacgtggatgtagtcgcggatgcaggtgccgtccggcgtgtcgtaatccgttccgaagacttcgatgtattccttttccccggtgagcgtgagcaggatgttggggataaggtgggtttccggttcgtggtcttcaccgatcaagccgtcctcgctgcagcctgaggcattaaaatagcgcagaaaaacgcttttgagaccccaggcgcggtcgcagtccctgcaaactttttccagcatgtacttggaacttccgtaaggattgataggatcctgcttttccgtttccgggatagggatctgggtgggaacgccatacgtggcgcaggtggaggagaaaacaaagcgcttgacgccggcggcttgcatggcgcccagaaggacgaggggcctggcgatgttgttcatgtagtacttgagggggttctggacggattcccccacattgatgaaggctgcaaagtgaatcacgacgtcaaagttgcccttcatcaggagaggatataccacggaggcatctcccaaatcccctttgaccagtttcacttccggatccacgagggctcccgcgtggccgtacaccatgttgtccagcacggtcacgtctgcgccggttttgacgagctggcgcaccgtgtgggaaccaatatatccggctccgccggttacaagtactttcatgattttatcaaatttgctgttgagccggtttaactttttctccggcaaaggcgtccggacattttggagcctgcggaaccttccggttcacggcaggctgaatccctgttccagacgcctgtaaaagtgacatgttttcccctttttgtcaatttgcgatatatcttgccgccgtctctccgttctttgcctgcggcggttggagcttctccgttttcatgccggaaactgccccgctttttactggctcctgacaggcatttttgcgaacatcacttcattatgaaaccgtccgagatcaggaatgttctggaagaccatgaagtgcgccccagcaagtccctggggcagaatttcctgacggatgaaaatgtggcccgctggattgtggagcagctcgaaatccggccgcaggattgcgtggtggaggtagggcctggaaccggctccctgacggaacatgccgtacccctttgccgcaaactggttctggtggaatttgattcccgtctggcggagtaccagaaagagcgctgggccggtgatccccatgtggaggttcaccatgcagacggcgcttcctgggatccgcgggggctgtttgcggaggcccctgtcaaattccttggcaatcttccctattccgcggggggagccatcctccagaatttcctgtccaggcccagtgctgtggaacgtgccgtggtgatgctccagaaggagtttatcgaccgcattctggcgacgccggatgatgatgccttcgggctgttgtccctgcgcatccagaaaaactggattccccgtgcccttaaaaccattccgccggaagcgtttcatccccgtccgcgtattgattccaccgtgatgctgcttactccccgccctgcccgcgagctgcctccatatgacgaccgcctgatggatgaactgatgcgcaaggctttttcccagcggcgcaaacaattgaaaaaacagctccccgcttctcctccgtgggagggcgtggctgcttccctgggactttccccttccgccagggctgaggaattgaatttgtcccagtgggtggaattggcgcgcgtttatgataccaatcctctcaaggatgtggcgcagagcggagatgaattgtttgacatcgtggacgaactcaatcaggtgacggggcagggcacgcgccgggaaatacatgaaggcagccttcgtcatcgcgccgtacatatgttcctggtcaataagcatggagctgtgcttctccagaaaaggtccctgtggaaagacaggcagccgggcaaatgggattcctccgcagccgggcatctggatgccggggaaagttatgaggaagctgcggtgcgggagctgaaggaagaactgggggtgtccggctgcgggctgcagaaaattgcggattttgacgccggagaaaataacggctgggaattcatctccctctatgaagggcggtattccgggaaggttcgttttccggcggcggaggtggacagcgtgcagtggttcacgccggagcaaatccaggcgtgggtggaacgccgtccgcaggatttctcgcctgcgttcattccctgctggaatgcatggctggccgcgaatagaaaaaatcattctaactcaaatacatatcatgataaaccctgatcaattatctccggaacagatccagtccatccggacctgggcggaagaaggactggatttaaacgccatccagaaaaggctgcatgaggacttgaacatcaagctgacgttcatggatacaagattccttcttcaggatctggatatccgcatcagacagccggagccggaacccgaagccgagcagcccggagagcttcccggaacaatgcctccccctgcctccctgctgggaaaaacccaggtaactgtggatgaaataacgcctccccacgccctgatggccggcaaggttttattcaagagcggcgcccagggcgcatgggatattgaccgtaccggccgtatcaactgggacgctacgcttggagaacctacggcggacgacctgagggaatttgaaacggaactgcaatccgtcattcgcagccgcatgggagccatgtgagggaaacggaaaatattccgcttgaaatggactggaagcaggaacttgccgggtggcggttatttccaataaaagccctggctggaatgggaaatgccgcgtccgcatgccattcgggagagaatgtctgcccggaaaaaatgcgcgttcatttggttccatagtaaaataaaagcaacaaaaggactatcatggaaataccggaggaaatgattgaaacgctggtgcctgccgttcgggagcagctggagtcgccggacaccgcttatgtcaaaaactgtctggaacgcctgacggggcgggaaaaactgggggaacaggaagctctggaactgatggcgcaggctctggccattactattaatgcgatggtggtgggaggccgctcctttgattcgggaaagtacaaggcgctgttgaaagatctcccggctcttccggatgaggctccgtgataaatctcgacaatcttcggaattgattcataatcctttctttcacttgaaattttatggcaaaaaaaccattagaaacaggtgctccggaagcgtccgcagctaaaaaaacggctgctcgcaagacgacgaccaaaaagacggcctctactaccaaaaaggccgccgcagctgaaaaaaaagctgctgctgacgccgcttccgtagaagcacccaaaaccaaaatcaaaacggtcaagtccgccccgaaaactgcggtgaagacgaaaaccgcgaaaacagccaaaaaggcggctgatgaaaaggcccctgtctctgaaacggttgttgccccttccgaggccccggcaccttccgctcctgtggaaaaggagatgatgcccgaagctccccagaagccccaggctgccgctccggtcaaggtcaagcgggaatcgttccgccccaatcgcaatgcggaacagcaggagcgccatgaacagcatggcggagatgtctttgcccagccggaaacggtgggcggtgcctccgaaggtccttttaacaagcgcaagcgccgccgccgcaataagaaaggcggcggttccgaagaccgccagcccatgcaggatgccgcttctctcaagcagttggattgtaagaaggtggcttcccgagcctggaaaatgttcctggcggaagtgtctgaagaaggccttgccctgatggacgaccagacggcgcgtgaggcggcccgccgcgctttccgctgtgcggaattcttcatgatggaggaagcgcgccgcaagcatgcccagaaagcagctctccagcagcaggagaaaacttcttctccggaagaggaacgggattccgaagaggattccggcgaagaataattcctgtctgtgttgatgtttttgccctgcggcggatgccgcagggcgtttttgtatcctccgggcttattttccggagtttgaatggccgtgttttatccggtgcattgggaagcagcatgcgccgccctttgccacctgggggcaaaaagcagccttttctccaaccagggcactttttgagaatgggagagcgttggagccgcttggatgaaagcggactttatttcgtgccgttccccgttcttgttcctcctaaacctttttgcctctccatttcccgctcttgaggtaccaccatgccaggaagatcagggtaacgccgtaaacgtgttcggaaaaccagcagagagccacatccggcttgagcctgatgatgccgtaataaatgacggccgtgtaaacagccagggaaatcatttccatgatgaatcccgccctggtattgcctgtgccggatacggcattgaacaggatgaatgacggagccatgatcagtgtggaagaagccatcacatacacggaattgacgctggcggcaatcagggacggactatccgtgaaggcacggaggacggactccggaaacaggcacagtatgatgagcagggggatcaggatggcgtatgtcagtttgagagtcatgccgcaggttttgaacaggcagcgctgttctcccgctccaatctggttgctgatgagagctcctgccgtggtggcaaaagcgctgatcaccatgatcagcagggcggaaatattgcggacgatgttggtaacggccagcgggcgttcccccaaatgttcaatcgccaggaaaaaaataaaccagatagagacggaaataaaagattgcaccatggtccatccggaaatggacagaattcccttcagcagatgggggcggagtgtgaatgcccggcggaagccgtacttccgtttatccgccgtcatgcttgtgtagatgatgaaaaagagaagggagactgcctccgatacgctggaggcaatggccgcccctgctatgcctgcggcgggaaagccgcctttcccaaaaatgaggcagtaatttaacgcgacattgctcaggagcatgacaatggaattgaccgtcagaatcttcgtctgggtaatccccacgtaataggctcggaacatgacgcagaggaaagagaaaaaaataccgtaggtgcgccagtgcaggtaatccgccgtggccccgtacacctgtggggattcaatgatgtcccgcaggatgatgggggaaaaatattgggatgcggcgaaaagggctaccgccaggatcagcatgaaataacagccctgaaccatggtgggggcaatcctgttgtaacggcgttccccgttgcggcgcgcaatgatgatttgtgcgccaaagccgaagccgaatgccagcatgaacatggccatgtaatacacgccgcccagagcgcatgctcccagcgccacgtcccccacgcgccccaggaagacggcatccgtcaggccgatcatatgctcaatgatcaggctgatcatgagggggtatgacatgagccatatcttttgataggaagtaaaagaaggattattcatagcgggggcagcctgcgggcatgatccgccaagggcaggcgctaaaggccaaatatttttgaattaaaatgttttcttgcaagaaagaaatgcgtttgcttccgcacatgtcatgaaaatgggggtaatgccccgggtcagctgagcggcagtctggtttccggataccgcaggggggatttggttggttgtttcatgaaggccagcacgaaagccaccatgcccacacggcccacaatcatgttgaacacgatgatccatttgccggcatcactgagttccggagtgacgttccatgaaaagcctaccgtggcgaaagagctgactacctcgaaaaacaggcgttccagactcaaccgcggttctgcaaaacacatgaccgtagtcatcatgcctacccaggctccggccaggatgacggtgatgacggcccgttccaccacattgcgggcaatccggcgcttgtgcatgaccacgtctttcttgccctgtaaaatgcgcgccacctccccgcaggaaacggcaaatgcggtggtatggactcctcccgtggtggaaccgggattgcctccgatgaacatgagagctcccagaaacagggcgtatggagcgctgttgagcgccatgtccgaaatgttgaatcctgctgtgcgggccgttgcattgaacaggctctcccacaaaatccagtaccacggatcggcagacgtaaacaggctgccgtcaattattttaatcaggaacaggatcagcccgccgccaagcactagcgcggcggtcatgcgtacgaccagccagctgtatgtggaccagtggcggctgacggtgttccgggcatcccagcccagtgcgactctggcccggcggacgatttccagatacatggcgaatcccaggctgccgcaaagcaccatgaccataatggtaatctggccgcccatattgtaggctacgcccggcgtggccaggttatccgcaaacaggctgaatcccgcattgcagaaaccggaaacggaatggaagacggcgtaccaccagagcgtgtctccctccagccccggaacatgtctccaggaaaaatagaggcctatggcgcccagcgcttccaccccgaacgtgacggcaataatattcttgatgaaccggtctacctgggcaatgccttcttcatccagcaggttgctgatggttactttggaacgcaggctcaacccctggccaaccatcagggagacgaaataagtgaacgtcatgatgccgaaagctcccacttggaaaagcaccagcaaaatggtctgtccgtaattggtgaagtgttcatgaacattcagggggaccagccccgtgacgcagacggcgctggtgctgatgaaataggcgtccgtggcggaaaggacgatgccgtccttggtagctcccggcgacatgagaagagttcctcccagcgcaatgaaggcaatcagggtaagcaggaaaagaagggcgggacgaatgcgcgggaggtggaagcccctgttccggcgggcgatgcggaaaaaatattccttgaggttcagcagaggggcggctccgtagcagaggcagagcgcgcggaaaatgttctgaagctctattttggagataaaggtggaatggaaaaagtcgcctgccagcatgaccagaatcaccagccccagccccagttctacccaccgggggttgcggatggccctggcaagccatttttcccgcaaaatgccgatgacgcccgtgagctggcccagcaccaggaaggagagaatttcgcggaaatagcgcagggaaagctggtcttcatgaatttccccgaagccgttccaccacagcagccacatcaatgcggccagtgtgcacaggccgaaccccatttccatgacctcaaaacggttcaatagcggtttttcattagtctcattcacaagcctgcaatggtgatgcctctgatgctggggggagactactgcatacggaaagatttgagaagcccttatatcgtttccaggcggtcccggctggaggcaggaaggcgccttgggaaaaaaattttttcatgtgaaggaaaatagttgccaatccggcgccgccgtgcataataagccccgttcttaccaaaccatgtgcgctcgtggcggaattggtagacgcgctagattcaggttctagtgggggttcccccgtgaaggttcgagtcctttcgggcgcaccaaacaaggccctgcaagttaactgcttgcagggccttactggttttatgatgtattcgtgcattggctttgacgcaacgccggaagattggtgaaggggctggataaggattattgctccgttgttaaggaacgcctgtggttttcaggggagggggcgttgcctttttgggagtggatgcctgcgaattgttcatgcgccagcttcatgaacatgcaggaggaacattttctttcagcggtaatgcgttgcctgcgctcttggtcgtaaagtttctcgtagcgttcggcgcgtttcatttccctccagaggaagatgcccatcacggctgccacggaggctccgttttgaacgtattcaagcaggggattgagttctgaagtcgccatgcaaacaaccgcaagggtgttggctaaaacgacacttgtagtaacggcagtctgggtcatggggctggaaaggtcatgtttcgaaacttctgcgcgcttcggaaatgcttccgaattgatggagctgcaaatgcggcggatctgtaaaggatttccatgttcctccccactccaggccgtcaatttttgcgtaaagtttgccaagagtggtgtaaagagggtgattgggcaggtagttgcggtcctggaaaattccaaaatcccaggccaggccgaagttgtgccagctctggccgccgcgggcattcgttactttagggcgttgcctgtagaggtcattctgttcggcatacgtgcgcgttccgcagataatttttgcttcatatccctggttggcggcttcattccgggccagtttgaaccactgccgggcggctttttgcgcttccggaagaagggtggagatgttccgttcggtgcgttcgtcaaagcatccgatctccattttgtaccggtcggcgtccgtgctccagcgttccgttccgttccgcgtgccgttgccgggaatgccgtcaatggctccgtgatagtacccggccaggcgcaagagcctttgccagtagaaggtatctttctgcaggtcggaaatgctgtcagccattgtcgtggttttcctgttcctttttccggtctttggtgacaatgccgatgaggcctgccgccgccatgcctgcggcgataatctggtcggcaagagcttgttcgatagtggctccgcaggctgtggccagggcaaggaggcccagccatgtggaacgttccgtcagtcgattgagaatgtatttgaacatgtgatggtcggttggtattgaaaagtccctctgtgggagaagggggaacccgcctttccggggatgccaaaggatggggaaaaggtttttccgaatcctctccgccaatggggaaaggggggcatcagttctccgcacaagttgctctgaggttgctgccgcgatttgcaaagattccgcggatacttttattgcttgccctaatcggcaaaatccgtcacaggaaacgatacttgtcttttattcatgaagataccataatgcgccaaccaacgccattatgaataaccgtttaacatcgtttattatccgcagatttctaccatttctccgatatgaatatctcagggaattggaagcgtacctcagaaaagaggtaactggttttcctactgtaattcctcctgaacctttttccgaccgccaacagctggaggcataccgcagggctctcgggcaaactattatttccggcatttgttaccggatgtacggccttaaaaaggagacggacaggatttaccgtattttccaccttttgcaaacgtgcagttccggtgaagctactgcggatttgcgggaatacgccgaatcgttgggcgtttccgtcaacagagatttttccaatggaattgaactcgccgttctgcattttctggacggcaatatcagcttgctcaggcagattgaggaattgcattccattaaaaagaggaaatcgtatcgtattcttccccccatgaaagatgcgcttcctttccccatgattacggagaaagaaagggagaaggaaaaagaaggctgccgtcaatatctgtcccgaattttgtcgcagaaggggatgactgacgtatgcgttatcagctgtgaccggatttcctctgattactggtttaccatcaaacgggggcattatcaggaaaccgttgatgaggttgacacgtcggccaaagagatagtcagcagcatacgtactcccgggaatacggacattgtcatctacagggggagttcgaaatgcctgtacatcaatttacaggtcagcgccagaatccaatggatgatgcgggcctatgccgtcattgctggtcgcatgctgttcggctcggatatttgggaattaaggaaccgctacaccctgagcgtgtttaataagaagcccatcgccgatattgaggtgttcaataatattccgggtctgcgaagggttgctgtttataagcttgtcatgtccaggcctctccatgcaaggaagaggacggagaaagaggtgttgatgaggggatttacaggcacttacaaaagcctttccgagcttggcgatgaagacggccccctgattgtcgtccccagcgggttccatgtggacaaagcgtttttttattttgagtttgaagaaggagacccgaaaaccgtttctttgactcccgattccaatggcctggaattggaaagcgagcaatacacgctcattgatatgtattttgaacaggctggttttgaccagttgtacaataggattcatggagcttaattacggcaatatcctcgatatcattattgaaagtgagagcctggagtctcccgattggatatggaaagccagggtgggcggggatttttatcaggggcactgggtatgcggctgtaaacttgccggaatatccggtgactattacaaccccgacgatatcggcaatcctttgaaagtggtggctctgcctccggaagaagagcctttttacgagtacggagggaaccccggggaagaagaccgcaggcgtttttatgtattgaaggaaccctgctgccgggagcctgttgagaggagcgagcttttcgtgcatgccctggtgttcaggaagattgctttgaatattgcccgttcctgcggaaagacggagagggaaatcagcggaacggagctgattccggagtgcctgatcaggctttttgattttcccgtaaccgcctattttgcttttgcttttgatgagcggctggtttccagatgcctgcgcgtcatccggcaggcacagccggaaaagccctttcttctcttggtgatggggaagcgttggcggactgccgcgatggaggctgcaattgttgagaagtacaaaggcatcgttgtttccattcccgacgtcatggtgacgacgaaagatggatttgcctgggcatacggctattcctgggagtggctcaggcagggcatgcctgtgcatgcgcgcacgggggaaagtcttccaaccggcaccatgtgggaggatttgtggatttccgtgaccgatgagcgggaaatagtcttttcctgttcacggggcggtggagaagtgaaggaattcatgaggttttcctatcgggaggaaaaacgttttttcagcaggcaacgggcggcggcgggccaggattccacgaagccggcttataagatgctgtttttgtacgtaatgaatccggataaagcctgtttggacaaggagcttctggaaagggccgggatagggaatgaggcggaagccaggtcggatttgagaaaagttcttgtggaaaggctgccccagctggcggaaagaggcccgtttgccaagaaaagggagaagtcaaggcagggcatgtaccgccggttccaggtagtgccctgtaaatcttatatccgtcctttggaactgatgctttcgcttgaaaggaagccggaaaggcacaggtaggagggcaggcggttatagaccctccccatgagcggctagctggatgagcttattcgtccagctagccgctttcttttggtaaatatatgaatttcaaataataatgatgatgtgaaagtggggcgtttttcgctagctggataagtccgcacagggttggtgaatatgcacgaaaagcaatcaccacccttgttggaaaccgtggaaaaccacgccttatatctcgctcagcgcctccgttcaaaagcaaaatccatcggatttcagatacctgaggaagagtatctggatgtccttcaacggttcaggatccgatgttgggaaatttgccgccgttaccggaaaagcggcgccgccggcatgaaaacatacctgggcaatgcgaccgtttttgagccggaacgctatttgcgcgagaggaaccggaagaagaggctgctgctgcgggaagcccgtcctcttgaatatgagaatggccgggaaattgatgctgatgagcattcggaattcctttccgggctgatgttccgggaagaattcgcgcgggaaatggaatctctggagccgctggaaagggcgctggttgaggcattgattgacgctgaagggaatttgtcacgggctgccagaagcattcgtctggaggaaagcagagcgcgccgaatcaggaagcgcctccgggaggaaaaattcacttttttaagaaatgggcggcgaatttccggaaacgtggcaagcaatcatagtgaaggcagatgaacgttctttcttttctggcgcatgccctgtccgggacagctccgtgaagagccgtttattcgctttatcaagaaccataagcatttgaaaaacaaaatgatgaatacaacaaaaacatgcggggattccagttcccggcctcagcgttcggaaaattccctttcctgtcccgtggcggatgtcgcggcaggcccctctcatgaacccctgcttcccgtaggcacggttgccggagatatcaggaacaacgacattgtccttccccgcctgaacattgttcaaaacgtaggcgccctttccgggatatttccccccggcagtatcatcctcaacagggaggttgttctttccgacggaagcgttcctctggagctttccgtgctttccgcacgcaagcagtttatagaaaaactcccctttgattccgtggagaagccggccgtcttcaattctctggaagaagtaagagccgccggcggctcggtcggcagagagccgggaaaccggccttctttcgctcccgttctgcatgtgcaggcgcttttcaaggctccggagggcgtggattatccctttcccctggagtacgaaggagaggctttcgggctggctgcctgatccctgcgcggcatggcttattaccttgcggggcgcgacatcctcacggcttccagatttgccctgaggaatgaagtattcgccggcaagtggaagcttacgaccaggctcaggaggctggaacataatggcattttcattcccgcgctgcgcagtgcgggccgcagtacaccggagttttcctccttcatcaggagcattggttaaatttcttaccctccgcaacgaagagcagcgttcatgagcagtccaatcaagagattattcgtcaacgggttcccgagcctctacggaggagcgggaacggaacttcaccaccagatcattgtctggcgcaagatgggcgtggaagtccatctcatcccgtcctgggattaccacggggagcctctttacaacgagatggtttccctgggcgtcattatgcacgccccagcggactggtcggccgtccaacccggcgaccccgtgctcggtttctgcaatgccggcttcctcaacgccttgccggaaatacgcaggcatacgaaacgcacagttttcatcaactgcatgacgtggcttttccccagggaaaaggaggccatgcaaaagggggaaatcgccatgttcctctatcagaatgaagccgtccgccaggaagccatgcccgtgctgcgcaagctcaacggcgacccgcaagtgcagttcctgaccttcaggccctatttccatgcggaatcctttccctttatccgggaacgcgatgaggatttcttcggttgcgggcgcatctcccgccaggatgccgacaaattcgcggccaacaccctgcatatctacggcgcatttgaatcccccgtggagaagcgcggccttttcctcggttttgacaagaggagcgaagccaagataggccggcccttcgactggattcggattgcccgcaatcaaagggaagtttcccagcaggatttttataggcacagccggatcatcctccagccgacggatacgacggagaactggccccgcatcggctttgaggcgatggccagcggcagcgtgctcattgtggacaaccggggcgggtggcggcagatggtggagcacggcaaaacaggatggctgtgcagcaacgaaagggatttcatctactacgcttccaaaatggcctgtgaaccgaatcttcgcgacgacatggcggaggcggcccgggcgcgcggcctggagctgggcgggctggatgtttccctggagagctggaaggaagtgctggaggcgatggcaagactcccggaatgaacatggaacggaaaaccggccttatgaataaaaaatatgtttccccgtgtttcctgcccggcatgcggctgggcaacatcatgttcacgctggcggccgcctgtgcccacgcccgtaccgtaggggtggagtgccgggtgccctgggcttacaatgacgcttccctgatgctgcgctcccggctcggcggctgggtgctcccttctacgccgtgcggcaccaatgaacctccatcctggcaggaaccttccttttcctattgtccggttccctcccgcatccggacgggcgggcttcgcggctacttccagagcgcgcggtattttgaagggcaggaagcgttcatccgggcgcttttcgcgcctctcaccgcggagaaggagcccggcgccgttggcattcacatccggcttggggactacaggcgcctccgtgacaagcaccgcattctggatcctggtttcctgcggagggccgcagggcatttatcatccgggaagaaccgtctggtgctgttcagcgatgagccggacgaggcggcggagatgcttgcgcgcgtgccggcattcggacgctttgcgctggaaatcgaccgcggcgctccgtgcgaatccctccgccgcatgacggcgatgggggaactcgtcatgtcgtgttcttccttttcctggtggggcgcgtggctgggaaatacccggaaggtcatcgttccgcgcgactggtttgtcggcggtgtggaagactaccgggatatttacctgccccattgggtaacactgtaattccgccacgaacccatacccgtaaaacaatgaatacgagaaccgttacaagcctctgggtgggcggggaacttcccctgatgtccgttctgtgcatcaaatcgttcctggaccatggccatgctttccagcttttcacctaccggaattacgacaatattcccgcaggaacgcttgtgcgcgatgcgcgggatattctcccggaggaggcgattttccatgattcccacaatagcctggcgccgttttccgattggttccgcatgaaattcctttcacaggaaggcggcttctgggtggatatggacgtcatctgcctgggtgatgaacttcctgcctctcctctctggttctgcagggagtgggcggaggtggtggccgtaggcgccatggcctttcctcccggtcattccgttcccgcaaccctgtgcctccttgctgaggatccggcgctccgcgtcccctgggactctccggaagaagtccgggccaaggaggaactgctccgccgtgtgccggatgtcgccgatcgccggcgccaggtgccatggggattttgcggccccaccgggatgacgcgtgcgttgcgccactgcggcctgtttgaccgggccgctccgtcttcccacatgtatccggtcccctggacgagatggcgcgactgctacaacggcaacatacgccttgccgggccggaattgtccaatgcctggtgcgtccacctctggggagagatggccaggcgggagccggacgcctgggaaaatatgagccgcaacagcatggcaggcgagctgctggacaggcatctgccgggccacgcctggaagcctgcccccgggccgcgtaaaaaagtgaatatcctggtgggcatctgcagctgcacaggcgcggcgaaccgccgcaaggcgtgccgggagacctggctttcccatcctcaggagggggtggaatgcagatttttcctggggcggcgcactcctttgcccaatgagcccgatgtagtggccctttgggtggaggacgattacaggcacctgcccgccaaggggctcgccttttatcaatatgccctggaacattatgactttgactggcttttcaagtgcgacgacgatacctggctggcgcttgaccgcctggaaagcctctgcgacggccgctatgaccttgtgggcgacatgtccctggcggacagggggtttcccagcggcggagcgggctacctgatgagccgggcgcttgtggagggcattgtgacgcacggcggccgggttcccgccgtcggggcggaggacgtcatcttcggccggctggcgcgggaactgggcgcgcgcgtccatgccacgccgcgcctcttcctcagccatgctccggcgccccaccgcctgaataaccaggtgagcgcccattggtgctctccgggcaggatgcacggcattgaggcccttttccatgatgagccggtggccgtttatgacgccgtgcatccccattggagggacgaactcctgttttttgcccggggccgtttcatgcgcggcgccggcggctgcgccgggcgctacgtcctgcaggacgggcttctcacgctgttctgggatgactgggcgccggaagctctggaaaaaaacggcggcggattttcccgcggtccgttctccctgacccctgccgccggcagccggcagcttccttttccggagtccgtgtcctgacgggcatggcctccattccctgttcttcccatccgtccgccgtggtgcggcacggggaaggaagatgaaccaatccaatcggcgcctttcgcgccgcaataaaacaacaatcatcacacaatgtttaccaacgatcaacaaaatgacgccccctctttgaacaggggttccgcaaacatgattaactccaaccccgcagccgggcttcccgatgcggccagccagcccggcgcgccgagcgccgcagcgcccctcaatgccatgtccacacccattcagccatacggcgcggattccgttatttatgagaaatccgacaacttcgttcagatgtctgttgggtccgatgttttcatgcctccagtcaacgacacctttaccgtcccggaaggcggggccacggctgtggccagcctgacggtggatgactggggcaagctgaccattgccggcccgggcggcacgtttgagctggacctgacctccgccgccgatgaacccggagaactgggaggccaccggaaatggtccaaatcaggctcctttgagttatccgaaggcacgtacaccctctccatcacgcaccagaacatcgacatgccgcacaacggaaacaaccagtccctgtgcaggtactccgtgacggtgaccgcgcatgggggctccagcagcagttcaagcagttcggacacccctccttcctccctgtcgagcagctcctcttcggatgtgccgccggaggaaaaggaaatctgctgccgttgcggtacgtgtacggacgcggaaggcaatgaatacaccattgcggcggaaaaactgccgggtgaccccggcgtggaaatctgcatgtcccaggccgaattcctggccaggggaggggcttcggctccgtctcccgcggccttcagcctccgctccgcggaaaacgcccgtgaagcggcggaagcctgcggcggcctgaaatacgtgagcccgtgggcctggcgcgcccatctggacgaaacgtccggcctcatcaccatggtgccgccggcgggcgccgcgctttacttcaacgtgcaggccggttccgatacggccctgcctgcgggcatttcccgcaagcgcgacttcagggtgcagctgctggatgaaactctggctcctgccgcttccggcacccccgcctacctttccctggtggacgcggacgggcagaaaatccgcttctccgcggaaaccggcgctgtggtcggcatgacctccgcctccggcagggttcttctggcggaagactacttccggaatgtgagcaatacgtatgaccatgagggcagcctggtaagcagctacagcgctgcggaggggctgatgcgcacccggaccggagcggacggagaactcgtcatggcatggtactctcccgccgccgtcacggtcctggccgacggaacatacgaggtaacgggggaaccttataaaacctcctccttcctgtcctcggaagaaaacggcgtgcggaccaccgtcatcacgcgccagcagcgcggactgccggcccacaccatcacccgtacggaagaacccggcagagtcagcatcgccaaaggccagggggacgacaccatcatccgcaccattgaaaccaaccgcctctacggaggcctctcggaacgcattgagaccgtcaggggcatcaacgatgccgagcctgtttcctgcagccgcagcgtcaggcaatacacggacggcggctggctgctggtaagcgaaacggaagccttcaacacgccgctggcgcggacgacctcctacgaatacaacagccagtaccgcgtctcccggatcaaccgcccggacggaggctacacgcgctatgaatacgacggcgaaggacgggtcacgcttgaggcggcgccctgggccggcggcggagaacaggtaacccggaccgaatacgccggcctgcgcttctacgacaaccgtccggctcgtgtcgccgaatcccgggtgctgtccgacggcacggaaatcgaactgacggttgccgcgtatgcctatgagcagtctcccctcatggaacgggttgtcaaaaccgtgactgccgccggttccagccaggaacagacaagcgtggaagaaacgtatggagaagccgccgcctatccctatgccgccgggcaaatgaaattcacccgggacattgccggagtggaaacctcctatgattatgaggcggccgcggaacacggcgccgcgcataaaaagacggccatcaccaaagctggcggcggactggtggccggacagagccgcaagacggaatcgttcattgccgccaatggcacggtgctttttgagcaggaaagcatctgggatggtgaaaactggctgctgctctcaagcggcgcccatgaatacgatgaagaaggccgtcgcacgaaaaccacgcggggcaacggccgcgtcagcgccacgtcctggatgtgctgcggcaagctctcggaaacggacgaagatggtgtcctgacgtcgtacggttacaacagcgcccaccagctggtggaaaccatccgttcggaaatcagcgacggagacacggtcgttaccccggaaaccatcaccacctacacccgggacgctgccgggcgcgccctgcagacgcgccgggacaggggagccatgaccacgacggaaagcgtggaatacgacaggctcggccgtatcgtcaggcaaaccgatgtgctgggccgggtgacggcgacagcctacagcgaagacggccttacggaaaccgtcacgacgccctccggcgctaccctcgtcacggaacgtcactccgacggctccgtacttcatgaatacggcacgggacagcgcgaacgctgccatgtctatgacattgacaataactgtttgagggaaaccgttaccctggccggccagaccatcatcctttcccggaccctggtcaacggcttcggacaaagcgtcgtgcaagtgacgcccacgactgccgggttcctgtatgaccgttccgaatacgatgaacaggggcgtctcatccgcgcatggagggatgcgggagcgcaggagggggtcgtcgccatggcgcctgcgctctatgaatacgatgcctttggcaacatgaccagggaaacgctcgccctggcggagcggcccgctccggacaacagccccatccgggaatatgccttcagcgtggaaaacgcggaggacggcgtctatatggtgacggcgcaaacccgctacaatgctgaggggcagccgcttgtctccgtacggaagcagctcctgtccgaactctccggagttctggaaacaaaagcggtcattgttgacgaacgcggcttgacttcttcggagtggacggagtatgctggaaatacgaaaaaaatccaaaagagcgttatcccctcttcctgcgtcacggctcaaacggtggcggcggacggctttatgctctcgcagaaaaaccacgcgggcatcacggagacggccgcccgcgcctatacggccgcgggcatgaccctgacccgcacggacggccgtggcaacacaacgacgacccggactgacctggccggtcgggccgtcagcgtgacggacgccgccgggaatgaaaccgtgacgcagtacgactcctgccacggcttggctgccgtagtgacggacgcgctgggcaatacgaaatgcgccagatacgatgccagaggccggaaaacggccgaatgggggacggggacgcagcccctgctcctgggctatgacgaggccgaccgcctggtgagcctgaccaccttccgcgcggcgcaggaaggagatatcgcggaggacccctccgagcgcgcggacggcgacaccaccacctggagctatgacgaagccacggggctggaaacgcgcaaaacgtatgccgacggaacgcatgtggacaaaacctgggacgccttcaacaggcttgccacggaaacaaacgcccgcggcatcgtgaagacctgcacttacgaacaggcccgcgggctgctgacgggaatcagctactcggacgccacgcccggccagagcttcgtctatgaccacctcggtcaattgacgcaaatcactgatgctgccggaacgcggaccttcgcctacaatccctacggagaactggaaaccgacaacctgcgagtgggcaaccacacccacctcatcaccgagaaaaaagacgccttcgggcgcagcacaggctatatctacgcgcggagcggcgcggcgcagcacaccgtaagcatcggctacggggaagacggccgcatcgccacggccgggttcctgcagggcagcacgccccagaccttcacctggcaatacatggaaggaagcggcctgccctccgtgatggccatgcccaacggcatgacgctggaatggggctatgaggaaaagcgggatctggtcgctaccatggtctacaaacgcggcgccacaagagttgtggaaagggaatacgcttacgatagcctggcaaggcccgtcacgcggcgcacggcccgccaggggaataccgtcaacgacagctttgcctgcaacagccggagcgaactggcctctgccaccgtcagcggcaggacatacggctacagttacgacaacatcggcaaccggaaaaccgcgcgggaagacgcggaagaagcgaccgcctacacaaccggcccgctcaatcaatacaccgccatcgagcgcggagaagaagccgcctttgaaccggttcacgacgcggacggcaatcagacattgatcaggacatccaccggaatctggcaagttgcctacaacgcggaaaaccgcccggtgcgcttcgtcaatgaaagcgccaaaaccgtggtggaatgcacctatgactacatgggcaggcggcacacccgcaaagtgagcgtcaacgggacggtgagcagctacctgcgctacatgtaccgtggctacctgcaaatagccgccatagatgccgtcagcggggtcttccgatggttcctgttctgggacccgacgcagcccgaggctgcacgcccgctggccatccgcaaagacggcgcctggtacgcctacgggtgggatctgaccaagaatatcacggaaatcttcgggaaagccggttacctgcgcacagtttacacctacacgccttacggagaagccaccgccgaaggggacgtcacccagcccatccagtggagcagcgaatacaacgatgaagaactggggcttgtctactacaactaccgtcatctcaatccgcacgacggaaggtggatcagccgtgatcccatcatggaacaaggagggtggaatttgttcgcgttcgtaaataataatggtatcatcaatattgattatttaggaaaaaaaataataccgaaagatactcctattattgtcattactataaaacgaaaaacaataaaatggaaacagcttgttagagagaatgtatttaaaaaactggaagaagaagaagaagatgcatatgggcactggtgggttgaattgggtaatgagagctatggatggtggccagctgaaggggtggatctactttccactcttacaggagtacctggttatttaaatggtactttagatgcccatgcagcagggatggcaagtatgactagagatgctcatcatggtgatactgcagattatgaatttcatcctgtccttaatactggtatatttttttcaacattcatgaagtatggcaaagaaaaaggaaaaaaatgttgtgatgtgacagaagaaggtataaaaagctgtatacgtaaatttgcatcttcatattctgggtcttggtcctatccatggggacaaaactgccatagttttcaaaaagagatgatgaatatgtgttgtattaaagaaccataaatgttagattatataataaaatgtcaaagaataattttatatatttttatatgattatcttagtggggatatgtattttttctccaatagaagcaagtgctgtggagcaaagtaaaataatgaatcttgtatatgatagtaaaaattctaccggtaaagattttattcttcctgatataggtgtttctgtgaaaactgctttttttatactatgtaagtcaggaaagatgagtctaaaacatacttataaggtctatgctgatcaacagtattattatttcgttgatactttttttgggacacctaaaaaagacgacgatatacgagaaaaatcagttaaaataagtagggataaaaagctgactatatctgatattaaagtggaataatatatatctaatatttaataatacgcctgcaagtttacttgcaggcgtattatttttttgcaagatgccgtcagcggggtcttccgatggttcctgttctgggacccgacgcagcccgaggctacgcgcccgccggccatccgcaaagacggcgcctggtacgcctatgggtgggatctgaccgggaacgtcacggaaatcttcgggaaagccggttacctgcgcatagtttacacctacacgccttacggagaagccgccgccgaaggggacgtcacccagcccatccagtggagcagcgaatacagcgatgaagaacttgggctggtctactacaactaccgtcatctcaatccgcacgacggaaggtggatcagccgcgatcccatcaaggaacaggacggttggaatttgttcgcgttgtaaatagtaacggtatcatcaatattgattatttagggaaaggttacttatctaggcgtcctttagcacatacagcattcactcacgatgggaaaaaatattatactatacatgggcatgtatataaagcagaaggattatcaatacagcattctcattttttctttgatgatgaaactaatattggctattttcctgatggattgcatgaggataatagcgaaggtgaagaaagaaaattgtatatcaaaattctagataatctagatgattgtatattgcgagaatctattaagaaaacacctcctaaaccttatagcttgactagatttacaattaatgtagtatttgaagaacaaagcacattataccaagtgaataatatggggcaaataattccagtgcctttaagtagaaatgttattaaaatcatacaagtgataaatcctgatacagataattgtaattcatgggcattaagagcattgaaaaaatatgacgaattagttaaaaaaatcaaaaaatgaagccgttaattttaacaatatcaggttatttcctgattataatatttataatttttactttggtatttccagtgtcattggattcagatgcatggtatgactggatatcatggatgatgttgattttatcattgattttaaatatattatgtttttttataagtgttttttatataaaaaataaacgtagaacttgggcaaatattatagcttgcattctttctattgttttcatgattatagcattttcattagtttctatagaaactgtaattgttgttaattgatcttgaaatgaaataattttttacgaattacaaccactcagaagctgttatcctctgagtggttatttttttaataagtatatgatcaggagtttcaaaaaagtagggattggaaggacaacgaacttccactcatgttacttttactggaactacctgctataggggctggtgcacctatagcaaaatttgttaaaattcctggattaaatagtagaagaaattcttggtctgctgtaggtaaaacagtgctaactaaattaaaaaaagcactatcagaaaaattcgcctgagagtcattgcgaagtacagtgatcagaattttataattctttgccaggaactaccttgtccttacctagcacgatattaagcaacggaaccttggaatccagtagaatttattctgatagttcgaatttaccattgatgtcacaatcacatataccgctagaggctggtaggtcaaatccatcactttttttcaattatattttcatgcaacattctaccattgttgtatttcgtattgacatagatagacaatcttatacccttggagaaagacaggaagcaataattataattccgttgcactaaaatgtcatctcaaaaaataattaatatttatttaaaacctcgtaaagctttcgttctttcagtagtatcttgcgggattatattaagtttatttttatggaaattttgtaatccagataatattaataatggtgaattacctgttctagcagcaattttttttataggagtttatttaaatattaaattaattagctatcaattattattacgcaatgatagaataatcaaaaaattatggtggcaaaaaaaggagattttatataaagatatagaaaaaattatcattaatgcttcatgtttcgatgcctataaaataggcaaagctatcaatccacaagtatttaaaaaattggaaaaatatcaaatatttgatgtatggattattagtagtaaatgcaatatacattttaaaactaaatggtttgattctgtcagacagatcaatgatgctcttttgctcctcatcgaaaaatgtccgattgataaattacaacgtaatcagtgtactaatttttttattgtacgtgacatcaagatgattgttaaatggattgttgtattttttatattaacatacgtatctagttttttttaatgttaaatatattataatgctctcttgttctatgatttggtaagcacatattaaataatctgaattagataattctataaaggcttccttctgtttatcggacggaatcattttacaggaatggtagtttattaaaaacaattgaaaccaaattaatgtgagaaatattagataataagattattagttaaaaggattcctaagagacttagaagagaacacaattaacaatgtaagtattctacaagttgttataaattgtgggatacttataaggtattaaaaaattataatgaaatactaatggcaacaatgaaaaaaataactttctatacgaattttttgtgcagatcgacaaaattggtatgtttgttggcatgtgcagttttgtgttgtgcctccagcgcgcaggaaattgattttcaagataaggttgctaagccctatattatagcatataacaataggaaatatcaattctgtcctgttgatttaaatatcttgaaatgtgaaaaattcgctgacatatgcgaatctttttttcaatttcatattttctttagcgcctggccggacattaagacgccatctcgagaatcattcattatctgctgtggtaatgttgcttttttcagcaattcctctatatttatgatagaagaccttgtgatttatgttgatagaaagacaagtaaaatctataagcgcgatccaaaaaatattataaaatatcaatgcaacagacaggaagtgtccctaattgaaaaaatgaggaaactggattcgcctgacgatgttgtggcaaactggggaaggtattccaattttggtccaagtaatatgcagcgaatagaggataaagaatttgtcatatggaaatttggtcaaagcagttcccgggctactgaaactcttttcggacaaaaaccgaaaatcaattaaaatgtataaataaaaattgacccaggtgttgtagaagatctgataaccatcagtacgacaacatcggcaaccggaaggaagccttcgaattcggcaacacgacggactatgaaagcaatgaagtcaaccagtacgacagaatggtaaaaaatggcggagcggccttcgtccctcaaaacgatgccgacggcaaccagacgctggtaaaaacatccacgggcatctgggaagtcacctacaacgcggaaaaccggcccgtgaaatttgaaagcgaagacggagggacaaccgtggaatgcgcctacgactccatgggcaggagattcgagaaaaaagtgacggttggagggacaacgggcttccacgcgcgctacctctaccgtgactacctgcaggtggcggagtgcgacttgaccggggaaacgccggaggttgtgcgcagttacatctgggacccctcggaacctgaggccacgcgcgtcctgtccatgacgcgctgggaagcgaacgggacgcaggagaaagagcatctctactgcatgcacgacgcgatgaaaaacgtcacctccctcttcggggaagcgcgcggacgccgcgccctgtatgaataccggccgtacggaggtctgatcacgtcggaaggcaacatggcggaagagaacaaattccgcttctccagcgaatacatggacgacgaacttgggctggtctactacaactaccggcatctcaatccgcttgacggcaggtggatcagccgtgatcccatcgcggaagaaggcggctggaatttgttcgcgtttgttaagaataatggtatagtttttaatgataagaaaggggagaattataacccatttactccgggcatgatgaatcctcctagtacttacaactctccagtatacaatccatcctccatatccattacttattctgccatatgtcaggatgtgggtatatgggattggttgattaatatatcattagctggtgaaattactaaaacgccgtccgattttgatccgaattcgaaatgtagttcttgccaatgcattaagaaattaacggttatcatgcatggaactccaaataaatatttatctggagttagcgctcagtggggagatacttatttatctgagggtgataaatttactgaaatatcagatatgtttaaaaatattaaattttgttcatcatgcgaactagaattgagaagttgtcatcttggagaatatccttttttaaagcaacgtctggaaaataatacaaaatgtaaagtaaccgtatatcaaggtggtgtaaatgcatttttcccttatttaaaatgattaaaaaaataaaaaaatggttttgtattatcattgtggcatttgcagttatttacgccatcaatgttatatatgccggctggtgtgtatttaagacattgaatggcaacaatgatgacgaaatgagatattatgaagtaaccatgtatccgaatagcgggtatgaaggaatatatgtttatgcaaagacaagtttgatatattcctttataccacaagatttggtttttgttaaaaaaagagatggaaaaatctccatatggtatggaggacgtttgttcaagagagggaaagatatttatatgcaactggaggcatctaattctgagaaatacagaaaaatagttgaagaaagatattggatgagtagtgaaaaactggaaaattggataagagatcggggttttataaaaattaaataattattttgaatttttattaaagaatttattattcgattaactggtgtggcaaacttgtaaaagtaaaaaatcatttcaacgattttaatatattaaatagaaataattatgaataaaaaacaggatcttggctcccattctattattggataataggagcagtgactatgagtgtctgatgtggatgcttcctaatcattatcccagagaaccttgggaagatatcgttagagttttgcttgcagcattgttcatatttctcttttttgtatgtccgatgtggatgattatctcaacaatacgatacgatattggaaaacaaaatattatattcgtgctgccatggcggcattaattgctttggcaattttaggaagtgttttatttggtcctctgttaagcattgatttttgatttcactatttgttttctgaaaattctgccgattacatggaaagaaaaaggtgctgtagaataataaaattgatcattgccgacaagtaaaaaatataaatatcagttgaaaaaagataaaaatgataattaatataattttgttctggttattagttatttttggaagtgttgttatcttgtataattggataatattttttagctgtgtaataaaatccaagaattcatcttgcattcccctattgggcggaggagcaatcgttttagctatgaatcttcctggaatagatatggaagaatacgaatctattcccttattattggattatggatgcgttccgctttttattcacacgttttttttcttgatgtataaaggattgaaaggactatttaaatagcgtgatttttttctattaaggatgtttgcagatagcgaagtacgacttaattaaggaaatactggcttttgtgtgcagttatatttcagattgctccgatgagggaagatcaatgaaataagattagagtaaataattccgtaaaatatgatgatatcaaaaaatgttgtttttctatgtagcgcattgctttgctcctgctcagaagatgttgatttgtatcaatccgatttaaataatcattccgttaaaacaaacaggaatgctttatatagatgtccgccggaagagttatgtaaaaaataccctcttaaaaaatattcctggaaagaaaagaaaacaatagccaagtcttttgttattgggacaacaactcaacaagaagtaatagatattttaggagttggtatagtaggaagtgataatcctcccgtcatagatagtttgggttatcgttgtaacaagagcgatccggagtatcctggtgacgaatggctgaaatttcttagattctgcttcaatgaagaaggggaacttgttagttattatgaactaaaagtaccctatcctgttcctcattaatatttttgttatttataccatgttccttccggcataagccggaaggaacatggtatatgaggatgagcaaacattcatcttgccttatccaccggaattttctggtgggaatcagctactcggacgccacgcccggccagagcttcgtctatgaccacctcggtcaattgacgcaaatcactgatgctgccggaacgcggaccttcgcctacaatccctacggagaactggaaaccgacaacctgcgagtgggcaaccacacccacctcatcaccgagaaaaaagacgccttcgggcgcagcacaggctatatctacgcgcggagcggcgcggcgcagcacaccgtaagcatcggctacggggaagacggccgcatcgccacggccgggttcctgcagggcagcacgccccagaccttcacctggcaatacatggaaggaagcggcctgccctccgtgatggccatgcccaacggcatgacgctggaatggggctatgaggaaaagcgggatctggtcgctaccatggtctacaaacgcggcgccacaagagttgtggaaagggaatacgcttacgacagcctggcaaggcccgtcacgcggcgcacggcccgccaggggaataccgtcaacgacagctttgcctgcaacagccggagcgaactgacccgccgccgtcagcggcaagacatacggctacagttacgacaacatcggcaaccggaaaaccgcgcgggaagacgcggaagaagcgaccgcctacacaaccggcccgctcaaccaatacaccgctatcgagcgcggagaagaagccgcctttgagccggttcacgacgcggacggcaatcagacattgatcaggacatccaccggcatctggcaagtcacctacaacgcggaaaaccgcccggtgcgcttcgtcaatgaaagcgccaaaaccgtggtggaatgcacctacgactacatgggcaggcggcacacccgcaaagtgagcgtcaacgggacggtgagcagctacctgcgctacatgtaccgtggctacctgcaaatagccgccatagatgccgtcagcggggtcttccgatggttcctgttctgggacccgacgcagcccgaggctgcacgcccgctggccatccgcaaagacggcgcctggtacgcctacgggtgggatctgaccaagaatatcacggaaatcttcgggaaagccggttacctgcgcacagtttacacctacacgccttacggagaagccaccgccgaaggggacgtcacccagcccatccagtggagcagcgaatacaacgatgaagaactggggcttgtctactacaactaccgtcatctcaatccgcacgacggaaggtggatcagccgcgatcccatcgaggaagaaggcggctggaatttgttcgcgttcgttaaaaatcaacctacctttttaaaaaattacgttgggctaatttcatggggggcaaaaaaggtagctcctgatccgcctcctgatcttcctaagtatagtattgatttttggagaatagggaatatcattcttggatatccggaggtctatgctgctttaataggaacaagggttgattcttttttggcatatgaaacgttcataaaatatctttcaaagacaggtggcgagtataaaatagatcctcaatgtattatagatctcgagagtggcgaatcagatggtctccaagataatattaatttattgacaagattggctatatcatatgcgagagaacataaatgttttgagaaaaaattatatctggattcctgacaacttcttcaagcaagatccagtgaaggaaattatattttaggaagatattacatgacgatgactgttacagtaaattcagattgttccttagattatactgcatatattagcgatatttatgatttcgatcataatagttggctgcaaacgcgttttgccgccttagaaaaatacggttatgctgctccttttaacgtgagaggaaatatttctggaacatatagaaagtataaagaatgatgaaagaaatattgtttattgttttgactttattgacaaattttatttggtttacattttatcttgtgtacatcgggaaattcccgttggtaaaaatacttgtatgttctttaattgattttattgtcataatattatggaacgggggtgaatattttttgcagcatatcatatatgtaattttttgttcaatccttcttggaagtggatttgctggatttattgagtacataaagaatttatataaaaattacaggaaaggtaatttatcatttaaatcaatttttgttattttattatacgtgtggctatgcgctatctgtattggtttagttcagaattgagcaggagaatgggtaattaataaaatatgaaaatgaaatgaataaaaatctgattaataaaattaaaaatgagaaaataaattatattgttgagtggtgggaggaggatagtctggatattgataataatcagcacattcttttttcacttgaaaacgaagatattgatattgttataacagagaaaaatattgatgaaattaattgtgttttgacaaaatttaatatagatatatctatggaatttcatgttaatttttttgatcgtatcatctatccaatatctagatatggagaaaaatattatgaatataaatatggagatgcggtgaataaaattttaaaattcataggtgttcattgtttgcaaaaaaggaagtctctttaaatttatatttaatatttttcaatgggtattattttttattcaacgatattacttgcagaaggaatttaaataatgaaatttgttagaattgaacacacagtgaagaaaatatataggccaataattttccatcattaatgaataacatagctaaatagagatttctttggactcccggtaagttaatttgccggtgtttcttatcagatattttatcctgttacaaagcgcatatgcacgaaatatactgtgacgaaactaaaaagggtaattctgtgatttttaatgattttctattagtctttcttatagcagttgtaaaaaattctatttatcaaacgtgaagaatgatgtctacaggtgacgacgcaatcccgatacaatatttattgatatgcaaaatgcaaaaaataatcttgataaataaatgaaaaaatactaatgattgctggaatgattattggtgcttggataatggtttccttatcgctggctgcttatggggttttttatagtgataaaaatgattattctcccgtttttatctatccatttgaatttgggattcatttttcaaatggtgatgaggtattgacttataatagatatggaaaaagagaatgttatttgtttggaatgtgcatattcggtatttggattcctgataaggatacttatgaggaagagtatattagtgatattttcattggtacatttgaaaattaaatatattaccaagttattttttgctaatacgatttaataatttccaatatgcctgcaattatttaattagaggcctattggtgtttggatgccagattacattggggtacaacataatggaaggaaaattgtcacaacgaatataataatcatatgaaatcatgtatagtatctttagtgttgttttttagtacgtcaaactgtcaatatgatcttaaaacggttgtagaacataatagagatcatgatagtgccattgttgatgatgttcaaatattggaaaaatcatctagtagttcaatatggaaaaaattttatgttaaaattcatggtttagaaaaagatattccaggagaatatatagattctccatatattattgaatacaaaaatagatttattatagtatgttctattaaaagagaatcagttgtttttgttgttacaagaaagaataatcaattggaatttattcctgtaactgaaaaaaataattatgaattgttcatggataaatgtcgaaacatgaaatattatcctattcgttttgtaaatggaacattgcctaagttgagaaatggacagttaatatctgattattcgatagagtgttcttctaaaaaatttcccgatccgtctgatattatttatttagaatttaaaggaatatttgattttgatttcaaagaaaatatattggaattaaaaaatatagaaggatatataaattaattttttcctatgttcagtaataatttgaattatcattgtaaaaaggatgatcaaaatattttgacaatgaatggatgttttttagattggaatttattgaaaaaggaaaacttattaattattatagagtaaaaaatccttacaatactccttcctattgtatgccatatgagcgcgagcaaacattcatcctgtcctatcctctggaatttactgatgagaatcagatactctgacaccacgcccggtcagtgctttgtatgcaaccacttttaggaaatctgacgcaaatcactcatgtctccggaacgggaatcttcgcctaatccctacggagaattggaaagccgacgctttacggcaaacggcattgcctgcaggtctattcgagcgttatgacgaactcagccgtccggatgggttccaaattaagcgcagacgaccgccgcgtccagcagacgcatctgtcctatgacgtggaagaccgcctctccaccctcacggaggaaggcatgaaaaaccttcttctggatctacctcgaaagagaggaagagaacaggttccacttcttgatcaaaaacgtagacgatgaaccgggactggtctactacaactaccgacatttcaatccgcttgacggaaagtgaagcatttactacttatggagtccccatactgacatttctattaccagtgaagacatccgacaagatatctttcaacgaggaagttttatgcaatatgcagtaataattaattgtggctgtaatgaggaaattttgctaaaagataaaaataccccccccatttgtgagagtatggggaaatttttaggagtgctatatatgacatcaaagataaaactgattatatggtttctaaataatagttttctaaattttcagatttaatttaaaaaaattctgttataatgcaatgaaaagaataataaaaataaaagagaaaaatatagataaggaatctgcgattataacgataaagatcatagtttttccaattgtttcatttgtgataattatatttggtattttttttcttgtcggaaagttaaataatttttattatttgccagaaaattatcgaggaaatacattagaatatcatcatgaacagcttgcccaggaaggtttttcttatcttggaaaaacggaaactcagggaatttctaaatgtttagctaaagatatatgtatatatagaaaaaaagtattattgggtttttatcattatatcatgttatctaaaaagaaaaatggattaaagatagattctggaggtcagtatttatctactcctttcaataaattaattttttcatactataaaaattttgttcctaaagaacgtcccccgatagtcaatcgagaagatatacagtagcggctctgcaagaattttttgttagttgaatatatgagtttttaaaatcagtgaatagaatttagatagtctgaatagaaagaaaatatggtgaatgatttttaagtatataggtctcaaacactgtcataacctttataactggctatatttacaatcaagatagtatttgagaaacaaacaacaagtaataatgctaatatctaaaacaggaagtatcattagatcatgcaagtgataagatttttatcatggataatggttgtttattgacattatgaatattaaaatatgatagtctgattaaaaaatataaaaaatgaagccattaattttaacaatatcagggtatcttctgattatgacatttataattttcgcgttgttgttgtctatatctttagattcaagtttatggtatgattggatagcacgaatgatactgatcttagcggtaattttaaacattttatgtttttttatgagtatttcacttatattaaaaagacataaaattttgatgaatattttagctcttattctttctatcactttcatagttatatcatatccggtaattcttgaagaaatttcaattgtcactaactaatttttgcgtattataacaatcagagattaaaaaaattgattgactagtaagtgatgtccggagagacagcgaacttccacgcgcgctacctctaccgtgactacctgcaggtggcggagtgcgacttgaccggggaaacgccggtagttgtgcgcagttacatctgggaccctcggaacctgaggcgacgcgcgtcctgtccatgacgcgctgggaagcgaacgggacgcaggagaaagagcatctctactgcaatgcacgacgcgatgaaaaacgtcacctccctcttcggggaagcgcgcggacgccgcgcgctgtatgaataccggccgtacggaggtctgatcacgtcggaaggcaacatggcggaagagaacaaattccgcttctcgagcgaatacatggacgacgaacttgggctggtctactacaactaccggcatctcaatccgcttgacggcaggtggatcagccgcgatcccatcaaggaagaaggcggttggaatttgttcgcgtttgtaggaaattctccgattcatgtgaatgataataaggggttgagcgaagatgaaatttgtaatgtaataaacaaaaataataaaactattgatgaagttcgtgctggatttgatcctattttgcaaaaaataggtgatttaattcatatatgggatttgttgaaaaagtttaattctaacccagccaatcataaaggggaaaagataactgttatttaaaaaaattcagatttaattattgaaggtgggcgaaattcgtttttccttataagaactcctctcaaagattgcgttagaaaactttgtttttctcgtcgaggttttggaggaagtcggaacaaaggcgaaagaaatcttgccggatctccggcaggaactcccaacgaatttaaaaaaatgaaacctgatcctaataaccctgatagagtcctcatgaaagatcctaatgggaaaactatatcaaaaccaaagccaaatggtttcgatgaattttggaaaaataaacataattagttaatatgaagattaatatttgtcctgaattgtgggaaaagtatcttggcaagtggaatttttctatttttctagattattgtcttgaaataaaaagaaacagaaaatcaattagtattgatatatttgatatattaagagatgaaaaatgtgtgttaattccaattaaattaagtgatgaatacttgtctttttggatgcgtagcagttggacaaatattaaattatcaatttttcaacatttaaaaaatgaaactcttatagtagatttttcggattgtgatatttataaaaagacatttccagtacaaattaaccaatctcataaatatatcgttgattttaacgcttccaaaatgccgaaatggatttacgggacatggcagacaacagatggtttagagtatatgaatataagccgcgacgatactaatttatcaatagccctttggtctgattttggggatattccaccaactcaaaatcgcagttttcgtaagattatttcagtctatgatatagatagttttaatatcaagatgattgtgaaaggatatgattacagtaataagattagagaaatagtaatattattcgattctcatgcgaaagaagtgagattaatttattcgagatcggtagaagctaaacgaatatgaataatgtttagttcttttttatttgatgattttcattataataaattttaaatataattcacttatttttattaaaaactccttccaaaatcatattggaaggagtttttttgaaattatttagaataggccacgacaacactgtcacgactcgaaccgacctagtcggtcgagttgtcagtatgacggacaccgccggaaatgcagccgtaacgagggaatacgcttacgacagcctggcaaggcccgtcacgcggcgcacggcccgccaggggaataccgtcaacgacagctttgcctgcaacagccggagcgaactgacctctgccgccgtcagcggcaagacatacggctacagttacgacaacatcggcaaccggaaaaccgcgcgggaagacgcggaagaagcgaccgcctacacaaccggcccgctcaaccaatacaccgctatcgagcgcggagaagaagccgcctttgagccggttcacgacgcggacggcaatcagacattgatcaggacatccaccggcatctggcaagtcacctacaacgcggaaaaccgcccggtgcgcttcgtcaatgaaagcgccaaaaccgtggtggaatgcacctacgactacatgggcaggcggcacacccgcaaagtgagcgtcaacgggacggtgagcagttacttgcgctacatgtaccgtggctacctgcaaatagccgccatagatgccgtcagcggagtcttccgatggttcctgttctgggacccgacgcagcctgaggctacacgcccgctggccatccgcaaagacggcacctgagttggagctatgacaagtggtgcaattggtagtgctggtgccggtgttggtgctgctcctggatctgtagttggcgcaaggataggtgcgttaataggagatgtcactggttggtggtttggtgcgtcaattgcagaacgtgtatataattggatattcacagaattagaaaaagaagagtatgaagttgtatgtgcaaaaaattagtttttattatttgtagtggtatattagttatatttatttgtaaaattttataaaaatgaatcgaaaaataaataagtactattttgatattaatagtgaagcaaagtatattttttttgaatgcaaaaatggtttgcattatatgctgtccaatttaatatgttcatatattccggagttgccaccgaatgcccgtgaatatccaaacaagtggaattcgcaaaaatggaataaatgtggtaaaaaatggatttcttttttatggcgtagttttttctgtgaagataataactgcgttccttcgtatgagcactattctcatttatatattggttttcagtccagtatggataccctttatttcatgaataatggggcggtaattcactttttctcaaagaaaaaagggaaaaaagagatagaggaaattcgtttttatacaagtcagcaggctgatagaaatggaattcgcattcagaattatctacataattcctcttatcaaaatattcctatttattgggaagggacaggtggtctttatcctcttgaaggaggatttattgtcacaccaagtttttgttccagcggaaagctttgcgatatgaaagcttatgaacttaatcatattgaaaattcacgcagtatcgattttgtgcaaggagcttttagtctggcaaaatatccggaagaaagtcgtgcatttagagagcttccttcgtatttctgtgaactggcagattcctcatttgactatgaatcatgggagatggctatgacatcggaatccattcctctggaacacaactgtgttcatccgttttataagaatgacatatgtatagctgaattggtaattgttaatttaatatgggatccctatcaagattcatatgtacttttgttacgctactctccatcagtagaatcttgtgttatccaacttgttgaccttgtattggaaaaatttcccagtatcagattaatagaaaataaagaaattatatgatgattttgtctaattttgaaaactatttttaatcatcagaagatgatgcgaaacactgaaagctgtcctgatgccaaaaagagatagaaatcttatgcagcggaggaaagcagctatttcagggtactctaaaagtgaaatgtcttataaaaatttagaatgacaatttgaatttttatgatattatcataattgagactaatctcagaagagcagaagttttgttttttaataattatcgattttattaaaatgacatgatgaaaaaatatattatatactgtattattgttgttgtttcagtatttgcttcttttctgttttttgataaatattataagaaatctactcttctgggagagatcagcaatacatatgtctttagctatgatcctcctttaataataggaaatgtaaagattcaggaattatctaaatttaatcaaacacttgctgattagtttcccgatcatcatgtctatgcctcatactgtggaaaagaatgtaccctgaccgtaataatcctttatgattatgatgctgatttttcttgtgcagatagagaaaaactgtggaaactaatttgtgaatgtcaagacagcttgtggtataaacaggatatggaacaaattaaataaaacttaatatttttgattttatataattaatacatgaaaactgtttaattttataaaagctctttctgtttatcggaaggagctttttttacagaaatgataattactttgttttgatagtgatttttttgttgatttttataaaattatgtttcctgtcaaagatattgaccattgtaaaaatgctatgaatctgctaatagttttgagaaaatccttgacgaagtagcagcaatattgaaatgctcaagcaggaactggatgtccatgtttccagatataaagaatatggtttttagtaaaatattatactttttcttgtttccggtcatatttttctcatcttgccatcaaggagggcctccggtgatacagcttccgcagccagtacctgtttacgatatggaaaagctttccaaggatcaggtatatattcaggcggaggaaaaaataatgaacttatcgctgcagcagaagctgcaattggcgagttatattattcattctgcgaattgggagaaaatgttgaagaaagaattcaagcaggtccgcagcggacggtatcaggaaatgttgtccatggtacatcaggatgacgatagttatttaaatagagttattattccatatatccgcttatcgagtaaagataaagatattttatttctgcttcaaaacaatacatacggggaggctattttaagcagggcggatatttttgacttggtagcggaaaattatatagaatatttcccggatgataaaaacgggtgggattttttatggttttatatgaacatgcaagaagaagaggctccctattgtgaaatgatcaaaaaaattcttataaaaaggcatctcaaccgattcagctacgggaagaaaatacgggatatgctcggcaactctccttttagaagaaatgatggacgttgtctataattctactgaaactacctgcaggtggcggagtgcgacttgaccgggaaaacgccggcgctcgcgcgcagttacatctgggacccttcggaaccggcgaccacgcgcgtcctgtccatgacgcgctgggaagcgaacgggacgcaggagaaagagcatctctactgcatgcacgacgcgatgaaaaacgtcacctccctcttcggggaagcgcgcggacgccgcgccctgtatgaataccggccgtacggaggtctgatcacgtcggaaggcaacatggcggaagaaaatgggttccgattctcgagcgaatacatggatggcgaactggggctggtctatcacagtgttcatcggtatcaattcgtttgatatctttggagcggcctcattcctgttggaaatctgtcaacggggattggaaagagataggtattcatgcagagttagttctgtaaattttgttgaggaagtcttttggaattctgtatgggattcaagctgcatccggtatgttccgggtgcagtttttgtgtaaacgggttgagaaagacttgccgttatccgccttccgggaagaacggaaagcgggagcgcagccggaagaattaattttttcttaacaagaagaagaaggaagttaactacccagaatggaatttccggatatattgaggcaatgtttttacattatattaaacatcgccgatccgttccgggactccgtatctgccatagcggtttttccgtgaaattttttcagataaaaaagaaaaacggcatagaataatatttttgtttccatatatgttggaatggtttgaatttaaatttcataaaatatcatgatggaatcattgttgggttttatcttttgtctattgagcggaatattctgtttttggctctttttcaaatgcgtcgactggtttgaaaaaatctaaaactgtgcctgtctatgtatacattattatttgtgattagcttaattgtgttcggttatttgatgtatgtcttgatcaaaccggaaaaattttaaccagcaagatgatgaaaacagaaattctaggtgttattgcgcaaatcgttcttatggtggctttgagctatcctctggggaaatatattgccaaggtttacaagaaggagaaaacatggcttgatttcatgaagcctgttgaaaggctgatgttccgcctgtccgggattaatccggaggaagaaatgaactggaagcagttcctgcgggctttattgaccgtaaatctgttctggttcgtatgggggatggttcttctggtcagccaggggtacctgcccctcaatccggacggcaacgtcggacagacgtgccaccaggcgttcaatacatgcatttcattcatggtgaattgcaacctccagcattacagcggggagagcggtttgacctattttacgcagttgttcgtgattatgctgttccaatttattacggcagctaccggcatggccgcaatggcagggatcatgaacgctctcagtaagaagacaactaaaacgattggaaacttctgggattacctcgtgttgagttctacccgcattttgctgcctctttctctggtggtcggattcatcctgattactcagggtacgccgatggggtttgacggtaaaatggaagtgacaacccttgagggagtggaacaaaccatttcccaagggcctaccgcggctattgtgcccattaaacagttgggaacgaatggcggcggttattttggcgttaattcatcccatccgctggaaaatccgacttacctttccaacatggtcgaatgctgatccatcctgattattccgatggcgatggttctggcctttggtttttatctcaagcgcaagaaactgggatacagtatttacggcgtgatgttgcttgcctttttaattggcgtttgcattaacgtgtatcaggagatgaacggcaatccccgcatagaagagatgggcatcgtccaggaaagcggggctatggaaggtaaggaaatccggctcggatccgcggctacagctttgtggagcgtcgttacgacagttacgtcaaatgggtccgtcaacgggatgcatgattccaccatgcctctttcaggcatgattcagatgttgaacatgcagattaatacgtggtttggcggcgtcggggtagggtggatgaattatttcgccttcatgattatagccgtgttcatcagcggtctgatggtgggaagaacccccgaattcctgtgcaagaaagtagaagcccgtgaaatgaaaatcgcttccattgtggcgttgctccacccgtttgtgattctcgtcggaacggctctggcttgttatctgtttgtttacgcgccgtcgtttgtggaaggcgaaggagggtgggtcaataatcccggctttcatggattgagtgaattcctctacgagtatacttcaagcgctgccaataacggttccgggtttgaagggctggccgataatacctggttctggaattactcatgcggcattgtcctcattctgagccgtttcatcccgatcatcggccaggttgccatcgccgggcttctggcgggcaagaagtatattcccgagacgtccggaacgttgaagacggattccgtaacgttcagcgccatgacttttgccgtgattttcattgttgcggctttgtccttcttccctgtccatgccttaagcaccattgccgaacatctgagtttgtaaatttagggtagaataagtttaccaccaataacatatttacatatttccgttccagtttctggaattgaaaaagaaatctacgatatgaaaaattccaataatacttccctgttccaaagggaacaggtacgggaaagcttgaagcagtcattgatcaagcttcatccgggaatgatgatgaggaacccgatcatgtttaccgtggaaatcgccacgatgatcatgcttctggtaaccgtttattccctcttcagcgacggacaaggggatttcctttataatttcctcgttttcgtcattttgttcctcacccttctgttcgccaattttgccgaagcgattgccgaggcccggggaaaggcgcaggccgacagcctgcgcaggacgcgtgaagaaacgccggccaagttgattgtcgatggcacggttaccgtcatcaatagttcccagttgaaaaaaggggattatttcgaatgtgtcgctggagatatcattcccgccgacggggaggttgtcgaaggtctggcttccattgacgaaagcgctattacgggggaatccgctccggttatccgtgagtccggcggggataagagttccgtgacgggcggcaccaaagttctgtcagaccgtatcaaggtgcttgtcaccgcgcgtcccggagagagtttccttgataagatgattgctctggttgaaggcgcttcccggcagaaaacccctaacgagatagcgttaaccattttgttggctgtctttaccctggttttccttgtcgtctgcattaccttgaagccggcagccgattattccggaacggaaatcagcattgccgccctgatttccctgttcgtatgtctcattcctacgactatcggcggattactttctgcgatcggcattgccggaatgaatcgtgccttgagggccaatgttattacgaagtcagggaaggctgtggagacggccggggacatcagcaccctcctgcttgataaaacgggtacgattacgattggcaatcggaaagcgacgggatttttccctgtccagggttttgacaagcaggcttttgttgaagcctgtctgatgtcttccgtttcagacgatactccggaagggaaatctattatcgagcttggacatgaatacggcgtccatatgcgcaaccttcatacggagggggcccgcatgattcagttcacggcggagacgaagtgttcgggcattaatctgagcgatggaaccgaaatccggaaaggggcttttgacaccatccgcaagattgccgaggaagcgggaaatccatttcccaaagaagccgaggaaatcattgaaagagtggcgggcaatggcggcacccctcttgtcgtctgcatcaacaggaaggttgtcggcgttattgaattgcaggatatcatcaagccgggcatagaagagcgcttcgaacgcctgcgcaagatgggagtaaagacggtaatggtgacgggggataatccgagtacggccaggtatatcgctgaaaaagcaggcgttgatgatttcatcgcggaagccaagcccgaagataagttgagttatatcaggaaggagcaggcttccggcaaactggttgccatgatgggggacgggacgaatgacgctccggctctggcgcaggccgatgtcggcgtagccatgaacagcggaacccaggccgccaaggaggccggcaatatggttgaccttgataatgaccccaccaaattgattgaggttgtagaaataggcaagcagctgctgatgacgcgcggcacgttgacgacgttttccattgccaatgacgtcgccaagtacttcgcgattgtgcctgcgctgttcatgattgcgattccagaacttgctgcgctgaatatcatgcatctgcatagtccggaaagtgccatcctgtctgcgattattttcaatgcaatcattatccccatcctgattcctctggccttgaggggcgtggcgtacaagcccattggagccagcgctctgctgcttcgcaacatcctgatttacggagtgggcggtctgattgctcccttcatcggaatcaaactgattgatatggctgtcggcctgtttttttaactgaaataaatatattgttatgagaaatttagtgaaatcattgcgtcttacacttgtcttttgcgtctttttctccatatgctacatcctggtgctgtggatattcggattgattgccggccctggcggaggaaatgcggaaaccctggttttgaacgggcgcgtggtaggcgccgccaatgtcgggcagcaattcacgaaggatatttatttctggggccgtccgtcccatgcgggcgacggttatgacgcgtccagttcatccggcagcaataaggggccgaccaacgaagaatatctggccgacgtgaatattcggatagattcgttcttgaagaaacatccttatttggaacggaaggatgtcccttccgaaatggttacggccagcgcttccggcctggatccgcatatcactccggagagcgcctatgtgcaggtgaagcgcgttgccaaggcccgcggcatggaggagggggcggtgaggtctcttgtcgatcaggccgtggaaaaaccgctgctgggcatgtttggcacggagaaggtcaatgtgcttaagttgaatattgctcttgagaaggctgatccttcagggaagcattaatttcctgattgtttagggcggcaatggcgattccggatttggtgataaattgccgccttgaaaaaatgaaatcaattgcgggcttcatgtcatggtaacgcccgcaattgattttcattttcaaaagattctgtaaaatcaacaagatgtttttaaccgcaggagccgggtgaatttaatatgattgacggaagtaacggagcagagcactttcttgacctgatacggcgttctcgaaggggaaagttcaagatttacattggtatgatggccggagtaggcaagacgtaccgcatgctgcaggaagcccatgaattgctgaataacggcattgatgtcagaatcggttacgttgaaacccacgggcggcccgggactgaagccatgctccggggggtgcccgtcatcccgcgtaaagtggttttttacaaaggcagggagattgaagaaatggacctggacgcgattcttcaagcccggcccgagttggttattgttgacgaactggctcataccaatatggaagggagccgccatcgcaagagatgggaagacgtgatggagctgcttgacgccaatattaatgtgatttccgcgattaatatccagcacatcgaaagcctgagcggcgaagtgaaggagattacggggattgagatgaaggaacgggttcccgacaggattttgcaggaggcggacgaagtggtgaatatcgacctgacgtccgaggaattgatcggccgcctcaaggccggcaagatttaccggcctgaaaaaatccagattgccctggataattttttcagaacggaaaatattcttcagctgcgtgaactggcattgaaggaagttgctttccgagtggagaaaaaagtggaaacggaagtattcccggcagtttcttccgccagaagggaaaagattctggcctgcatcagcagcaatgaacagacgccccggcgcatcatccgaaaagcataccggatttcctcgcgttacagtacgtcgtttatcgccctttacgtccagacgccaagggagtcccccgaccgcatcaatctggcgtcccagcgccatttgcttaatcatttcaagctggtggccgaactgggagggacggtgaagcaggtgagtgcggaagacataccccaggcgatcatcgcaacgtgcagggaatatcatattacggctatttgcatggggcatcccgcattcaaaatgcccggagccatgttcaagatactgggatataaacaatttctgcgtgttttgtcggagatgaagatagatttaatcatcattgcataaaaaacagcggtaaatttgaaaataaggccggagccggttcttttcacaggaagcaggcgatgagattatcatgcttgtcttccctgagcggaacggattgttgccggcagtttccgttatagcctccccgggggcgttttccgttaccattcccgggcggggcggccccttttattttttccgtctggttgtctgaaaaacagtccaatgttccggtccgccgcatctccggcagcacctttgttgaaaaagaatgtagaattcccggaggagcagcattcttaaaagtgaaacgataacgttccgtctcccatagaggagcggcggttatcataaacagaaggaacagttatgagcatcaatttgcaaaaagtcattatcgccgtatgtgcggccgcaacggtcagtgcgggattcgcagcccgcaccgagggggccaaactgcaccgattcagcactactattgaaaaagagaggccgcagttgaatgaagaaacgaaacggttgattgcttcctatcgccggaacccgtccgaggctaatcggtcggctttgaggaaacaggtcgggattaattacgacaaggtccttgaccgaaaaaaggcgaagcttgaagaattgaaacgaacggcccggcatgcgtccaagatacaggaaatgcaggagatcgtggatgaaatggttcaaaacagggaagcgcgcatcgaccaaagcatgcggcgtttcagtgatccgcgattcagaccaggtgcccgctatgcagatggcgggtatttgccggtgctcggagctacctggaatgtatcaattgcatatactccggttaccaatgaggattatgcccaattcctgaaggcaacgggaaggaaggctcctaaggattgggataatggcgccatgcctgccggcaaagggaggcatcccgtggtgaatgtttcctatgacgacgcttctgcctattgccaatggttgtcgctccaggataggaaagccgtttaccgcctgccgactgaagaggagtgggagtttgccgccgggcatatgcccaagaatgcggattttaattgcggcgagagaaacgggacatctcccgtggacgcccatgccgcgacatccggcgcctgcggagcgattgatatgtggggcaattgctgggaatggacttcttctccagttgaagtttccaaggctgtggcacacggtaaaacggtcatggcggtgaagggaggttcctggcgttcgccgcggacgagctgccgaactgagcggaaaggagaaggaagggaatcttctttcgctttcagtgatgtcggtttccgggtcgtccgcgaaggttgagggggattccatgcgtttcagtttcttacaggcaatagaatctggctggcagacctgatggaaattccggccgaattggtagatttccctagggaactgcattcttgaaaagtgaaacgataccgtttcagaaaaaatatcaaccctcattgattatcatgaacaagctcatcattcctgcaattattggaatattcggtctggctcccggtacggttactgccaacgcggcggaatcaacaacaacctccttttctgttcaaatactgaaaaagaaaccgaaggcgttgaagtacggcctgaaacacggcctcaagaaaggtttgaaacacggtctgaaaaaaggcaggataaacggcggtaaaaaatagtcgccgccatcttatctgctgccgggcctgcagcccggcagcgttttcccatcaataaggacgttttatcacctgtagtgcggaaacatatctgacttccgtacagctttgatacattgcccatcatgtcttaaaaagtcaacatattgagaagaaaggcgttttatggtaaaatggttgttgtgcggagccgccatgattcccggcatcgtgatcgcggctgagacggaaaatcgttcattccaatttggaaattttgaggtgattgctgttcaggatgctctttcagcgatgcggttcgaattattcccgggtatgccggaagaggagttcctccgcttaaccggaggcgggaggattccttcttccgtgaatgttttcctgttgaaacgcggcgacggaaaaatcattctggtggacgcagggaacggaggaaaacggggcgggatgctccgtaaacttgaacagagcggcgtttttccggagagcgtcgatttcattttactcacccatatgcacggcgaccacatcggaggattgcttgggaaacatggcgaagccgttttttccagagccctcgtctatgtttccatgccggaatgggaattttggcaaaatggtacggccggaccacagggaaaacaggtccggaaggtgttgcatgcttacggcagccgggtgagaacattccggtttggagaagaagttctgcccggcatcaaggctcttgacgcttccgggcatacacccgggcataccgtttttgagactgattccctgctgattgtcggagatttgcttcatgctgccgcgctccagattccgcgtccggaggtttgcacgatttacgatatgaatccgtccggagcggttcaggcccggcggcgcttttatgagtttgcggcttcttccccgaagccggtcgccggaatgcacctgccgtatcccggaatcggccggataggaaggagtgcggcgggatatgtctatctgcccggaaaatgagaaaggataaaaaagacacggtacaatgacgcaagcagaaacagcatgcccggatgtctggggaagccatttccttgaataccggggaaggcttcttgccctggcccggaggaatttgaatccggttcttgcccggcgcgtttcggcggaagatgtggttcaggaggctctgctggcagcctgcgggaaaatggctttttttgaaaacaatccggagattcctgtctatttcaaactgcggacgattctgttccagacccttacggctatggaaaggaagcatctgcaatgcctcaagagagacgcctgcagggaagtgaatgtgacggatgacggcgtggggcccgctgcccggttggattggaaccggtttgcagataccgtgaccgggcctcttacccgtgccgtcagggcggatcgttatacattgctccggaaagcggtcgaggcgctgcccgaaaacgatcggcagattcttgaactccgccattttgacgacatgtccaatgcggattgtgccgaagtcctgcatattgggccgaaagccgcaagcatccgctatgtgcgggcgctgcagcggcttcggaagctgctgatggagttaaccgagtttcagccatgaaggggaagatttctctggaagatctggttgaacaattcctggatcagtgccgttccggcaatgttcccgatattcaggattttgccggggcgcatccggagtttgctgccgagttgctggctcttcttccgcttgtgatggagatggaagattggagcgttgaaaaaaaacagggaattatgcctccggttcacgattttcccgatttggagggggacgattaccggctgattcggagactaggcagcggcggtatgggggtggtatttgaagcgctgcaattgtccctcaaccggaaagtggccgtcaagctgttgtctccgttgctgctgcaggatgccgcccaacgcatccagtttgagcatgaggcgcatgtgattgccaggcttcatcatcccaatattgtcagaattttcagtgccgcgtgccgtccgggatgttgttattatgcgatggagttgatagaaggcaagagtctggacggatgtgaattcagtaatccgtatgagatagcccgtattggcctccaggccgccagggcgattgcgtacgcccaccgctgcggcattctgcaccgcgatatcaaaccggcgaacctgttgctggatgaagcgggggaagtacacgtcagcgattttggacttgcttttctgcttcaggagagaaatgaagttattgagaaggaaggagctcagagcggaacgctgcggtatatgtccccggagcggctggtgcatggagtcaataccttttccagcgatcagtatgcgtttggggtgacgctttatgagcttgttgcaaaatccccgccatttccggggctagctcctgaagaattgatggaacggatttgcagggaaccggttccgccgttgaagtgcagcgaacccgacttggccgcgattattaacaagtgcgtcagtttccgtccggagtcgcgctatcgaagcatggacgaactttctgaagatttgctgcattttttgaatcatgaaccggtcggggcctcctccccgtctccgtccaggcggttgcagctgtggatgaaacgtaaaccggctgttgccgtattgtctttggctgcggccctgtgtgcggccgctttcgttgtcgcgttggccgccggttatctgcagacggcgtctgcgctgaaactggcggaaaacaatgccgcagttgccgatgcggctttgtcacaagtgttcacccgtattgcggagcagcccccttcacagaaaaatacgcagctgctttcagctttgctgccctattacaggatgatcgccagaggaaaaaatctgccggagtcaaaggtttgcgaggccaatgacgtcatcggggaatgcgcactgcgcaccgggagttatgctcttgcggaagaagcgttccgcaacatgatgaaattcaggaaagacgcttttcccatcaaccagttggcgacggctttgaaaaaacagggtaaagataaagaggcaacggaacttttccggcaggtggccgaccgctttgcgatgtcggagcgggcggaggatcggtttgaaacggtccgcgcgttgctggctttgtccggttctccggagagtgttgagcgttcccgggcgttcggaatgttggaaacattgttggaggatgatcctgaccatcctgaataccgttttcaatacgcacagcttttggccggaaatccccgccttttccggaagaggcgcattcccggcattgaaccgaatgcagccgtgctgctcctccagcttgccgacgcccatccggaacggccggaatacggcttggcgctggtagagctgatgctgaagaaactccggtatgccaggaatttccgggaacataaccagagggaacttgccgatacggtgaatctttccgaaaggcttctcgggcgttggccgaatgatccgcaggttatttccggcatggtccggctgcatgcacggtatattggggccctgcgacgcgaaggaaaagatgcctgggcccgaagggaaagcgaccgcctgcagggcatcctggaagttcttttttacaatcccgagatttccgatgccgtgaaagaaagcctgatccgcctccagcttcaacgtttgaaactgttacggcatgacggccggagttatgaaggagcggagctgcggaaaaaaatcagccgggagctgggcttttaccacggaccgatgctccgggtgttccgggatgagttggagaaagccgggccggatgatgaatcctccgtcgggaaaagtgaagattccattatttttgaacgcaccaagcaaggtttgtaatttgtccgcttaccggcactcagcaatttgttgtgtgaggggaaaaggaaagcgtcccgttccgagcggcgctggtgcagaagaaggcgggtatttgcctccgttgcaggcggagtgtcagatgcgttcctgatgcatctttgttttccgagccagctttttgttccaaggcgcttcctgagataaattgctgtattcccttgttgacttccagttggtggaacccatatgctcggatgatatatcaaaatttcaaccatcaacgtttaatgagcatgtataaacactattctgacggccgccgccgctttctcaaaatgtccgccttgttcggtacgtctgcgctgatttctccggccattgcccgggcagagggcgggggtgccgattctccggaaaacggcggctttgccgcctcccggagccggacgcttggcaagggttcctgtgccttggaagcttctccccttggcttcggagtcatgggaatgacctacaaccgcagccagtctccctcgcgtgagcagtgcatccggcttcttcatgaggccgtggagcgcggagtgactctttttgatacggccatcatctacggccccctgagcaatgaacttctggccggggaagctctttcccccttcagggggaagatcagcgtcactaccaagttcgggcacgaagttattaacggaaaggggacgggccgccaggacagccgcccggaaaccatccggcgctactgcgacgagtcgctgcgccgtttgaaggtggacgctattgaattattctaccagcaccgctttgatcccaggattcccgttgaagatgtagcgggaaccatctccgaactggtcaaggaaggcaaggtgcggcgctggggcatgtgcgaagtcactcccggtacaattcgcagggcccacgccgtccatcccctgacagccattcagagtgagtaccatctcatgcaccgggatgttgaaaacaatggcgttctggatgtctgccgtgaactgggtataggctttgtcccctacagcccgctcaacaggggattcctggggggctgcatcaatgaatacacgcaatttgacccgaacaacgacaaccgccagaccctgccgcgtttcacgccggaggccatgagagccaatatgcgtattgtcaacattctgcaacagtttgggaggacgcgcggcatgacttcctcccaggttgccctgggatggctgctgcaaaaggctccttatatcgtacccattcccggcacaactaaactgtcccatctggaagaaaacctgcacacgcttgattttacctgctctccgcaggagtgggcggaactggagaacgccgtagccgccacacccgtgaccggagcacgctacaacgcggaacagcaaaggcaagtagggcattgacccgatttgtttgccgggatcaacggcaatcgcaacggcggcctccgcagaacgttcgtcaggcgttccatactatccggaattccttgttgattccgtttttacggattgtctgaaaaacatttccttctgaaagcattctgccggaagaaggggatgtgttgttgcgtgaagcgagtagcctccatttgcccctcccggcagcaggcccaggcgtcagcaccttcttcaaattttttgtttcaggaaggaatccatccattccgggttcacctgtggcagaggttcgcctttgtcatatgcctcgcagcactggccgatatactccattttgattttggagtatttcaggcattttttcagttcccgaatgcgcgttttcatggcctgatgcccttcctgcaacatgcggtaacgttcgcgcaatgtcgaattaccttggcgaaccaggtgaaaaaagcgtttgatctccttgagttccaatccagaatgcttaaggcaaaccagccccagaagttcttccatttccttgcggtggaagacacggcatcccgccccgtttctcgggatgtccaggattccttcttcttcaaaaaaacgcagattggacggcgtgatgcctgtcaattccgagacttccgaaatggaaaggcacatgtctttctgttctccaagttctgatgcgtcttgcatgaagacactatggctttttcttaggctgcgggaaacgacaatttccgtgtatgggcggggaagccggttattattgcctttttaaggtacatggcattcattttctcaaactgcatgcggccttccgttttttctggagtttccagcagtgctgttccggttccggtgtatttctcatattcctttacatcaaaggttccgggggatatggtccccgcgtttttcagcaaggcaatgattcttttcaactgtgattacagtgaaggcgcccatgcggatattctccgcagaatggcggaaacgaatatggagcagactgccggttacggggaggacccctattgcgaccaggcccggaagctgattgccggcttgtgcggcagaacggatctggatatccatttccttatcggcgggacccagaccaattttacggtaattgcggcggcgctgcgcccccatcaatgcgtgctgtgcgcggacacaggccatatcaatgtgcacgagtcgggagccgttgaggcttgcggacacaaggtttccgccattccttccccggacgggaagctgacggcccggcaaattgaggaggcgtggcacgcccactgggatgacgagacccgtgagcatatgcctcagccccggatggtttatatttcccagccgaccgaattgggcaccatttattctaggaaggaacttcaggaaatttccggagtctgccgccggcgggggctgtatttgtatatggacggagcacgcctcggctacggcttgtgcgatgaggacaatgacctggatttgccggcgattgcctccctttgcgatgctttttacatcggcggcacgaaggtaggcgctctgtttggtgaagccctggttctgcggcatgaggccctgaaggaggatttccgttacatcgccaagcagaagggcggccgtcttgcgaaagggcggcttctgggcattcagttcctggagctgttccgcgacggcctttatttccggctgggcgcccatgcgaaccgcctggctgtgatgctgcgggatttttgccgttccagagggctggcacttcccttttccagcggaacgaaccaacagtttgtcacgatgcccgattccgttctggaggagctggggaggaaatacggttttgcctatctgcgccgggaggatgaaacccacagcacggtgcgcttctgcacgagctgggccacccgagaggaagacgtatgggaattgatggcggatatcgcccgcctgtgctgaaatttccctccgtccggcaatgccgggaaactgtggaaagggccgttcccccattcgtttgcggaaaagcatttttgtctttccgggaggaacctgttgagccatgatatggttatgcccttaatcgtgggacaggaatggcggaggagaatttcccgcatgcagtggctgctgaatgccgtgctggcggtggagtgccttagcatgcctttttttgccgccggggcggtagctggtatggtctggtacggcggacgcaggatgggggctgactggggctggctggcgggaggcgcccttgccgccgcaggtttatttttggcggtgtgggggtggctgcggctccggggccgttttttcagcaggcgtgatacggcggcctttctggatgaacagctggggttgcatgcggcgttgagcgccggtgaggaatggggcaatgccgtggaggcaggggaaagcgcggtacaggggaattccgtgctgcggatacgttccgcctggtgcctggcctggctggcgggaggcgcggttcttatggcttgcggggcttttttgccgttgcccgcgccgcaagccgtagggcagcttccggatttgccgcccgttctggcccgggtgggggaagtcctggaccgcctggcggagatggagagcgtggataataagagcctggagcctttccgggagcagttggaggatttgaaaagaatgcaccggaatgagatgtattcccatgccggactggaagcggcggatgccctgaaggggaaaacggcagcggccgttgccggattatccaatcagatgtatcggacggattccgccctttccctgctgaacagcctgaatggagcgtccagcccggaggcgatgcagtcccttcaggaggcgttgacgggaatggagtccctcgccctgcagccgggcggcatcatgagccgccagctccaggagctgaaggcttccctgccttcccggcagattgatccggagacggccctccgtctgcgggaacagctggaacgggccgcccagcagctgcggagcatgtgcgggcagtgcggcatatccctgatggcgtctccggatgaccgtaccgtgatggaagccgggcagggagagggaagtgaacccggacgaggaggaatggggcgtggacgcggggacgctccccttgcctttgagatggaagagcgcccccggcttgacacggtttccagacgggcggttcatgaggacttgagccgcgccgctctgggggaagctgcgggggtggagtcggcggctccctccccggaaggggcaggaaatggactggaacacggcggccggggggctcgtccggcccgaggtggagatgccgtgtggtctgattgccttactcctcaggaacagtcagccctgaaggaaattttcagatagattgattgttttctcctgaaggccgggagcgcgtaaccctctgccgcggttttccccggggaagcaggccggtcctggtaaacagagcgtccagaacaaggaggacgcaggcgctccacagcaggatgggacggagttggaggcatgttccgggcctcggttcccggaaaatggagggaaggtccatcctttccctgcctccgatccggttcaccaggtccagaaaggcgttgccggattcaggcggcatggcccattccgggtccacctgctggctgacagggccgaaggggataacgctgccgccgatgcggaccgcgccccgcgccatgactccgtgcgggaggggaaagctgcactggaatattcccggctgcaggtgttcccagatgccgttttgtgtacgggagctttcttttccggagagttccagggatatttccggcatgcgttccgccaggcgcgggatgttttcctcactgtagtaaaggcgaatccgtaaccggtctcctgccgtgtccgcccgcacggagtatccctgtgggggatttttcctgttgagccaccgggccagggtttggataaggtctccgtagccatcccattgctggatgttttttccgagttctcctcccatggcgaacgtaacggcggccgtccgtcccgtccccctgttccagaaggagaccaggggcgccgcgtttccgtcttccgttacgcaggctgctgttgctccattccttaaataacacaggttataaccgtctacggcagggggccattccggctggccggctgcaatttgaagccagccagccgtgccgcgcaggagggtgcgttccctgatgaaggcggcccgggccacactgacggtttcctgtgcaaagatgctggggatatcccccgggcggtcgcagaagaagatgcgcccccgtcccaattccgctatttccctgagaagtccggcatcggcgcttttttccgttcccagcgcgatgacgcttacggtagccccttccttaaccatttctttcagagtttcccggtagtcggcaggttcttcggaatcgtcggcatctgcaaagaggagcagatgccgtgttccggccacggaacgttgcagttcctgccagcccgctttcagcccggcgccgatgaagattcctccgcccatggaggcaatcctggagacgctggatatcattttcttccggttagggcccagactgcttagcgtgacaatagggtgcggttcgctgtccacggcgtggacggagatgagatcctggtcggacaacagggaaatggtctggcaggttccggcattggccagatccattttcgtctttcctccgggaacggaacaggacatggatccggaacggtccagaacgatgctcatggccgtcatgagcttcatcttgtccttcttcatttccatggaaacggggagcagttcgtcaatgggggaggagaagtagccgccggagccgaaactatgcctgcccccgcacatgagcaggccgccgccctgttcccttacgtaatagtccagggcatgcagaaagtccggcgggacggaggatgcggagaggttgttgatgatgaccagccccacgccggagaggtggcgggcatcaagccggttcaggccggacggttgttggacgcggaatccctgcgcttccaggaaaggcgccagggggtcgcggtcgtagccggagagtagcaggacgccgtttcctcccgtcacttcaaggaagctgacggcacggttgttttcagggattggatcgttttgcggcgttatggtcatttcataagcggaacagccgggtgtggagatcctgtccgccagcctcaccgtggctttgccgttgagcagggtagccgtcccccgcagtggagcccctccgtttttgctgatttgccacggaacggtgatggccgggccgggagggcctgccagggttgcctctaaaataaaagcttcgccgggccggatgcgcgccggggttcggatttgttctatgcggatgtccgcttcccggaaggtgacggacaggcggtagtccaccggaatccgggactggatgagctgttccgccgcctggtccagcggcgtggtgggccagccgtccgtcaacatcaggatgcggttcgtccggttcggggacatcagggccatggtataggccagggcctgttccatgtccgttccggcggttcccccggcaaagacggggtctccgcgtccccggagcacggcggattgcgcgaaatccaccaatcggacgcggtccccggcatgtttgtgccgttccagaatagcctggatttcctctgccccggctgccggaattcccgccgtggaatttgattggtccaccagtacccacaagtccatgcctttgccgcccctgtcaagggcaggctgagccagggccagcagcaggcaggcctgcagaaggaggcgcaggggggaggccaggcgcagacacctgtatttccagcctgccgccagaagcagggggatcaggaagaaccattccggggtgttgaattgaatcatgggcgcagggagatgtctgggacgggaggaagccaggaaagaatcagggccaggaacgccagcgccagccagagggaggccagagggtcacgtttcatgtgccggagcgcctcttcatggggctggggaagtcctgtgtcaaacgtggagcagtgggaaaaatctcccatccgggcgtcggagaaccagacggagccttggaacaggggcgttttcccttctccgggggggaagatttccacatatccggtttcttccgggagcctgccgttaaagacagtttcacggcgttctcccccgggcatggtttgaatgagttttccgcctgcgggcatggataagagagttcctccgggaaggttgccgtaatgtgttccgggcagattctcctgtacggattgcatgaatctgcgggtcatgagcaagggcgccggaacgcggtccgcattggatttttcccagggccagttgaggaaaaggcgtttcccgtccacccaggccaggggggattccccctgccagagcaggacttcggctttttcccccggcttcatggaaccgatggaggggatgagcaggccgctccagttcagcccgtcagtcagcggatgccgttccgccgtgacagcgccgtaagatggtttgccgctggctgcaaatatgatggccgcttttccggggggactggcattttccgtttttccctccagcaggaggaggtcgggatctgagccgtccgggacgggggagaatcccggcaggctattgatgatattgcggaagatttttccggattgttccggaatttccatgctgacggcgacgggggcgggagcggagcggaccagcaggagctcattgtccgccgggaaggcgtccgtcgggagccggagcacggcctttccgctttcaggagggaggctgtattcaaattccgtgacagttcctggattcaggaacagggaacgccgggcaggaggacgcccgccttccgtatggatggagatttcgctccgaagaggggatgggctattgtttttaacggcaatcctccaatggccggggccggcggcctccaccggggttattcccgcaaaccccgcattttccagaggtttccctaccccccgtgcggattggccggcgggaaccctccgggcagtggatgtaatcaggcgcgtgattcccgttggtccggcaacggctgtggcggtgcgcagggcaggggccaggtcatgtgttccttcgcgcggctgccagagatccagggcgcgcagggcctggcggacggacggcccccggtagagaggctgtccggaagccctgctgcccatgagaacccatgtggccgggattccgcaccggaggatggtgtccatgtcttcggagacggcattcacggcttcttgacgaaagggggccatatttgcggaatcatccagaatgaagactacggtctggccggagcctttgccgggccagacaggagcggccagaacccaggtaagcaggaggacggccagaatttgcatccagaaggagcgtgatatgcgcaacctgtcccaggcattaccctcatgggcctccggagccagagcttccaacaggaagagcgtggccgtggcctgtgtttttgttttgtgctggaggaaatggatggcggtgatgagggggatggccagaagcgcccagaacgcggtcgtgttggtgaagtgggggatcatggcttggggggagagtaaagggtgcggttcaggagagttccacggcaccctgccgtaatgcttctccggaaagggcttccgtcagcgtccccttgcaggggatgcgggcaaaaacggcctggcggcgcaggcaggcagaaatccagagttcaaaatgggcggcgtaggcgcgggcgtacctccgggacagggaaggggtgatgagctggcggcgcaggtggccggattcacagtttttgagtctggcgttgccggcggggatttccgcttcttcctgcagcgtgggggccaggatgacggacatcccttttaaggaggccatggtttccagaaggttgtccggttcccccgggtagagcaggtcggagatgaagattttcattccattggggcgccagatggaaatggagggcatggattcatccgggggaaggctctggatctgcgcttcccattggccggagagaacatcttcctggtccagggggatgatacggcgccctttcaccgcatgaatcttcacctgggctcccgttccgatggcggagagcaggcaaaattgaagcaggccccgcgtgcgtgccgcgcgctcttcgtgaaaaaacatggattcggaaacatctaccgccacgtctacctgcggtgacagttccgcccggaagactttcatggtgagctggccggttctggcgtacgccgcccaatggatatcccgcgggtcatccccccactggtaggagcggcttccctggaagtcgatggagttgcctgctcccattccctcccaatggccctgtgttcctttccaggcgcagcaggaaaagggcagccggagacggcgcgccgcctgttcggcgtccggctgggtcacgtggctggggaaggggaaagaggtcatggggatggggggaggcaaaacggcgggcaagaactattcccgttcccggcgggaatttcccggtttctggagaggttcgggggatgcgttccggaatatgtcaaaccagtgtttgctggtgagagccagcaccgctattccggcagccaggtccatcaggctgaacagggaaaatttgctgaaagccggcaatgtttcttgtctcaaaagttcagataaataccctccggggagaagggggacggacagattcacgccccacagcacgttttgcaccaggcagaggatgaggcagatcatggtgtacgtcagcagggtattgtttttcagtttttcccagaacggtttcagaagcatggccggcatggtgatggtgtaccagccgcctgctgcgaggcaaaagagccgttgaggggactggaattcggggacggatgccatgcggtctatcagatacacggcgatagccgccagggcgcagagcaacagggtgaacaggacgctccccggcatgccggggaggaacagcagctgctggagcctggagaatcttttgtttttcatttgctccatgtgaatgggaagaaggcgggcaggcgtgttcaggttgataatcatcaggaaaattccgtaaaccatgacaaaaatggaatttccggtcatgatgttttgaatggagccgcttgcgttttccagaaaggggagggggaggatggaggctgcgaaaaaagccagcaggagcttccgcaggggggcggccgtgttttgtgcggcaggggagaaccattcccttgccagcagaagcagggatgaaatgaccaggaaggcgtccgccaggacgaggaatatcaggagaacgccttctcccgctccatcccggaaaaaattcagctccgcatggttgcctcccagggtcaatataccgatgcccatgagggagaaagcgatgatgcgcatcagagagggcatggcggacgcccacagggtatatgcggtcagcatgccggaacccaggtaaaggaggaaaaacagggttacatcctgtaccagattaatttccccgtagtaataccggatgagaaagaagggcagggagataaaggcaatcagcagggattgggccataaaggatatccattttcccagcacgatgcggcctgcgctctgcctggtgagtagcagcagttcgttgtttcgggtgagcagttcgttcctgatggaggtggaggccctcagcggcatgatgaagagcagggcgacgaccatggtaacccagaagatgatctggcatccgtcggggctgatgaagggctccccgtcaagaggattgatgatgaagctgaacaggaagaaaaaggagagcagggagggcactatgctgaccaggaggatgaatgacggcgttctgagaccctgacgcaattccttgaccagagcggagggcatccatatggggaaatcaagagagcgggtggtattcatgaggcggggatggatggggtttcctgggaagaggcgggattctgccgcggggccggttccccgctgccgtggataaggatgtccacaaaagcttcttccagacggcgttcgctgcggtggaaatcaattacggggaggtcgaggcagagctggcggagttccgcagccacagcttccggttcgcaggagacgaaggcggccactactttctgttgctgtacatggcgcactttccatccccggcggagggccagccattcctccagtgaggcggtgtcgtctccggcggtgcggatttcaaaggcgtatccggattccgtctggcggtgcagcaggtcttccatattgccgtcatggatgacggttcctgcattcatgaagatgagggcgtcgcacatttcccccagttccgagagaatatgggagctgatgagcagcgtttttccgcgcgctttgagcagatgcaccagatttttgaattcaaggcgcgctttgaaattcaatcctgccgccggttcgtccagaatgaggaattgcgcgtcgctgatcagcgtacgcgccaggcagagccgctgcgtctgcccttttgaaagtttatcgatcatctggttctggaggccggccagttccgtgaagtccatcacttcgtccacggcgtccagtaaacgttccctgcccatgccgcaggccctggcgaaaaaatccagatattcccggacgctggtgtttttataggggtggaaatagtccggcatccatccgatgcgggaacgtgccagttcgggatgatccacaacatcggccccgttgagcctgatgtggccggagtcaggcatttccagcgtggccagcatgcgcatgagggtggttttgccggctccgttggagccaatcaggccgacgacctggccctggcggatgacgaaggaggcattgttgacggctttcagcggaccgaatgatttggacagtccggaaacttccagcagtaggggcgtactcatggttattcgtgcggcaggggagtgacggggccggagacggtgacggaggttttttcccagttaatggaaggcagggtggggatggggcccagttccccgcccgccggttccatggatgcccggaagtgcagcgggggagggccgtccggttcttcttccggcaggaacggggatgcctgcattttacggccgggaggcagttgttcaagaatccagtattttccggaggcgtcccggtaggtgagtccgttcagggttccgggaaaggtgctttggaatacgggcgccccgccggggcgcgtctccagcagagtgagcgccgcccgtgtggaaaccggcatgatgatccggtgctggagcgtggagcggctggtgaaccattttcccccgcattcttccccttgccgcgccgcgccttctatgggtttttccttaatggagccgcgcgccttgctcatgcgtgctccggtgatgccggcgttttccggcaattgaaatgtattgttcagcaggacggaggtcttgcaaatctggttttgggagatcagggcggagtggtcctgcggattaacctggataagaacttcccggctgcccgtccctcccgtgccgtctccggccagaatcaggagcagcagaagaagggaaaatcccacggaaatggccgggatcagcaggaacagcctttgccttttgcctgcgggagcccacaggaacaggctcagcgggccgacaagcacggcaaagatgatcagccccagccccagcgtggtggatggggctgagaaataatagggagcggcggaggtaatctccgggtaacagtttcccttttcgtggaggttgatgaattcctccagtttcagctttttttcttcttccggcaggccgtccagggacggaacgtgcagaatgcgcccgtttcccagcaaccgggtggaaacggaaagccccctgtcaccgatgagccacaggtttccccctcccgtcacccattggcggatggctttgcggtgggcttcgtcaaaatgggtacggtaggttttttccgggatgatgaggcaggtctgcccctcgtacatccggtagtcggctggccatttcatcaggtcgcaggaggaaacggccgcgttataggaagattcggaaagcaggtgccagtccgccggagcgccttcctggataaccgcgaccattttcctgtgctccgtatccgtgggaatgggggaagctccttcgtggttttccttcacttcgtagacgagattgtaggagaggagagggtaaacgactgcatgaacgctttcccgggccggaatgaagaacggataagtatggctggttctcctgtttccgttccacccttcatggaattgaagagtggcttttttgtccgagccggtggtgttttccagcttcacccggagagggacgcgggcgccgttcgcgctgtagtcaaatgctttctccacggaaacggcgatggggggagcggcggccggttttgcgtggagcgggagaatattgaatgccgaaagaaggaagaggctgaagaacagccatgaacgggagagagggcggcgcatgggggaagggctgaggaggtgtggtcaatgaatttttgcggcggccagggaatccggcaggggcttgttctgggcagggatttccctgaccaggcggttgatgactgcggcgggtgtctgtccgtccagacgggccgtgtggttgagcaggatgcggtgctccagcacgggatgaataacggcctgcacatcctcaaaggagcagaaagcgcgcccgtggcgcaaagctcgggctttggcggcagccgccaggcccagggccgcccgggggctggccccgtatttaacgcctccggaggcttccgattctccgggatgcgtagcgttgaccagcctgcctatatagtccgccaccacttcgggaatggctacattccgggccatttgcatgagttcctgcaattcctgcgcgttcaaaaccggggatatttcaggttccacgcccatttcccggttgaggacaatgcgggccagcacatccgccggtgtgcggttgacgttgattttgaaaaggaagcggtccagctgggcttccggcaggggaaaggttccttccagttcaatggggttctgggtggcaagcacgaaaaagggggaggggagggcatgggtctctcccatgacggtgacgcggcgttcctgcatggcttccagcagggcggactgggtcttgggggaggcgcggttgatttcatccgccagcatgatgttggcgaagacgggcccttcctggaagatgaagttttttgttccgtccctttcctgaagaaccggggttcccgtgatgtctcccggcagtagatcgggtgtgaactggacgcggcgcgctgtgatatccagtgccctggagaggcctttgaccagttccgtcttgcccaggccgggcaggccctccagcaggatatgcccgcgagccagtacgccaatgagaaccagttcaatgagatccttttgaccgaacaggacctggttcatggcggcagccagagcacggagcttttgcatggcgcagccaagttcttcctgagagaggatagggggggtattcatgggaaactgccggatttccgcggcttttgggaaaaagaccgggcatttgttagatttcttcatgaacttatgccatgcatccagaggggctgcaagcggaaagatagagggacctgttaattttcagtaatatgaagagaaaataccctgcggggtttgagtggtaaatggaattgccgcaatatatgttccatctgttgaaaaaagaaggattcctggcatgtattattgtcatgccttccgtatatccccccggcaacgaacgcatttacgaggtggacgctctgcgcggctttgccgtaatggcgatcatgctgctgcattttcttgaacatttcatctataattcctatcccgtggcttcttccccaatgatggaagcggccaaccagcagttcaaggaggtcttttttttcctgtttgccggcaagtcctacaccattttcgcccttctgttcggattcacttttgcggtccagtaccgtaaccaggcccggaagggaagggattttgcgggcaggtttgtctggcgcatgtgcctgctggcggtgttcgcctgcatgaatgcagcgtttttcccgggcggtgatgttctgctgactttttcacttgcaggtttgttgctggtgccgtgccgccggttgaagacatcctcgctggtggctttgtccctgtttttcctggcccagccgctggagtgggcctatgcggcggtgcagtggatgcatccgggttgggttcctccctccctgtctgttgcggaatcgtacgcttccctgaaatccgccgtggatacgggaaatttctgggtgatggcctgggagaacctgactacaggacaatgggccagcctggcatggggtattgaagccgggcgtttgatgcaggccccgggtctgttcctgctggggtttgttctggggcgccaggatttctttttgcagaatgacggaacggctgtgttctggacccgcggactgctattttccctggccggggcctgtgcattttacgtggtgatgtgcctgccggggctgccggggcctgtgcataccgtgtttagcatgtggcacaatgtttgctttaccggcgtatgggtggccgggttcgttctgttgtaccggctggaatatttcaggaaagcgacggctccgctgctgacctacgggcgcatgagcctgaccaactatgtttcccagtccgtgatcggctccctgatttttttcccgtatgcactggggctggctccctactgcgggtatctggccagttttgcggtcggctttgccgccatgaccggacagatatggttctgccgctggtggctggagcggcaccgctacggggtgctggaaggattgtggcaccgggcgacatggctggccgccgggaaggtttccgctccggaacaccggtaagaaacgggggccggcgcaatgatgtttcccgatacttgcgggacgctttttagcgtcttctgtcaaagccggtgatttatccggacggaggatgcatccggttccgcaaggggcattttggagaggagacatggaacagggggcagaggcaggaggaaaagggatgaacgtttcatggcggcgggagacatgaaagcgcggtattttttgaagaatggctttccgggaaattttttccacagggaacggtttgttttcctggggatggcgtgccgcgccctctccggtccgtgttccggcggcttttccgacggactgatgcaggaggggattccgtaccagatggcgcttttctttaaaggggagatgtagtatggcatggtgtatggaaaggaggacgggcataggcggttttttcgggctggaattgccggagtacggcaatttcccgcaatggcatcccggcaggagtgtagccgtgaattccggcagacgcgctttggaatatatcctgcgccgcctgggggatgtgcgctgtgtccgcgttcccctgtatacatgccggacggtggtggaaacgatggaacggcttggcattcccgtgattacttaccgcattgacgaacgcctggaaccggaggaactgccggaattggaaaagggggaataccttttgtacaccaattacttcggaatcaaggagaaatgtgtggaccgtctggcttcccggtatggcggcagcctgattgtggacaatgcgctggccctgtattctccggcccgttccggagtggcctccctgtacagcccgcgaaagttttccggtcttcctgacggggggatcgccgtgatggatgcggagcggtccttgccggaaccggaggagcgggacgaatccctgcctgccgccgcttttttgctggaatgcctggagcatgggcaggaaagggcttcctccgcctgtgaacggaatgaacggcgcttgcggaataccccgctgcgaagggtttcccggctgacggagcgactgatgagcggcattgattatgaacaggcgcggctgctccgcatgaatcatttcctttttcttcatgaaaggctgggccatttgaaccgtctttccgtggaggcggattccttgtccgctccgtgttattatccgttttggacagcttttcccgagctgaggaacgtgctgattgataagcgcgttctgattcctctcctgtggccggaggtattggaacgggcccctgccggcagcctggaacggaaactggcgctgcatcttctgccgcttcctgtggaccagcgctgcgggccgcaggacatggagcgcatcgcccggattgtggaggcattctattcctgaagagaagggaggattattttgttagatagttggataagacgttgacgatacgtgaatgaatgttctaacatttttggtgtgtccgactacctttcctctctgggctatcctttccgtggaagacccatggtttttgtcttttccgtcattatggtatggggcatgttcctggcggcccgggatgttctcatcggatggattgccgccttttgttttctgctgcctttcatgtgcgcctttttcatgaaaatggtgcggcagtccgccatgggagaagaggatatctgcccctttcctgaactggatgaatggcttgactccctcatgctgccttttgtccggctggtggtgtgcatcatcgtttccttcctgcctttcgccgtgtatgcgcatactgcggcctgggcggcggatactcccctggcgtggctgttcctggcggcgggtgtgatttactttcccggcgtattcatgagaacctccgttcgggaacgtttttccggtctttctcccgtgggctggtgggggctggtcagaagggctcccttttcctatgccgggttacttggcgccatatgcgccgggggatggatcatcctgaaccttccttcagggcctttgatggatttcgccatggcgcccgtgaagctgtatgtcgcctgcgtgttgatgaatatgtgcggactgttcatgctcaagcatgaatttgccggggaggaagaggacggcagcttttccccttccgggcctgcggcctcgtgatgctgcctcctttccggcggcgccgggaacaggtgagtttatttggcgggttccttgtccaggttcaggatgcccagcacagacatgttgccttccgcatcttttccggaggggagatagaccttcgcattgttcagcatgttttcaaaggccttggcgcggagcatgttcagtcccatggccttttccttcaatgccagtccttccgcttccgcccgggctgcttccagggctgcttccgcctgggccttgccccgcatgacaatgactttggcctccgcttctccccgggccaggttagcgtttgcttcctggcgcgctatttccattttcatggcgccttccgcctccccgcgtgcacgctggatggcgatgtctttccgggcgatttgaagttccgtttccttgcgttcgttttcctgagtcgtctgaacttttctgacgacggattcaatgatggcctgcgggggatttgtttcccccacggctacggaatccacaataaagggggtgccgtccagccgcttgcttaactgcgtgtaaacgttgtcggaaattttttgcaggctgccggaggcgtccagggcattgtactggcttaattccgcccgcacggctgtacggaaaggctgctgaatgaaatttttgtaggcaaagagcatgatttcgtccgccacttcgtcatcattgcggccggagctttgggcgatgcctccgtaatcttccatgaattcctttacccgggacggggccagccggtaaaccagagaagctttgcaggaaatggggagcttgtccttgcccaggatagcccctccattgcgggcgtcgaattcttccaccgtggtatccggagtgatggaaaccttgctgacttcctttctccacgcccatcccgtggaggacggcccgatcaggatgccttcaaacctgttctgtccgaaaatgggtttggaatagacatatccggcaaagccggacaatacgcgcttgttgctgaaattctggaaggcaaaaatggcggcgcccgcagcgacgaagatgacggcgggaatgagcagggagaagacggttttgggagatttattcatgacagggcagcggttgtgacggtatccaacataagaggaagctggtgaaaatcaagttatcttttcctgtgcggccgggaaaagtgttccactgaaaaaattctttccggaagagggaatgcggcaaagtatgtcctcttctgaacacaggggagtgccggaaatgtcttatccggcaaaggctgcctgttccgtgggggagattccggcgaggtgccggacctccgcctcggaggcgggcctccatttgggttaaggtgatgaatgtagccattacgggatccggcggatttatagggagtcatttgtccaagcgtcttgagatgttcgggcatcgggtggcgcccttgcggcgctatctgtttgcccaggagggcgtggattgtctggcgcaggccctggcgggatgccatgccgtcatcaatctggccggagcgcccatcgaccggcgctggacggatgcctacaagagggagctggtggagagccgcatcatgaccacccgcaagctggtggaagcggtcaacaggctgcatgaaccgccgggagtgatgatttccgcctctgctgtcgggtactatggctcgtccggcggctgtcatggggaactggacgctccggaagcggattcctttctggcggaattgtgcgtggcctgggaaaaggaggccgggctggtgaacagctccgtgcggctggtccttacccggtttggcgtagtcctttctccggatggaggggcgctccccgagatgatgcggccggcccggttcggcgttacggcaaccgcaggaaatccggatcatcttttttcctgggtggctttggaagatctggcggatgccctggtcttcattatgggcaggcaggatatttccggcccggtcaatgtaacggcgccggagcgcactaccaaccgggaattctacagggcagccgcggaacatttccacacccgtctgtccatccgtgttccggacgccgttctgtggttgctgatgggagaagcttcccaggtgattaccggcggccagtgcgccgttccggagacgctgatgagggaagggtttacgttccaatatccggatatccgcactttttttaacaaagcattttctgtcaaatcatgagcatgatacagaccatcgttacttccctgtttcacggtcattccgtcaaaaccgatcccatgccggatttcaatctggaacgttatctgggggaatggcacgaaatagcccgtctggaaaactggttcgagcgcgggctcagcagggttcttgcccggtatgaccgcagggaggacggttccatttccgtggttaacagcggttatgacgttcgtaccggggaacggaaggaggcgcgtgcacgggcggtggcgggggatgcccccaatcatttgaaagtgtactttgtaccattggtatacggccggtatgaagtggctttcctggatgaaaattacacccgcgccgtagtttccggcggttccctgaattatctgtggctgcttgcccgctcgccgcagttgaaggatgacgagcttcagccgatgcttcattgcgcggaaaaactggggtatgatacttcccggttgatttacgccaatgtccaggcctctccggacaaatgacatggggcgggcttgaagaagcggtgtgccgtgaatatgggatatttttgaaatggggaatgtggaaaaggtggcttttctccagccaggaaaaaatttttgggcatgggccgggcgttcctttccagtgttccgccgtgcgggaatgtcatgcttttgaattctccggtgtggttcttcttcctgcatggctccggtcccgtatttttccgctttttcctgccccgtcctttccgtttttttgcaaagaacagggaaaaacacaggcgcctgcttaaaataggcttgcaatcatgagaaggatggatatgttggcattcatccaaacattggatgtttggatgaattacttaaagaaggagtaacaatggatattattcatgacaacgccgctgatctcagcgcattgaacggcaagaccgttgccgtgatcggatatggcgcccaggggcgcgctcaggcactttgcatgcgtgattccggtgtgaacgtgattatcggcgttcgccccggcaagtcttttgacgccgccgcccaggatggattccaggtaatgagcgtcgcggaagccgccgaaaaagcggacatcattcacattctgctgccggatgaaagccacggcgccgtgtatgaagctgaaatcaagcctcacttgaaggccggcaagacgctttgctgctcccatggcttcgcgtatgttttcaataccatcgtcccccccgcggatgtagatgtcatcatggtggcccccaagggcccgggcacggaagtgcgccgagtatttgaagaagggttcggctgccccggcctgattgccgttcatcagaacccctccggcaaggcccgtgacgtggctcttgccatggccaaggctgaaggcctgacccgcggcggcgtgctggaatgcaccatggcccaggaaacttatgaagacctgttcggtgaacagaacgtcctgtgcggcggtctggtggacctgatgaagtacggctttgaaaccctgacggaagccggctatccgccggaaatggcctactttgaatgcgtgcatgaagccaagctcatcgtggacctgatttataacggcggcatccagaagatgaactccgtgatttccaacacggccgaattcggcgaatattacaacggcccgcagatcctgcccgcagaggtgaaggaacgcatgaaggaatccctcaagcgcattgaatccggcaagttcgccaaggactggctggaagaggcagccaagggcgctcccaacctcaaagccaagcgcgaagccctgggccagcacccggtggaaatcgtgggcgctaagattcgcagcctgtttgaaaggaactaaggtttcttttacttgaaacacgtgccgttccgtcggaatacggcggagcggcacgtatattcccgggcttttcccggaaatccgccattgattcagtttatggagcatgcctcaccggccgtcaatgtagaaaacgccagggtatacctgggcgggcacgaaatcctgcacaatatttcctggcaggtgcagcgcggagaacgttgttttattctgggggccaacggcgccggaaagacaacgctggtcaaagtgctgatggggtttgcatggccgctcttcggagccagggtgcaggttctgggcaagaccttcgggcacgtgaacctgctggaattgcgcaagtccattgcgtgggtgagtccgttcatgcacaagtggctggaggatggctcctggaacgggcgcgacatggtgctttccggccctgacggaactatcggcctcctgagggagccgacgccggaagaggaggaaaaagccgcaggaatcatgaaatccctgaaagcggagcatttgatggacaggccggtggtggccatgtcttccggggaacaggtgaaagtgctgattgcccgggctctgatgacgaatccggaactgatgattctggacgaacccagcgtttacctggatttggcagggcgggaatttttgttgaaaactattgaagaactggctgaaacgaggcctgatctgaccatcgtgtttatcacccagcgcattgaagatatccttcccgtatttaaccgcggcatgattttaaagtccggagaaatcgtggcgcatggaagccgggacgaggtgctgacggaggaaaacctgaaagacgcctttgggctggatatccagttaatcaagacggagaaggggcgtctctggaccgttatccgataatttttcatgaagcagtccaagacaatggagctgaagaaaccggtgcgggtgtccctggcccgccaggtgctcaccgccatggaatccatgatacggtccggcaaatggaaggttggagatcgcattcccgcggaagcggaactggcccgtgccttttccgtcagccacaacaccatccgcgaagcccttcaatccctgattcatatggggatgctggaagcgcgccccggggacggcacgtatgtgatggcgtcagaccgctttgccgtcgcggtgagcaaccgcctcaaggaatccgagctgcctcagattctggaggcgcggctggctttggaaaaggaaattgcgcggctggccgccgttaaaaggacggatgaagatttgaaggagctggaaaatgccctgaaggactgccacggcagggtaaggcagggcattgaggatgacatgctgtttcatgccgccgtggcccgcgccacgcataatccggtgctctcggaattgtataacgtggtcatccgccatgtgcaggagaatctggaaaagctgcttcaggagaagcaatacgactccggcgccatgaagctgcatgacgaccttctcgcagccatcaggaatcaggaggcggatgaggcggagaacattattgtaaagattgtggaatttgacaccgtcagcataggcgggtcattcatttcttgaattgccggcaggaaagatgccgttgcggtggcagagttattcttttttatttcccggtgcttttcttgccagcgggctttccggcaaataactgcgttctggaattgcctgccaaagaaaagcgggaattagtctttccgtaccaaggcgccggaggcaattctcatgatttttatccttttccggatatggaattttactacaattcgaatatggctacccgcactgaatggaagtgcccggcatgcggtgcccttctggctatggaagatgtgaatatggctgcggatatggtgttatgccgctcctgcaataagataagcaaattttcagagattgttcaggaggaaagggatgaggaaattcttgattccattccccgccgcatgagcgtgacgaaaacggcgagggggctggaaataacgtataagaagccaaaaggtgcgggactttttctactgatgttttcggttttttggaattctgtgacatgcgttgccctgtttgcgatgatgagggaaatgtcttgtgaaaatctgtttggactattgtttttaatcccttttgttctggttggggctggtacatttgcgggagctttttatgtgttgtttggccacatgacgctgatcctgacgccaggcaggggggaattgttccgaggagtagggaacctgggccgccgacagcagtttttgctggagaaaggttcccgtatttccattgaggcaagcagtatgcgacggaatgatgaagttttagacaagattgtagtggggctgccggacggcaagacgtttgagtttggtacagggattgaggaagtggaggcccagcggtatatagcggctctgctgcggaaaatgaggggatagggctgtgatgcctgaatgcggagaaggtcttggaatgccctggctccgctgtttttcagcaggcaggggaatccgtcctggcggaaagggagcggagatatggatttccgtttccgggaaggaatggggcgcaagcctttttttgttggcaaaatccatggacagcgggcagggtttccatttgaggaatgatagcgggaattccgggaatgaggttttttgattgatatggagaataaggtacgtagattaacgtatgatgaaggaagtgcgccttttgttaattctgtgcggtttgttttgcggaacggcagttgcgcagccccgcctttccacaccgccgaacatgattgtcattctggcggatgacctgggttatggggatttgggctgtacaggttccaagcagataaaaacgccttcccttgaccggctggctagggagggggtgttctgttcccgggcgtatgtgacggctccgatgtgttctccctcccgcatgggactgctgacggggcgtttccccaagcgttacggcatcacgacgaatcccaatatccagatggattatcttccggagtcccactacgggctgccgcagacggagaaattgattccggagtatttggctccctgcggataccggagcgcggtattcggcaagtggcatcttggccacacgaagggatatacgccgccggagcgcggttttacgcattggtgggggttcctgggcggttcccggcattattttcccgtgaagaaagaagctgaaggcctgaatccctccatgattgtatccaattttacggataagacggacatcacctatttgacggacgacattacagaccgggcggttgaattcctgcaggaagccggaaaggataagaaaccgtttttcatgttcgtttcctacaacgccccccattggcccaatgaagccaaaccggaggatatcgccaaattcaggaacgtgcaggacggggaacgacgggtttattgcgccatggtatatgcgatggacaggggaataggacgcattctggatgccttgaaagcggacggtttggaaaaggataccatcgtcgtcttcctgtcggacaatggaggcgctccggaagcttcttcctgcaacgcccctttccggggtgccaagaggcagcattttgaaggaggtgttcgcgtaccttttattatcaggtatccagcggacaagcgtttggttcccggaagcgtttgcagacagcccgtttcctccgtggatttgcttcccgctttgctgaaggcgaatggccgtcacattcccaggaagctggacggcatggatattctggagctggtggggaacaagggagctcccgttccgcgcacctttttctggtgcacggattacacgtccgctgtgctggccggtgatatgaagtacctgctggtcccggatcgcgctccgcagttttacaatgtggcggacgatccccaggaacagagggatttgtatttttccaggcaccaggatgcggatcccctcgctaaaaagctgggaacatacctgactacgacgcctgcatgccgttttcccgacagtattagctggtccgccaaattgatgagggagtatgacaagactgcgccggacaggcagcctgagtaaggctgcgttggctttgttccgtattccgtcctgcatgccagcgtttgggaacctcctacggcgggagagggggaggaaccgcgtgcatggtttcctttttccgctgaaaaacgctttatttcaggcgcttgggttcagcaatgcggagaatgtgctctccgggaagggccaggttgcctttgtcccgggcaatcatttcaaagtagtggggatcctgtgagatccagatgaattcgttttttgcctgttccatctgctccctggatttttccagatgagcctgaaggaaggaacgttcatgctccagggagcgcagatccttccatggtttgaaacacaccagggaaagcagcatcgtcaggcacagggccaggacaatggcaaagaggcgcagggctctctggacgatcagggcacgtttctcccggcggatttcaagctccgctagggtaaaacggtggtagtagcggcgtctccagagcattccttgcagtcaaacaacatatttttgatcatagaatatgaattttaccaccataaactgcgtcatttcccagttcttcttcaattctaagcaattgattgtatttggccatgcggtcggaacggcttagagagccggttttgatttgccccgcgttcgtcgctacggcaatatccgcgatcgtggcgtcttccgtttccccggagcggtgggagatgatggcggagtatttgttatccttggccagttccaccgtatccagcgtttccgtcagggaacctatctggttgactttcaccaggacggcattcgctacatggcgggaaatgccctgattcaggaattccacattcgtcacgaacaggtcgtcccctaccagctgggtattgccgcccatggctttagttagctgttcccagcccagccagtcgttttccgcacagccgtcctcaatggaaatgatggggtattttttctggagttcctgatagtaagccgtcagttcctccgctgttctgcccaggccgtctgattttttgaagacgtacaggttccgggagggatcgtaaaattcggaggaagccacgtccagggcaatgaagatatccgtgcccagggtgtacccggcccgttttacggcctgtgcaatgcattccagggcgtcgtctgctgatttcagggccggggcgaatcccccttcatcccccacggcagtggaaaggccgcggtcatgcagcacatccttgagtgcatggaaaacttccgccccgtagcgcagggattcccggaaagtgggagcccccttgggcatgatcatgaattcctgaaagtcgatgggggagtccgaatgggctcctccattgatgatgttcatcatggggacgggcaaaactttggcgttcggttcacccaggtatttgaaaaggggaaggttgagctgaatggcggcggctttcgccacggccagggagacgcccaggatggcgttggcccccaggcgggatttattgggcgtgccgtccaggtcgatcataattttgtcaatggccggctgcagggtggcatcgtgccctgatatttccggggcaatgattttattgatgttttccacggctttaagcacgcccttgcctccgtagcgcttggcgtctccatcccggagttcccaggcttcatgctctccggtggaggctccgctggggacggatgcgcgtccgatagctcccccggcgagggccacgtccacttccacggtaggattgccccgtgagtcgatgatttcacggccgcggacgtcaataatttccatttcattcatgatcataagatttctttttgtcctttttagacagggaaacatgctttcccgttccggagaagcatgtcatgtccctagaagttccggtttcaaaagcaggactgacgcagaacgggggacgaagcttgccggcttcttcagggccatgatgccccgcagaatgaaggggttcccttgctgggcatccgcctgcccggtcttaggaattttgccgggaagaagctcaggagaatctggcaggacaggaggtcggcgaggtgcatgaaccctcaaaggggcaggagcagccgcttttgcacggcggaaactgcggcaggggggggaagctgcgccgtttcgtgacgcagggaaggacggcatgccggaacggggccttgattccgtcccgttccgggtatggaatgaggcgcttactattaaaaccatgcctaacattaacgataacttcctcaagttgcaggcgggatatttgttcccggaaatagggcgccgcgtgaatgcgtttgccgaatcccatccggaagcggccaaaaggctgattcgctgcggcatcggcgatgtgacggagccgcttcccatggcggctattgaagccatgcaccgggccgtggatgatttgtccactcatgaacgttttcacggctatgggccggagcaggggtatttctggctgagggaagcaatcgccaaaaaagcctatcaggcccacggcgtgcatgtggaagtggatgagatttacgtgtctgacggagccaaatgcgacacgggaaacattctggatattttcgggcccggcaacagaatcgccgtgccggatccggtttatcccgtgtatgtggataccaatgtcatggccgggaataccgggagttccagcccggatggttcttatgaagggctggtgtatctgccgtgcactccggaaaataattttgtgccgcaattgcctgatgagcatgtggatttgatttacctgtgcttcccgaacaatcccaccggggccgtagcttcccggaatgaactgctgaaatgggtggaatacgcccgggcgaaccgtgccattatcctttatgattccgcttatgaggctttcatacaggattcttccattcccagatccatttttgaaattcccggcgcgcgggattgcgccattgagttccgttccttctccaagcaaggaggctttacaggggtgcgctgcggttatgtggtgattcccaaggaattgcacggatatgattccgaagggaacaaggtttctatcagccggctctggagccgccgcaccagcacgaaattcaacggcgcttcctatattgtccagcggggcgccgcggctttgttcaccatggagggcatggcccagactgccgctctcatcagccattacctggggaatgcttcgcttctgctgaatgcctgccgtcaggcgggcatgcgcgtgtggggcggggaaaacgccccttatgtatgggtacagtgtccggacggtctggacagctggcaaatgtttgacaagatgctgcatgaggcgaatgtggttattacgcccggttccggttttggttccaggggggaagggttcttccgcatttccgcgtttaattcacgggaaaacgtggatgaagtctgccgccgcatccacagcctgtttgccagatagaagggcgttttcagacagatgtccaggccgcggtgcaaaacaccgcggcctgtgtatttctttccgggtgggttgatggccgtggcattgtatttcctgccgggaggggagctcctgtaaaaaggtcatcttcctttcttacggatttggaccgggaaagagcagagtccgttttcaagtgatgggattccggtaaaggggcgtttctatggcatattcggcccttgctcccgttcatttgtacggagtaggttgttgcttatgtccccgtgggtgcgcatgagttcctttttccggcaggctgcttttcctgcatgttgcgtctgcctactgtctgttgctggcgccatccggggacaggaaggggaagcggagcttccttctgtggagccgctttcctgtacgcatgccccggatgggagggtaacagttcggggggcggttatgggtacggtgttcacggtgcgcgcttatcccgggagtggcatggacgcggaagatgcggagaggatttgcggggaggctctggcctgtgccgtccactgggaaaaagtgatgtccgccatggatgcggagagcggtctggcccggcttaatgctgcggaatacggcatttccgtgcctgtttctccggaattggaaagggtgcttcttctgtccctgaattatgcccggctgacaaacggtgcttttgatcccacgctgggaccctgcattcgtctgtggaaaaagagccgccgccttggcgtcctcccgtccgatgaggagcgggaatgcgcgctccgggcatgcggatgggaaaagttgtccgtccgtaagggaatggcggtcaaggcggtttctggaatgaggctggatttgggaggcatgggcaagggctttgccgtggaccgaatggcggagatgttgaaaacaaggggtatatgttccttcttcatagacagtaccagcgatgttctggccggcgctcctcctcccggggaaccgggatggcggctgcgggtggatacaggaagagggcagggggaagtgttgctgttgagccatgcggccgtttccacttccgggagcgcccgtcagatggtgaaaattggcgggaaagcgtattcccacgtgcttgattcccggtcggggctgggcgttacggaagggaggcaggtgagcgtccgggcgtcttccgctgcgctggcggatgccctggcgacggcagggtgtgtgatgcgtgaggaggagttccgttccctggcggccggattgccgggagtgtccgttccggccttttttcaaagtcctccatgttctgcgggggaaacgcagaaacaggatggattgcggaaggagggaggaatggggtcaatgaaaggaatgacaaagcaactacgtttttaaggtacacctttataaccctgtttatgagattgtaccattttttactccctgccgttgtcagcgctgccgtatccgcgtcatttggggcagagttccctaatccctatcctgcgcccgctcccggtgtccgcctgactccagagattccgctttcaccctccattaatggcgcccgtatcgtcggagctacccccggctcccgcatgctgttccaggttcccgtctccggggagcggcccatgaaaattcaggcaacagggctgcccccaggcctgaagatggattcgcgcggattgatttcgggtaccgctccgtccgggaagagggaatacaaggtaaatatccaggcttccaacaggcatggaaaggacatgaaggagctgattctgaaggtgggggacgaattgtgcctgactccgcccatgggctggagcagctggtattcctacagtgaggccgtagggcaggataatgtgctgaagacggcacggctttttgtggaacggggtctggtcaatcatggatgggcctatatcaacattgacgactgctggcagggcaggcgcggagggaagtatggcgccattcaacccaataagcgttttcctgacatgaaggtcatgtgcgacgctattcacgccatgggcatgaaagtgggcatttattccacgccttggatgggaacgtatgccggttttatcggagggagcgcgcccaacgctaagtcggactacggggaaatggccattccggaaaaggagcgcaagcaggaggatcaaatctttggaagttatccgggagttcatcgcagaaaggcggatcatgtgggagccgtctggctgtttgaccgtgacgctaaacaatgggcggattgggggttcgattatgtgaaagtggattggaatcccaacgatgtgcctacgacaaagcgcatccgcaaggcgctggatgagtccgggagggatatcgtgctcagcctgtccaatgccgccccgtacgaacatgtggaagagctgggcaagctggcgaatttatggcggacgacgggggatatccaggatcactggggcagcgtcagcggcatcggtttttcccaggaacgctggcagaagcatatgcgcccgggacattggaatgatccggacattctccagatcgggaagctgggcaaacccaaccagcccaacaccacgtttgtccagacgcggctgactccggatgaacagtacacccatgtgaccctgtggtgcctgctgtccgctccgctcatcgtctcctgtgatttggagcatattgattcgtttacgatgggactgcttaccaatgatgaggtgatagcggtggatcaggatccggctgcccgtcccgcccgcaaagcgtggcaccaggggaatttccaggtgtggatgaaggagttgtccgacggttccgtggcggctggctttttcaataccgggaaggagaaaggaattttgaaggtgaatctgaaggagctgaggctttccggagcgtatgaggcaagggacctctggaaacgcgctgaccaggggaccgtacagggagatatggcggtagaattgaacgggcatggagcatccatgttccggttcagcaaaaagaagtaacgggaaggagacgactctgtattcattcaggggcggcggggatatgccgcccctgaagcctgtggcaggggaggcttttcattgaaccggcatccatagaaacaagccttctgcacaaaatcccacttttacagtacctgtcggcggattgccggattccaggagggacaggaggggcagtgaatgcctcccccgcaccagagcttgcgcttcaattccggaaagtttttcccggcaggcctttgttattgtgtaataaaaaaccgctccggcagatccggagcggttcttataaaagagattgatgtgacttgccttaatctctcccgacagcttttctaggcggcaatgccgaaatgctgctgaatggaggcgaaaatcttgtcgcgacgggcgcgggctttttcaatgtcacgggttttcagcgagaatctcaggcgttccgccgtggagtccggcttgtgaaccgtaacgtggcaccaccaaacccccctgttgttccacaggtggtggttggggttgtcatcattaattctaagagcgattttggtttgggctttcatctgtgtgatcttttccagtagaggacgtattgtttacgtccgttggcatattaatgtttcaataaaaccttcaacttggaggtgcctcacttaagcagatgatcccttgtctttttggacatctttttctgccagttgctcacctcgttgaagccttagagttcaagtggtggaacaacgttcaaaaaaagaatcttttttacaggagacctacttttttaagagtgttgtaagcaccgttcttgttgatcgtacgcagggccttggcggaaatcttcattttcacgaattgaccgagttcaggaacccagatgcgcttctcctgaaggttggggaaaacggtacgattgacagtcttagtgacgtgacgaccaataccgccctttttcttggcaagaccggagcgatggatacgacgacctttgtgaggcatggtacctctgatgatgcaaattcgggacatggcaatcgaagttatttgttaatgcgagagagataatctagcgtatttttgcctaaggtcaagaacaaccggacgaaagccctggaatttatcctggactgtacggaagcatgccttttcttttgcgcgaactccggttttttctcccatgatgaagaggggctgcagagacggtgagctgaaagcgggagggggctgatccgggaagatgaacggtaccgcagacaaagaggagaatgaggcgttcttccatatttttcaggacttccgccgtgggagcaggggctggccggatagccgggccggatgaaggcctttcaccgcaggaaaagtgcagaacacgggaaagatggcccctttggttttttcacggcagcggcatatggctgcctgcttccgggtaaaacgtatccggcgcttgcacggaggggcgttccatgagaaattgaaagcatgagtgagaatcattatgcagagttttccgaatgcagcatgaagccccaggaggtgctggaatacgtttccggccccattcccgttctggaggagggagaagttctggtccggatgaaggcggctccgatcaacccggcggacatcaattttgtacagggagtttatggcctgaagcccgtgctgccgcactcccgcgccggcctggaaggctgcggcgtggtacaggaatctcgcgcagcgggatttcgagagggagatgaagtgattctcctgcgcggcgtgggttcctggagcgagtatgtggcggttccctccgtgaatgtcatgaagctcccggtgaaggtagatcccgtccaggcggccatgctgaaggtgaatcccctgaccgctctgcgcatgctggaagggttcgtttccctggaaccgggggattggctggtgcagaatgccgccaattccggagtgggaaggtgcattattcaactggcccgtgaaatgggcgtgaagacagtgaattttgtgagaaggccggatgaattgagggatgaattgactgcgctgggcgccgatctggtggtgggagaggatgacggggatgtggtgaagaatacgctggcccgcctggatggaaagaggcctgtgctggcttccaatgccgtgggcggggaaagcgccctgcgcctgatggatatgctggctcccggcggaagcatggtgacgtacggagccatgagccggaagagcatcaaggtgccgaacggttttctgattttcaagggtattaaactggagggcctgtgggtgacgcagtggcttaagaatgcccctgtttcagagattgaggccgcctatgagaaactggcgcgcctgatggcggacggcaggttgaagcaggctgtggataccgtttatccgctaagcgatgtgcggaaggctgtggagaaggcgcaggaggagttccgcagcggcaaggtggtgcttagcatggattgcgcctgatgcgtggaaagggagtttttgcgctttcccgtgctgcggaatgctggaaggattttttcagcgttccgtagtttggatagtattggctgctggcctggatgatggcggggctgaacttttattccatctggcaggcaggcgatttgttctggaaaagatccgttttgcccggaaagggctgtgtacggagggaatggtgcggagcgtcacgaaggatacggtgcggttgtggcgccattcgcggatcatgaacccgtccgggctttctctggatgtccgggtgccggaagtgcgttcccatccgcagacccgggagggacggcgcgtgcgcgccgtttggtttcagcccagcgtggaatcaagccaggtgttgagtatttccacagcggctacctggtcgatgatggggcggaagttttttgcctttttgccggcggcgtgcagtttttcctgggcaatgacggtggtgaggcattcatccatgaaaatcaggggaaggcctggaagggctgcggccagttccctgccgaatgcacgcaccttggctgcggcggtcccttccgtgccgtccatgcggacgggaaggcccagcaccagggtgcgtattccccgttcctggacgagctggacaatgcgggaaattccgtccgtctgatgcctgtggatagtttctacgggatgggccatgatgcccacggggtccgtggcggcaatgccgatgcgggcttctccgtagtcgatgcccagggcggggtgcggactggtcatctgagttcgtccggaagctggttgacgattttcttgatttcgtccgccttgtttttatccgcaatgaggatggcgtccgccgtttccaccacaatcaggttttccactcccagcagggccacgtgcttgtcccccttttgggagaaaacaatgttgccggaggcgtcctgcacggtgatgtccgtgttggtggtgtttttattgtgggtttccagatagttggctacggatatccaggaacctacgtcgtcccagtcaaaggttgcttccatgttcagcactctgtccgcatgctccatgagcgcgaagtctatggagacgggggtgagcgccgggaattcttcccggatggtttcctgcggggccggagattccgcaacgtgttccacgaaggaggccagttccgggcagtgcttgtccagctgttcgcacacggcaggaatgctccatacgaacatgccggcgttccagcagaaattgccccggctcaggtaggctgcagccgtggcagtgtccggtttttcgcggaattgaatgacttcgcggcaggaacagcccggagcggagtggatttcttttccgcgttcaatgtagccgtaggaggggcagggccaggttggcttgatacccacggtgacaagcgctttttccctggcagccgtgtccatggcggctttcatcagggtgcggaaggagtcctggtcctgaatgagctggtcggagggaataacgagcatgactccgtgcgggtccgccgccttgatgagaccaatgcccagggcgatggcaggcgccgtgtcccggcgcacgggttcggaaatgatgttgtccacgggaatatcgtgggcctggcggcgcacttccgcttcctgcagatggttggtcaggataaagatgttttgcctgggcaccagcccgtccagcctgtcgatggcctggcgaaggagggttccttctccgaacatgttcaggagttgtttggggcggtggtcacgggaaagaggccagaaacgggtgccgctgccgccggccagaataagagcgtattggttcatggctgtttcgcaggaatgggggttcaagagggtcagagagcgccgaaacggcgttttctacgagagtagtccagcagagcagcttccatgtcccggtcgcaaaagtccggccacaacgtgtccgtcacatgaatttccgcgtagctgatttgccagagaagaaagttggagacgcgcatttctccggaggtgcggataagcaggtccggttccggcatgccggcggtgtccaggtactcgccgaacaggtcttccgtcacggcgtccggcgggagttctccgcgggagactttttccgctattttcctggcggcggcggcgatttccccccggctgccgtaggaaatggccagaaccaggttgagcctggtgtttcccgaagtggcttccagactgtcctgaagcagtttccgggtgcgggcgggaatgcgggagagatctcctatggcgtggaggcgcacgcctttttccatcatttggttgaggcgttttttcaggaattcgtgcagaaggagcatcagcgcgcgcacttccgtcttcggacggttccagttttccgaggaaaaggcgtaaagggtgagccaggggatatcatgggccatgcagaagtccgcacagcgttccaccgtatccgctcccgcccggtggcctgcctgccgcggcagatggcggctgttcgcccagcggccgttgccgtccatgatgcaggcgatgtgagtcggcagtttttccttgggaatggtaagcatagataagcgtcgctccgttactctagtccatgaccgggtccagttcaacacgcaagttgttcaggatgtattcctgtctttcccgcgtgtttttgcccatgtagaaggacagcaggtcttttaccttgtgggagtcttccagccggacgcggtccaggcgcatcccttccccgatgaaagccttgaattcctggggggagatttctcccaggcctttgaaccgggtaatttccgggtttttccccagcaggctgatggcttcctccctctctgcgtccgagtagcagtaaatggtttgctgtttgttgcgcacgcggaagaggggggtctggaggatgaagaggtgtccctcccggatcaattccggaaagaactggatgaagaatgtcatcaaaaggatgcggatgtgcatgccgtcgtcatcggcgtccgtggcgatgactaccttgtcatagcgcagttcctccagtccgttttcaatattcagggcatgctggaggaagttgaattcctcattttcatagacgactttacggctcatgccgaaggagttcagcggcttgccccgcagggagaaaacggcctgggtttccgcgtcgcgcgccgtagtgatggagccggaggcggagatgccttccgtaatgaagagggttgtttccccggcgcgggagtgcttggagttgtaatgcacccggcagtcccggaggttcttgttgtgaattttggccttgcgggcgttttcgcgtgccagcttctggataccggagagttccttgcggtcccgttcggaatccttgatttttgcttccagggctttggccgtttccgggtttttgtgcaggtagttgtccagctccctggcaatgaagttgcccacaaaggtgcggatggtttccccttccgggctgatggtgttggaccccagcttggttttggtctgggattcgaagacgggttcctttaccttgatggagatggcggctacgagggaggaacggatgtcccccgcctcatagtttttcttgaagaagtccctcagggttttgacgatggcttcccggaaggccgcctggtgggtgcctccctgggtggtgtgctgcccgttgacgaaggagtagtgctcctccccgtattggccgccgtgggtgaaggccacttcaatgtcatgcccttccagatggatgatggggtacaggggttcctcgctcatcgcttccgcaagcaggtccagcaacccgtttttggagatgtagcggcggccgttgaaatgcaaggccagccctttgttgaggtaggagtagtatctgcacattttttcgatatactccggccggaattgcgtggccgctggaaagatatccgggtccgcgtggaaagccgtgcgggtgccgttgggttcctccgtggctccgtccttccgtcccttggggatttcctttccgcggcagaactggtaggaacgcgtttccccgtcgcggtaggcctggatttcaaagaagtcggacagggcgttgaccgccttgatgcccactccattgaggcctacggattttttgaaggcgtcgctgtcatatttggccccggtgttgattttggcggcgcagtccagcagtttgcccagcgggatgccgcggccgaagtcgcgcacttcgcacaggccgtccggagtcacgtcaatggtgatttttttgccgaaccccatcacgaattcgtcgattgagttgtcgatgacttctttcagaaggacgtaaatgccgtcgtccggggaggctccgtcacccagtttgccgatgtacatccccgggcgcatgcggatgtgttccctccaatccagggttttgatactgttttcgtcgtaggccatgtgcaacggggtcgcgcttattatagcggcgcccccggaatttgcgaagaaaaaatgaggggccgtccgtctgcgttcgatggagcttgacccggaggccgtcccttggtggaatccacggcgtatgatcagttgcaaggctccgtgcaaagtgaacgtttccctccgcgttctgggaaagaggccggacggcttccatgaggtggataccgtgatggttcccctggatttgtgtgatgtgctggagttttcgccggcggcctgtctggagatgagctgcgacgccccgggcgtgcctctggatgagagcaacctggtcatgaaagcgggccggctgatggagcgggagctgggaaggcccatgccgtggcatgtccgcctggtgaaaaaggtgccccatggtgcggggctgggcggcggcagcagtgacgccgcatgcgtgctgcgcaccctcaatgagctggaacgcggaggtttgtcccgggagcgtctggcggagctgggcggggaaatcggttccgacgtggggtttttcatttatggcgcggcgagccgctgcaccgggcgcggagagaaggtggagcccttgccggagtggaaggggtggcgtccccgggttgtcttgttgaagccgtcgtttggtgtctccacgccggacgcttaccgccgctggtccggttccagggaattgcccggcattccctatggggagcaggatgtggacggccatgtgctggtcaatgatctggaaagacccgtgtttgaaaagcatttattcctggcggaagtgaagcgctggctgatggggcggcccggggtgcgcggcgccatgatgtccggttccggttccaccatgttcgccgtggtggaggatgaaggaaccggacgcgcgctgatggaggatgccgcccgggagctggaccccactttatggatgtggtccggcctggtgatgcaggataacgcgcggtaaaaacatgattccgcaggaggccttgccttgacggagggggaggcatgccgttacactccgtccatgattaagagtttgttggcaggcatgatggtggcggctgtatgcgccgtccaggccggtgaatatggggacagcgccgtccgggccgcccgggagctttccggggcggtgaagacgggcgacatgatgtggatgattgagaagatgtacccgcccatgaagaagcagcttgttgcttcctttccaggcggggaggcctccttcatggagaccatgagggaaaagatgcaggccgccgccgccgtgatgaaggaacgcggcatggtggtggagacgtatgaaatagggcagcctgcggcggaacatctggtgaagggcggcggggaggtgctggtggtgcttcccacgcggatggtcatttccatgaagcgtccggacggggtgcccgtgaaggtggagaataccggtgttctggtgctggtgaaggatttgaaggataaggggccctggacgttcatcgacgcttccagaatgaatgcgaacggcttgcgctccatgttctatgacctgcctgaaaaggtgaatcttccgccggtttcttcccgccagcttcccgtgggccagtaagggggggcaggttcccacatatgaaggccgccggggaagagggtatggaaggcgtcagcgcttttgaggcttatgtccaccgggcatttgccccggacggattgttttcccgcgccagggattttgagtaccgggcggagcagcagagcatggccctggctgtggcgagggcgctccaggtggatgcgccgctgctggtggaggccggcacaggcgtgggcaagtccctggggtatttgctgccggcggtgaagtttgctttggattttgaccggaaggcggtgatttccacgcataccatcaatttgcaggagcagttgttcaacaaggatattccgctgctgcgcaccgccctggggattgatttttccgccgccctgctgaagggcaggcagaattacctgtgccatacccgcctgcggcgtgcgctggcgcagatggattccctctttacgcagggtgaggccgcggagttgaagaggatccaggactgggccctgagaacgcaggacggcaccctgagcgatatggcattccggccgtcttccaaggtatgggccatggtctgcagcgaaccgcatgcgtgcagcatgcgccattgcggcccttcctgtccgtaccaggcagcccgcaagcgggttctggaggccaaagtagtggtgcttaaccataccctgtttttcgggctgatggcccaggcggaggattccgaggaggcggggttcgtgtttcccggggattttgtgattctggacgaggctcacatgattgagaacatcgccgcccgccagctaggcgtccagctctcggaaccgcatttgaattatgaattgctgcggatgtacaatccgcgcacgcacaaggggttgctgaaaccgctgaacaatctgtccctgttccagcgggttcaggacgtgatggacgcctccggcctgtttttccagaatgcgcgggatgacctggggtttgctggttccggaaagattgtccgcattcttcagccggagtggtcgcaggatattctttctcagcctttgatggaactgatcggggaattgaaaacggagagggagaaacaggaggaaaatgcagccgtgaaggatgaactggcggatatggccgcccggatggaggaggcgcaggcttccctgaaggtgctgatggacatgacggaggaaggtcacgtatattgggcggagcgttccggtccggatggaaggaacatgagcgtttgctccgctcccgtggaggtgggagatattttgagggaacgcctgttttccgccggacgttccgccattctgacttccgctacgctggggaccggagatgcggacatgagttattttgcggggcgcgtaggggcggaaagcgttcggaagcttcagattggaagcccgttcaattaccgggagcagatgcggctgattgtagcccgctctatgccggaaccggaccagccggagtatgcggaagttttgccggaatggattaaaaggtatctggcggagtcccgcggcagggctttcgtgctgtttaccagctatcgtctgatggttcaggcggcggagaaagtgcgtcctttttgcgaggaacagggatggacgctgtatgtgcaggggcaggatatgcagcggcatgccatgctggaggcgttccggaaggatgtggacagcgtgcttttcggaacggacagtttctggaccggggtggatgtgccgggagaatctctttccaacgttattgtcacgcgcttgccgtttgaagtgccggatcatccgcttgtggagtcccgttttgagagtatcagggaacgcggggggaatccgttttacgaatattccgtacctgtagccattctgaagctgcggcagggggtagggcggctgatccgcaccaggagcgattccggcatggtggtgattcttgatccgcgcgtggctaccaagaggtatggaatgcgttttctcaagtccctgccggaggcccggctggagtttgtatgagtttttttcaggatgccccggaattgttccgttgcctctcctgccgcatcaggaggtagctgaggggttgttccaggcgcgcttcttccagaagggagcggtccgcaaagatgtcgggaacgggagcgtctgccaggatggaaccgtctttcattacgatgcagcgcgtgcacagatccatgaccatgtccagatcatgggtagcaatgattttggtatgggtgaattggcgcaacaggctgatgagggtacggcgggaggcagggttcaggttggcgctcggttcgtccagcaccaggatgtccggactcatggagaggaccgtggcgatggagacggcccgtttttcccctccggaaagatggtgggtcattttgtctgccagggcttccgcatggacattccgcagggcctgttccacgcggcggcggatttcctccggggggagccccatgttgagcggcccgaaggccacgtcttcccggacagtaggcatgaatagctggtcttccgcctgctggaagaccattcccacgctttcccggacgcgggcgacggttttgggggtcacgggaatgtcccctacccgtacctggccggaagagggggtcagcaggccgttgaggtggagcagcagcgtggatttccctgcgccgtttccgcctacgacggcgacggattccccgtgggtgatgcgcagggaaacgccgttcagcgccggaggggaatccgggtagctgaaacacaagtcaatagtttctacaaggtggtggctcatgggatgaggctgcgggcgtactggcccgcgagcatggtgatgttgaaacagcggaacagaatgacgagaatgcagaaaagaaggcctcccgctgcgccgcggccagtgatgacgctgcgggaattgacgaattcaggatcttccccgcctctgcacaggacggcctggtaaatgcgttccgcccgcccgaatgtccgcagcagaagttgtccggccatggccccccacgtggaaagagggatgggcccggagcctccccgccgggagcggaatgccatcagcatatgttggcattcatccaccaggataaaggcgtaccggtacaggaaggtcatcagcgtgattagaatgcgcggagcgccgagctgcctcaggccgcggcagagaggcgcaaagcctgtggaggccaacagcgtgaaggcgcccaggatggtgagcatgcacctcaggatgatggagatgaaggagatcatgccctgcgtgacgggaatgccgaaccattctcccatgggagttctgtccaccagagggttgaagaggcctatcatgacggcgacgggcagcagccacagggtacgtttcagaaggtagcccaggggaaggcccgccaggcggatgacacagaccgggaacaggaagaaaggcaggagtcccgtaatttcctgcggaggccaggaaagaacgcagatttgatagacgaggaaagctccgattttaatgcgggcgtccagacggtggatgccggtatttccgcaggaaaaccgatccatctggcggaattgctgcgaggcgtccgtaaacagtggcatggggagggtcagcgggggcagtggctgtgcggttttctgccgaacaggaaaccggccgcaaaaataagggctgcgataatggcgcttcccagcacgccggccatgctcgtttcagggttgacaatggaggaggaagcttccgtttccgcggtgtttgccccgtcatcagcgggaaaggcgtagtccggcataatggcggtggcctcctgtacggtttccaggttccggtggaggggggacggttccgccagcctggtttcttccgacccggtgactccggctacagaccattccagcccgtcaggataggcggaggcgaaccaggagagggcggctccgcagagcagggccgctaccgcaaagatgcccaaaacggtccaggatgcttttttgacggttccggtttccaagtcggccgggcgcagcagggacggctgtgccttgctgatgaagatgacgacggctgccgtggcaaggccttctacggcgccgatggccagatgaatgggcagcatcaattcaacaaattgggcgaagggcagggctgagatgccggaggccgttgtttccagaacgacggagaaggcccccatctggagcccgatgacggcggcgatgacgctggccagcgtgatgcggcccgtgccggtttttgttccggccaggggcctgtaaatgaaagggtaagccaccaggcaggagaaaaaccccatattgaaaatattgcagcccagggccagcagtcccccatccgcaaagaaaagggcctgcaccgtcaggatggccgccatgaccaggaaccccgcatacgatcccagaaggaccgccaggatgaggccgccgcccagatggccgctggagccggtgcccggaatggtgaaattcagcatctggcaggcaaagatgaaggctcccagcacgcccatgagcgggacgagccgcatttctttttcctgcctgaccttacgtgcgcagagcgttgtaattgcagcggaagccgcccacatggtgcagcctaccgtcggtgagatgaagccgtccgccatatgcatgatgttgatgcctttctattgaatagtgtgaagtattgctgaaagccccgtaccgggcagattggcgccactttagcataaacgccgcaaagccgaagaaggaaatgcggcaacggaggaaagtatgttccttccgcttctcggttttggttcccgtgcggagctggtaaggcctgtttccggcaaaagagcctttccggaggggggacggaagggagggcgcgtttcttcgggtgtatccggcggcaattcatctgccgtcccgtgccgacaaagggtgtggacgggttgggcgtgatgcaggcgggaaaactgtctgctagacgggacccatgatgaatttttccatagccaggtgtttgttttccataggaggatgtacgacaatcctgggcaatatttccgcagacacggccgtgtcttccgccggagccatcggaggcctgggcgttctgacgattgccgtgaattacacgctgaatctgctcaaaaagaaggatgagcagttgatggcgaaggatgcccgcattgaagccctgatggaccgcctgattgacaaatgcccgaattgcgagctggcgaaagcagccaacaagtccctgctggatgatgaatgacggcaggcgcgggggactatctcccgtcagcgtccgccatgcgggtgtaaacctcccgggttccgtccgtgttcagaatcagcgtgtttctgctgagactgtcaatggtggaggtagcggtgaagagggaggaattgccgtttcccatgcttttccccgtcaggatcaggcggctgccgtccagctgccagccttggtagagaagcgtgtgcatgttgatggaaacggccctgccgtccggtaggagctgcattccctggacatgcccaggctgcccggggacgggctgggtccaggagccggagaggctggcgggagtgggctgcatggagcaggatgccgccagcaggaacagggccgggagaaagagggaaaatttcacggggggggagttcagcgttgttcccggatgatttccgtgccgatgccgtccggagtgaaaatttccagcagcagggtgtggggaaggcgtccgtcaatgaagtgcactttgcgcacacccgcgttcagggcgtcaatggcggagtggattttaggtatcatgccgccggatacggtgccgtccttgataaggtcgagggcttccgtacgcgtgacggatttgatgagggtggagggatccgaagggtctttcatgattccggggacatcggaaatatagatgagtttcaccggcttgagttccttggcaagggcggcggctgccaggtctgcgttcacattgagcggtttatgggtgcccagttcttttgccagcggagagacgatgggggtgatctggagttccagcgcttccgtgatgcgctccgtcaggcaaccgatgacgttgcccacttcaccgatatctatggggttgccctgttcatctttttcatggatgcgttccccaacgaagatttccgtgccgggaatgcctacgcccttgccgccgtagtcgcggaacatttgaaccagaccgggattgatggttctggaaagggtgcgttccacaatggaaatggcttccggagtcgtgacgcgaagcccgttgatgaaacgggcttccagccctgcctccgccatcgccttggaaatggctttgcctccgccgtggacaatcacggggttgaagcccaggacttccagcagaacgatgtcccgcatgagctttttgaccaggcgggcgtcatccatggcgctgccgccgaatttgatgaggaatgttttgtcccggtaggcctggaggtaggggagggcgccgacaatgacggaggcctgttcaatcaggcgggtgattttggagtccatgtcagtaatgaaacggtaggagttttaacggaaggagagggagattttgaggcaggagccgttcaaagcaggcgcctgcttctgaagtaaaccaggggcaggatgatggaaacgagcatgaccaccagggagatgtagtagccgtattcgttttccaggccgggcatgtgggcgaagttcatcccgtaaatgctggcaatcaatgtggggggcatgaagaccacggccgccacggtgaagattttaacgatttcgttctgttcgatgttgatgaggcccagaacggcgtccagcatgaagttgacgttgctggaaaggaagttggcgtattcggaaagggaagtgacgtcccggctcagaggacgtagcttgatgtacagcgtggagttggtgtcgtccaaggcctcttcgttgctggcgtacgtgagcaggcgcagaaggttgaccaggcagtcccgctggcgggtgagcaggtcgcccacgcggcccaggccctggagcgtcaggcgcagggcactggagacgggcacccgcttgctggctttgccttcaggttcgtccctgcggaagatgtttttggaaaggcggtccagttccgcgccgaaacgttccagcacgtccgcctggcggtccacgatggtttccagcaggccggtgaaaacctggtcccggctgatttgcttctggcgcaggagctggtgggaaaaaacgcggaaggaataggagtccgaatggcggatggtgatgattttcgcccccatgaggacgaaggtgatttccgacagggagggggattccgtatccacgcggctgagaaccgtggtggtcatgaagcgcgctccgtcctccgtgtacagacggctggtggcctcaatctccctcatttcgtcataggtcggcatttccagcccgcagaggcgttccacaaacttgatttccgccggttccggggtaaggaggtcaatccagaagacggaatccaagtgttgttccgccgcatccacctgggtggtgcgctcaatgccttccggggtttgacgatagagccggatcatgccgttgatttcggtggggggatggaacgatgccgtgcatgaggttgagtgacacccaacgcaggcatgatgccttgtttgttcagggaagggaagtaaaaagggtgacaaaaagaggcccggttcccaaggtgggaaccgggcctgccggaaaagggatgtgcgcctcttaggcgttttccttgacgaccaccttgagcgtggcttccacctggggatgcaccttgatgacgacttcgtgttcgccttcgctcttgatcggcttttcgagttcaatcgcccggcggtccacttccacgccctgagcggtcagggcatcgtgaatgttctggttggtgatggtgccgaacgccttgccgccctggcccacttcaagggtgaggtctacggtcagtccgctgatcttggcggccacttcctgagcggcgctgagttcttccgcttcgcgcttggcgcgggcggcctgaagattggcgatgaaacggcggttggaggctgttgcttcgtgggccagacccttggggatgaggtagttgcggccatagccagccttaacggtcaccaggtcggcttctgcgccgagcccttcaatttttgttgcgagaattacttccatcgttgccatggctaaaaagaaatggttatttgtgagcggttgaagtagtaagtattcgcccgaatgtcaagacaagagcgataaaaagggcgtttttttatgttttgggaggaaaaatcctcccggttgtcatgattggtgacattgcgcttgcttcacgcggcagtagtatgtagggaaaggaaccgcatttatcgcgttctctcccggaggggtggggttcgcccgcgggtacattacagatatttgatcttatggctattcagcgcgcattgatatccgtttccgacaagaccggcctggaggagtttgccaagggcctgcacgagtttggagtagagcttatttccactggcgggactgccgctttcctgaaaggcctgggccttccggtgattgagatttccgactataccggagaaccggagttgtttgaagggcgcctgaagacgcttcatcccatggtgcacgggggcctgctgcaccgtcgcgacaatgaggagcatgtgcgccaggctaaggaaaatggcatcaagcccatcgacctggtctgcgtgaatctgtatccttttgaagaaaccgtcgccaggcccggagtcacgctggaggaagctattgaaaaaatagatatcggcgggccgtccatgctccgttccgccgccaagaattacgcttccgtcacggtggtttcggatcccgcggattacgcgcgcattctggatgaaatgcagacccacaagggggatacgaccctgaagacccgtgaaaacctggcggtgaaggtgtttatgcgcacctccaattacgataacgccatcactaattatcttggccaccagagcgcggaaagcaccaagggcagcttctgcatctgcgctcccctgtatcaggaattgcgttacggggacaatccccaccaggaagccagcctgtacggcagcttcggggatattttccaccagcttcagggcaaggagctttcctatacgaacgtgctggacattgaaggggctgccgagctgattacacagttccgccgcccgacggtgggcattttgaagcacacgaatccctgcggcgtgggccaggacgacgaagacctgcgcaacgcatggcagaaggcttttgaaacggatacgcaggcccccttcggcggcgtgatcgtggtcaaccgcccgatgacggaaggcctggcccgtgtgctgagcgccattttcacggatgtcatcatcgctccggagtatgatgcggaagcccgcgccattctccagaagaagaaaaattgccgcatcatccgcatgaacacggaagcctggatgaaggcgcgccgcgaacccatcatccgttccgcacccggcgggttcatgaccatgaagcgggatacggacgtgatggggctggacaatctggaagccaaggtggtgaccaagcgccccccgaccgaggaagaattgaccgccatgcgtttcaactggcgcgtcgtgaagcaggttcattccaacgccatcgtttttggtggtacggaccgcacgcttggcatcggcgccgggcagatgagccgtgtggattccgcccgcattgccgtctggaaggccgggcaggccggcctggatctgaagggcagcgttgtagcgtccgacgccatgttcccgtttgcagacggccttcaggtggcgattgatgccggagccaccgcctgcatccagcccggaggctccatccgcgacgaggaagtgattgccgccgctgacgccgcgggaattgccatggtatttacgggacaccgccatttcctccattaatttgaatgttcgtccccgcccctttgtcttaaaaccgatatgctgctaggtgtaaatatagaccacatcgccacgttgaggcaggcccgctacgcgaccatgctggattccttcaatgtggagccgagtgttttggacgccgcttatgcggcgcaaaggggcggggcggattccatcaccctccatgttcggggcgaccgccgccacatgcaggatgcggatgccctgagcgtccgggagagcgtggccctttccctgaacctggaaatgggaaataccccggagatggtggattttgccctgcggctgaaaccggactatatctgcatggttccggagaagcgcgaggaaatcactacggaaggcggcttggacgccgtttttcatgaaaaggatctggctccaaccatggcaagaatggccgataacggcattcaggtgagcctgttcattgatccggaagtgccccaggtggaggctgccgcccgcctgggcgcccccatgattgagttgcataccggatgttttgccaaccattccggcagggagcgcacggaggaactggcccgtttgaaacgcgccgcggaactggcccattccctgggcatccaggtgaatgcgggccatggcatcaattaccagaatctggaacagctgctggctggcgtcccttgcctgcatgagctgaacatcggccatacgattgtatcccgcgctctttttgtggggatggagcaggccgtgagggaaatgcgccaggcgatcgaccgcctgagctgattgcgccgtttcaattgatcccggttgccggagtatgagccgcattgcaggattgggaatggatttggcggatatggaacgcgtacgccaggccctgcggaaaaacggggaggcgtttgcgttgcgcatctgcacccctgatgagtgggcttattgccggaagcacgcggatcccgtgccgcatctggcggcgcgctttgcggccaaggaggccgtggcgaaagccctgggaacgggaatcggggcgaagtgcgcttttacggatgtggaggtggtgcgcggcgatgcgggagttccttccattcttttgcacggggctgcgggagtgaccgcccgggagctgggcattacgggctggttcctgaccatgacccattccaggttgagcgccgccgccaccgttattgccttggcgcaataaaaaagccgttccctgggaagaaaggaacggctggcattaaaggaggaaagggaagttattttctccttctgcgtgcggcaaatcccgcgaacgcaagcagagacaatgccgctgtggagggttccggaacagcggcataagagacggagagcgaactcagtttcgtgccgttcaagccgtcattattccaaccgggagcacgatgtccaatgctgtacatctcgttttgggtatctcctccgtccgcggttccggtgtaccagtcgatatcgctgatagaaacggttgcggtgctggcggcagtaccattatcaagagtaacggttacgtcatgtcccaggatatcaacggttacgtttgtccacgtatttgccgtcagtccggcttctgcgattgctcctccggaggagagattgccggagttgatggcaacagccccattgctgagtcccaggctgaagccgaatccgctgcgggcaacgtgaatgatattttcaagggaattgttgcctccccatgagatgtccatggtgatgctcatgatcccctccccggaaagggctccgttcagcatttcccgtaatacatttgtaccgcgttcgtcaaaggtggaaccggtaagaaccgtccccttctctgcatcttgggcagtattgaaattacctgtagcagttccccccatgacggcagccgcggaggaaaaatcccatgtataggtagctgtctccgccgcctttgccgcaccacagaaaagcagccctgctgccagcggcaaatattttttaatggatagattgatagccatatgacaatagcacgtaattgcaaaaagattcaacgattttcaaattcgttgaatgtttttctatcttaacccattaataaataggtttttgaaaatatccctattacaagattggtttctttttccgtttgtttattttcactgttccatacagaaaacgagaaaattatagatttttttcttgtaaaacggatttgaaattcgttgctatggaataaaagaggccgccctgtcaaagggcggcctctgccttaagagttttttcttaagtcaggtggacttttaagaaaagctcttaatgaggagctggcgctgttcttccagttcggccgggagcttcttgcccaccttgtcgaacagctcggtctggctttccagttcagcctgccattcgctcgggttgagagccatgttggcgttgaactgttcttcgctgtagtcgaggcccgtcttatccagttcggcataggtcggggagacgcccagcacggtcttctggccttcagccttgcccttggcgcggcgcagaatccagtcgagaacgcgcatgttgtcgccgtagcccggccagatgaagttgccgtccttgtccttgcggaaccagttcacgttgaagatcagcggaggattggcaacggttttgcccatgtccagccagtgctgccagtagtcgcccacatggtagccgatgaagggaagcatggccatcgggtcgcggcggacctgaccgatgttgccgaaggcggcggcggtcatttccgaacccatcgtcgcgccgacgtaaacgccgtgcgtccagtcgcgggactggaagacgaggggcatggtggtggcgcggcggccgccgaacaggatcgcggaaagggaaacgccttccgggttctgccattcgggatcaatcgtcgggcactgggaggcgggggcggtgaaacgggcgttcggatgagcgcacttgcgtccgcaatccggggtccagtcattgccctgccagtcgatggcgtgggcgggagcggggccgtccatgccttcccaccagacgtcgccgtcgtcggtcagaccgacgttggtgaagatgacgttttccttgatggtgtccatggcgatcgggttcgtcttgtaggacgtgccgggagccacgccgaagtagccgttttccgggttgatggcatggaaggtgccgtcttcatggggccagatccaggcgatgtcgtcaccgatgatggaggttttccagccggcttcccggtaggaggcggggggaacgagcatggccaggttggtcttgccgcaggcggacgggaatgcgccgccgacgtaggccttggtgccgtccggggattcaatgcccagaaggagcatgtgttcagccatccacttgttcttgcgggcgatggcggaggcgatgcgcagggccaggcactttttgccgagcagggcgttgccgccgtaaccggaaccgaaggaccagatttcttccgtttccgggaagtggcagatgtacttttcttcgttgcagggccacggcacgtcaacctggccgtccgcaagcggagcgcccacggtgtggaggcagggaacgaatgtcccgtaaccgtcacgcttcgggttgccgccgcccttgacttcgtcttccaggcgcttgagaacctgttcacccatcttggtcatgatgcgcatgttggtcacgacatagggggaatccgtgatttcaatgccgattttggccaggggggagtccagggggcccatgcagaaggggatcacgtacatggtacggcccttcatgcagccattgaagaggcccttcagtttggccttcatttcaacgggatcagcccagtggttggtcgggccggcgtcttcttccttctcgctgcagatgaacgtgcggtcttccacacgggctacatcggagggggtggaacgggcgaggaagcacccggggcgcttctcggggttcagtttgataaaggtgcccttttctaccatcatgttgcaaagctcgtcattttcttcctgagagccgttgcaccagtagatggagtcgggttggcaaagctgggcgatttcttcgacccacttcttagctgcttcgtgagtggtactcatggtgaagatagtgtatgcacggaaatagccgttggcaagcctcccgtgcggctttttatggggcggttttgtttctccgggcatggaaaccgcatgcggggaatggcgttgccctgattgccggatggctgtgcgcgggggctttcttcaggatatccctttttcctgctgccgtgtttcggaaagggtgaaaaagactgttttgactggaaatctgcttgccagctcgtctgcgatagtctagggaagaatcatgaatgtcagaatgttgtcggcaaatgcggtgtttctgatgctgccggctttgctggcggcgtgttcggacgccccgcgcccgcccgccgtcagcttcaggattcagaatgtgcctcccgtgccgcgcacgatggcccagatgtccagagaggtgcacattaaccgtgatttcatgtccccgcgctcccgtgctcgccggaccgcccattccatgcatccgcggtttatcacgattcacagcacagccaatcccaggggtgacgccgcggcgcatgcccgggcattgaaaaggggggccatggggtccctgaactggcattttacggtggaccagtaccgtgccgtccagcatattccgctgaatgagacgggccgccacgcagaccggggcggccccggagacatgtactccatcggcattgagatgggggaggtaaggagccataaccccattgttacctggaaccgctccgccaagctgacggcagtgctgatgaagcagtaccatattccgctccgtaatgtggttccccattattattggacggggaagaattgcccggccccgctgctgaccaacggccgtccgggacataaatggagctggttcatttcccgcgtggattattacaggcgctgtctggagacacggcccgccgcagcgctctgacgggtacgcgcacatggtgcatgataagggatacgttcttgggttcatggctggagaattgcttttaacatcttctctggaggaatgcgtttttatccgtcccagagagttggcggccatgcaggcggcgggaatggcctccgtacgggatttgttgttcatgcttccgcgcaggtatgaagaccgccgcatgtttgaccgctatgattccctgtcttccggtgtgcccgtctgcctgagagggagggtggtggatgtgggctggaaaggctggggcggacggggcggcaagggccgcggccggtatgtggaagccgtgctggcggatgagcagtctttggggcaggcccgtttttcctgcctgtggttcagcatgccgggcgtagccaggatgctgtgcgccgggcaggagatgattgtatacgggcgcatgaaaccgtatgggaaaaagctcagtatggtgcatccggattttgaaattatccgggaaggagatgagcagtccattcatttgaaccgcattgttcccgtgtatggcggccgtatggggattgcggtccgcaggctgcgggaaatcgtatgggagacgctgtccaggctttccccggctccggaaccggaggtgtatgagtttgtgccggacactccgtgcaaaacggcattgagggatcttcattttcctgagaccgcagaggcccgggatcgggcgcggcgccgttttgcgttggaggaatgccttgctcagcagttgaacgtggcctacagaagaaggcgggcggatgaaatgcccggcatgcggaccgcaggttccagccatttggtgaaggatctggcggattccctgccgtttgagctgacggaggctcagaagcgctgcgtgagggagatttaccgggatatgaaagccccccgttccatgaaccgcctgcttcagggggatgtcgggtccggcaagacgctggtggctctgtgcgccatgctgctggccgtggaacacggttattccgccgtgatgatggcgcccacgcagattctggcggaacagcattatttgaagttccggcagatgctggacaagctggatgtgcctgtttccctggtgacggcggacaggaaggaagaatcctatgtatcgtttggaaagcagggcgggattgtggttggcacgcatgccctgctgtacgggaaaaatgtgccggagcgtgtggggctggtcgtgattgacgaacagcacaaattcggcgtgaatcagcgggagaagctgattgaccgggaagagcgccccgacgtgctggtgatgaccgctacccctatcccccgcacgctgacgctgactttttacggggagcttgacgtttccatcctggacggcgtgcccggggggcgcggggcggtcgtaacagccatccgtacggagaaggataagggaaaagtgctggcattcgttcggaaccagctggaggaagggaggcagatttacgtggtttcccccctgattgacggagaggattcccggaaggggaaagccgtgacgaaggaatgggacgagtggaaggctctgctgcctcatgtggatgtggggctgctgcacggcaggatgtcttcagaggaaaaagaggcggtgatgaaggatttccgctccaaccgcatcagcgtgctggtgtccaccacggtggtggaggtgggggtggatgttccgaatgccacggtgatgatcatcaataatgcggaaagtttcgggctttcccagcttcatcagctccgggggcgcatcggccgcgggtcgcacaagtcctactgcattttgatgacggacgcccgtccggaggatgagcaatgggagaagctgcgcattgtggaaactacggcgaatggatttgacctggcggaacaggatttgaggctacgcggccctggcgacgtgctgggtacgtcccagagcggcttgaagggcgtacgttttgaggaatggctgctggatgcgcgcctgattcaccgcgggcggcagctggcggaggctattctggcggaagatcccaatctggaatccgccaaataccgccctctccgttttttgctggaagacggggcggggaggcgtgtgaccgggtaagattgtttttctgccgtttgctgacggtcagcttgtaagaggcgcatgacagataagagggcaacgatttatccgccggaatgaatctaaagaagcaaagaagatgtttcttcttcaacccgaacaccgataaaacaatgattcaaacgtatcaagtactccctgtggtggccatcgtatgctccgcttccgcctttgcccagaacgctgccgatcccgtgcagatggtcaagcagaatatcgacctgatttcttccgccaacaaggttttggacgacgtgaaggacaacgctgcggttgaaatcgccattaagcagctcaatgcgttgacccagcaggccaagcagctggacaagtccatggaaaagatgaagcttacttccgagcaggctatccgcatcaccaaattgaacggagacgcccaggacaccatcgtggacatgctggaaaattgcgagcgcattcaaaaggacaagctgatgactccggctctgctcaaggcggtgaatgattttgccgacgccgccaacatcgacgtggtggaaacgattacgaccgtggagcaaattgtggaagattgagtgaccagcttatcaaaagacctttgactggtaaggccgcctcctgaagaaggcggccttattttttaaggaagggccgttttttatcaatttccgggcagggcattttatttctccatggccggattggggtttcttgccggaaccaggtagcccgtgccgggagacgtgcccaggcaggagaggagatcctggtggcgcggcagggacttggcgcggaaaacggctgcggcggggtccagcacattgccgaaggtgatggctcccatcgggcatgcgagctggcaggccgtttgagccgccccgtccggaagcagcatgtcctgggccgtcacatggatggaggtggatggctggcccggatgctccttcatcaagcgggatttgtgccggattttggcacgttccaccatttggacgcagtaggtgcatttttccatgacgccgcgggagcgaacggttacattgggattgcgctgaaggcgcgtggcctgttccgatgctttggcgtaatcaaaaaaattgaagcgccgagccttgtacgggcagttggtggcgcagtaccgggtaccccagcaccgggcgtacaccatggcgttcaggccttccgcagtatgcacggtggcattgacggggcatacggattcgcatggggccttgccgcactgctggcaggccacggggatggaggtgagcgtcccttcctccgtgaagtatctgtcgatacgtatccagtccagggcgcggcccctggccatctggtcacgccccaccacgggaatgttattttccgcgcggcatgcaatcatgcaggcgttgcagccgatacaacgggacgtgtcaatggccattttccactggtaaacggcatccgcgccgggagggggaggcgggacgcgggacagaccgggatgcagggagaacggggcaggttgcacaacggggctttgaatggcttccgtccgctcccggagggcagacaaggcaatctgttccggggcaatgccgtatgcttccgttttttccacctgtctgcggagttcgtatccgccggaattttcctgcctttccgctacgtggttgatgccgccataacccagaggaagaataatgagattatccgccactcccggaatggggcacaggatgacttccatttgcgtggagggggcggtaagcgtgcagtgcatgggcccggaatccgaacctcccagccgcagaaaggtggcgggggagacctgtgcggacgccgcccagctgacgcctgttattgggtccgggcattcctgcatccatgcattgcgtttccagcggccgtccccaatggaatagtccgggcggaattgcaattccagcatcccggttcccaattttttcccgtggccgccaaaaggcgctgcgggcgtttgcatcatggctgttccaagagccgtttcttcctgcggggacaggggagcataggccgtttcttccgaatagccgcgctgaagcgcctgagcccaggccgcagttttattttccggattcacggcgcgttcaaagcatttgcgcgctctgtggtaaacgggagagaggtgggtgggggaattgtccgccgtggagagatggcctttggaggaaagcaggccggaaagcacttcttccggagaaatgcccccgtacaggggaagaatgacgggctggcgatagcaaaatctgccccggtaatcccgctccactccccatgattccagaaagtgggctgccggcaggtgccagcggcagacgcgggaggtttcatcttcatacattccaaggtggatgctttccaccctgttcagggcttccgacagtccggaactgtgcccggaatccagcacgggatttcccgcatccagtaaaaaaacgatttccacctttttcccccggatgtcccgaacaagatcgtccagcgtgccataacgggttgggcgcggagcctttagcaactggatgcatgttcccatggagccgagaagacagttgagcttccagacaatgccggatagttccggatgattgtcccccaggaggatcacgctttctccggagtggctgaataagtcatccgcacagtggcgaagccagttgagttccctttccgtcaggggatggtccgttcgccggggagggggaagcgtttggccggagttttttttgctggaaagatagcggaacagttcctccaggaaaaacgccaggcgtgcgggaggaacgggcagcctgtggtcggcatgggccccggtcagggaaacgcagccctccacggcgtaaaggcgtgttcggttcctgttttcttctttgtagtaaagcccttccggggagcgggacgcaatgaagtcgtgtgtgtttccataggggttttgatgaagaaaatcgcaatccagggagaggatgcgcctggcgcgcgcaaaacgcacgcggaaccgtacttcttccggcagccccgcctgcatgccggaacccggttcaggcacgggggaataccggtagatgcgcacgagtgaatttttcctggtgatttcctccagcatggaatggagcagaggggaagccgaagggggaaggagaaggccgatgccgccaccatcccgaagattgcgggaccaggaagaaaaggctccccggaattcgtcttcggaggccggattgccgttgaacaggatatgcttgctgcggccggggtcgtaaaggtccagaatggaggcctgagccgcagccggcagccccggaccttccgggtattgcagggagggaatcaatttgacggggcgcccttcataacaggcggccagtacgggttgcgcgtttcctcccatggtcaggcaggtggcgtaagccgtttccacgccgggaacagaccattcaggcccttcgttatagggaaccaggtatttttccacacggcggcaggccggcagccctatccctgccagggctgcccctgcacccatccatttcatgaaggaacgccgcgtcatcccccgttcttcttccggaagaaaagcggggtggttctggggaacttcattctgggaaagtggagggaggggagtcaaaccgggtaatgatggggattgatgaaacagggatggctttttttaggaaatccgaaggatgaaatcaagtggtgattgacggtagtctttatcttcgggccaataagggataaacagggaacaggagggaattttttttgtggaattcaatgtcattgattacggattcaagggaggaatcatttaatgaaaagtcctttggtctttttattgcgcagtatccgggaacgcagggaggaataactttggcgccgcggatgtcaaacaggccatggaggtcagtgatggcatgcggtgcaatccgttttcggctgaattttccattggcgtttcaggaaatttcccagttgaagcggggtttggatgcttttcccttcttcatcccggatggaatgcgtgcggaggtagtctgcggcggaataacgggaactggccgtttcctccagcgggcgcagatggggagccggattgcggtggcagtccagacaccattgcatgcgggcatcgcgtggagccctgatgcgttccatgcccgccacgtctccatggcaggacgtgcagccgatgccccggttcaggtgggccatgtggttaaaataggcgtgaccggacaggcggttgaccatcacccagcggaccggttctcctgtgtaaccggggtattgcgtatccgccgcctccctcaggggggcgatgagcgggctgtccggaagaatatgctggtggcagcccagacaggacttcgtatccggaatgccggctctggatgagcgctgtgcggcgctgtggcaagccgtgcagttcatcttcagatctccggcgtgaagtttgtgggaaaagcggacgggctgcacgggttcatactccggaatgctgaaattaacataatatattccccccagtacgaacgcggcagcgagcgcaaccagggcggcaatcccgtaaaagcgtttgttggtattgggtggaaagatgttggccatgaaccgtggagagaaagggctggggcatccgtcaggccgttctgcccgggcgcgggatgcgggcgggcggcaggggcgtatccatcgtcaggtcttcaggcaccagccgtgcggtgcttttcttaatctgttcccaggtaatgcgctggcctgtgtgggccgcttcacgccccatgatggcagccagggttttattggctgcgctttccagtgtctgggtccaggtgccggagcgcaggaaacggtaaaaggccacatgcgtgtctgcgtacatgttgccgcgttccccgcggaaacgccagcggttattcgcctgaatgtaggggcggtagggagtaaccagcattcctttttcgcagatggtgcggtccacgatttccccgtggcagccaacccactgtctgcatgaaatgtgggccgttacgttgtggccgtactcaaaataaacgtcgtaatgatcccatacgtcgccgtcatcccggcgctgggcgcgtcctccggagccgaaagccgccagaggaagctgctcgttcatggaccagaccatgccgtcaatcgtatggacgatttgttccacaaactggcctccgctcagccagttccatgcggtccagttgcgtagcgcccatgccacgtccgtatcggaggaaggtcgggaatccagggccagtggagacttgggaggagtggtataatataacccgtcaaaggagaggacacggcccagctgcccggaggaaagcttgcggtgggcttcttcattcgccttgtcgtagcgccagcagaagccgtccagaatcaccagatttttgagttttgccagtcgtgcggattccagtacggaaagcacgccgggaacgtccaccgccacgggtttttccgcataaatatgtttgctggcgtcaatggccgccgccaaatgttccggacggaaagcggggggagtgcagagcagaactacgtcaatatccgtttgcagcagtctcttgtaactgtccaggccgctgaacaggcggctcctgtccagccaggctcggttgccgtactgttccgccagcaatttggcgccgaaatcgatacgttcctgaaacacgtctgccaatgcccaggcaattgttccgggatcggcgtccagagcgtttttcatggcgcccaggcctcggcctccgcagcctaccaggcccaccttgagcggttttgcgttcgtcagggcctcttctgcgttcaggtagggcatgaaggccaggaatccggctgttcctgcggcggtttttaaaaaatggcgtctgttccaaatagggtaacccatctcaggggaattatacggtgacgtcctgtgaaatcaaacgtcgtattgaaatggtgacacaaaaaataggcgcaaccgtcattctcggaaatggtgctctgcggagggagtcaatgaactccctatattttgcctattaaatgggaagggctgtttcctgcgttcagaacgagaggcagaggttaaagagatatgttgcctgaaaaacagtttttaaggataaaaactgatttgactccggaatcctcagtgttcatgatgaattcaatgaggcctccggctttttaaccaaccatcatgatgaagcgaaatctcattccttttacggcgtttttggcggcgttagtgtttgttgcctgtgacggcggcaagaagcaggatcatccccgggatgtttcggttcccagcgaacaggccgttcctaaaactccgggagaaaaaattctggccgttctgctgcttattcaggatcaggctacggcaaacgcccacgcggcggaggtgaaagagctggctgcctccctgcccggggatattcccaatgaagaagccgtaaatattgcaaatgaattgatgcgtctggccagccgggagtgttatggttcttcgtctctggaagatgctttgaaaggaattcatttcgatgccggggaatacacgggcagtgtgcctctggatgtggatggatttgaacctaccgcggaagagccgtaaaaataaattccccgtgccgggaattgggtaattactacaatgttcctcttcatttcgttttgccggaatgaagggcggtttgatatggtatcaggtcccccggtaaatcctttcctcttcctgatgggaaaatgcgcgaagagaaggggaaaatatctgtacggcccgactcccggagtttttttgctggagaacaaagggccacgggtggtaaactcaatccagggggcggcgcaattcttcaatggcttccgccatatcttcccgggtaatgttcgtagaaatgcctgcctcccctgctttggaaagcagaacaaagcggatggttccggcccggaactttttgtctgatgccgttttttgaagaacagttgccgtatcaatgccgtccggaagaaccaagggaagttccagcgcctgaagcgtgcgaaggatcttgttggcatcggaagaacttaaaccggctttccgttcactcagaaacagggcggcgcgcatgccgagcgccactgcttccccgtgaaggatggttccgtaagggacggcagcttcaatgccgtggccgatggtgtggccgaaattgagcagagcccggatatccagagtttccaattcatcattttctacaatgcgggccttaatggccacgttccgggcgattaggtcaggaagcctggcaatagtattcagggagaagccgatggaaagttccggccccagccctttcaattcatgaagcatggaagcgtctttgatagccgcgtgcttgacggcttccgccagaccttccgccagcgtacgtcgatccaaagtcaccagcgtggtagggtcgattaccacgacggacggctgatgaaaggctcctacaagatttttcccttctggaatattgacggcagtctttcctcctacggaactgtccacctgggcgaccaccgttgttggaatttgcatgaaggggatgccccggtaataaatggaagcgatgaagccggccagatcccctactacgccgccgcccagagcggcgatgcatccggtgcggtcaagtccggcccggaccagttcggaacacagctcctgggcctgaagcatatttttggaagcttccccggcattcactacgtgcaggctgggcatgaatcccgcgctctccagggactttattacgcgctctgcataaagcggggcgacgcagctgtccgtgataaccgcaatcttgccgtccagaccggcgcggtaggcaaactctccggtacggtccagtgctccgttttccacgtggatgtcgtaggaacgttcaccgagagcaagagaaatggtaggcatgaggccagtatgggatattccggagggaacctcaaacggaaagtgcggatgaggcgaagaagacgcattccccttttaatgcgttcttgtcctgggtgccagcggagaaagagtttccaggataactttcaaatgctccgcgcgtgaggccgtgaacccgccgtcatccttccagatgatattgccgttgccgtccagaaggacaatcgctgtttccgccttcttgtgaagggaaagtctgcggcgtacaaaagactggtcataataggaaatcagggaattggtcttcatgtaaaaatccggaaaatcccccagagcctgtgtaaaggcggggacatcaccttcaatggggggtggctgcagaaccagcaaaatgctatattccaccggggttggcgtatgtttgtactgtttgcggaggccctcgcagaagggaagccactttttcattccgtacaaagtttccgggtgaaaaacagtcagcatgatatggaaactttttggaacgataggaggcagggaaatattgtctcccagtaaattcatgccgttgatatccggaaaacggtaacgtccgtttcctcctccataaggatgctcgggattgggcgttggcaagtgtatttcctgattcttcatgctctgttagacaaaattcgaagaaataatgttcatgtcgatggttgccgaacagggtatgttcattggtgcggggaagggccttttttatgttggaaggctctctttctctgaaaattccggccgattagaaaatcggtattcatggaaaggggaatatataggcctgttataggtttttctcgaagaaaggtggggtacaagagcagggaagagagggacgttcaaaaaaagatgcggaggaaagaggcagtatgacaaaagcatatactgttcatgatatgtaggttatgtgggtattgagggggtggcgggaataagcggacgcaaaaaagaggacgaaaaaaattgacaaaaaggtgtggtatgatagatttctcggcacgccaacacggcgacgggatgaaaagcccggcggctgaaaggctcggaagagcgctggaagcggctggagccggccacccggagaaaaccccggaaggggttgcgataagaagatttcaagggaatgactaccgaaaccgccgagggttttccgagggtgccgagaggtgcctgaggggtaaaagcccgaaggagcgacctagctctgagaggggtggtttggtagaagcaaggggaaagaaaaaaggtcgtgacgcgcgccgtgcgaggcggagcgaagaggccttcaagagacacaacttgaaggaagagctggctgaagcatggcgcaaatgaaatcgcaagattccatttgatccagcaatttcaaaaattaatttgatggagagtttgattctggctcagaacgaacgctggcggcgtggataagacatgcaagtcgaacgggagaattgctagcttgctaataattctctagtggcgcacgggtgagtaacacgtgagtaacctgcccccgagagcgggatagccctgggaaactgggattaataccgcatagtatcgaaagattaaagcagcaatgcgcttggggatgggctcgcggcctattagttagttggtgaggtaacggctcaccaaggcgatgacgggtagccggtctgagaggatgtccggccacactggaactgagacacggtccagacacctacgggtggcagcagtcgagaatcattcacaatgggggaaaccctgatggtgcgacgccgcgtgggggaatgaaggtcttcggattgtaaacccctgtcatgtgggagcaaattaaaaagatagtaccacaagaggaagagacggctaactctgtgccagcagccgcggtaatacagaggtctcaagcgttgttcggaatcactgggcgtaaagcgtgcgtaggctgtttcgtaagtcgtgtgtgaaaggcgcgggctcaacccgcggacggcacatgatactgcgagactagagtaatggagggggaaccggaattctcggtgtagcagtgaaatgcgtagatatcgagaggaacactcgtggcgaaggcgggttcctggacattaactgacgctgaggcacgaaggccaggggagcgaaagggattagatacccctgtagtcctggcagtaaacggtgcacgcttggtgtgcggggaatcgaccccctgcgtgccggagctaacgcgttaagcgtgccgcctggggagtacggtcgcaagattaaaactcaaagaaattgacggggacccgcacaagcggtggagtatgtggcttaattcgatgcaacgcgaagaaccttacctgggcttgacatgtaatgaacaacatgtgaaagcatgcgactcttcggaggcgttacacaggtgctgcatggccgtcgtcagctcgtgtcgtgagatgtttggttaagtccagcaacgagcgcaacccctgttgccagttaccagcacgtgaaggtggggactctggcgagactgcccagatcaactgggaggaaggtggggacgacgtcaggtcagtatggcccttatgcccagggctgcacacgtactacaatgcccagtacagagggggccgaagccgcgaggcggagggaatcctaaaaactgggcccagttcggactgtaggctgcaacccgcctacacgaagccggaatcgctagtaatggcgcatcagctacggcgccgtgaatacgttcccgggtcttgtacacaccgcccgtcacatcatggaagccggtcgcacccgaagtatctgaagccaaccgcaaggaggcagggtcctaaggtgagactggtaactgggatgaagtcgtaacaaggtagccgtaggggaacctgcggctggatcacctcctttctatggagcaagtgcacggaagtgcacaggtcggatctcttcccgaggggagagagagcggaacccgcgagggcccgcaacgaaccaaagatgtgtaaacagccagacgcctggagcgaaacctggcacgacgtgcgtgacgaccttttttcaccgagaaccgcaactgggggtatagctcagttggtagagcgccagctttgcaagctggatgtccggggttcgagtccccgtgcctccaccagtttcgggaaagagacccaaagccgggcctgtagctcagttggttagagcacgcgcttgataagcgcggggtcacaggttcaagtcctgtcaggcccaccaacaaaatcgattattgagggaaagcgaaaattgacatctgcgtggcaaagaaaacgattgctgagaagcaatcgctttccaacaaagtgggtagttgaacaacaactacaaaacacaagataaacatgcataccaagcaatgagacaatacagtaagtcacgaaagggctttgtggtattgtggaagtggtaacagcttttgcaatatgatgaagtaagtaagggcgtacggtgaatgccttggtgccaacaggcgaagaaggacgcggcaagctgcgaaaagcctcgggaagctgcaagcaagcgatgatccggggatatccgaatggggtaacctgatcgaggcaatactcgatcgttcatacctgaatacatagggtatgaaacgcgaaacccgctgaagtgaaacatctcagtaagcggaggaaaagaaagagaaatcgattccgtaagtagtggcgagcgaaagcggatggagcccaaaccgaaggtattccttcggggttgtaggaccacgtcatattcgaccatactggatagtagaacagcctggaaaggctggccggagaaggtgaaagccctgtagacgaaatccagagtgggaattagtggtatcctgagtaatacatcacacgtggaacgatgtatgaacccgcgcggaccaccgcgcaaggctaaatactagttggcgaccgatagtgaacaagtaccgcgagggaaaggtgaaaagaaccgctgtgagcggagtgaaatagaacctgaaaccgtatgtctacaaagtgtcagagcagagcaatctgcgatggcgtgccttttgtttaatgagtctgcgagtcagtgtttgtggcaagactaagggcttccggcccggagtcgcagcgaaagcaagtccgaacagggcgcaataagtcgcaggtactggacccgaagcggaggtgacctacccttggccaggttgaagcatgggtaaaaccatgtggaggatcgaacaggtgaacgttgaaaagttctctgatgagctgagggtaggagtgaaaggctaatcaaaccccgtgatagctggttctcttcgaaatgcatttaggtgcagcgtcacgtgctgatgcgcgggggtagagcactgacaaggctagggggcacacccgcttaccaaaccttatcaaactccgaataccgtgcaatggaacgtggcagtgagacagtgggggataagcttcattgtcgagagggaaacaacccagaccagcagctaaggtgcctaaataacgctcagtggaaaggatgtgggattacacagacagtgaggatgttggcttagaagcagccaccatttaaaaaatgcgtaatagcttactcatcgagtgatcctgcgccgaaaatgattggcgatcaagcgttataccgaagctctggactttgccgcaaggcagagtggtagaagagcgttgcatgcgcgtcgaagggcgatggcgactgaccctggagcacatgcaagtgagtatgcagacatgagtaacgttaagccgggtgaaatccccggccgccgtaaacccgaggtttccagggcaacgtgtttcgtccctgggttagccgggacctaagccgaggccgagaggcgtaggcgatggacatcaggttaataatcctgagctcgcaacccttaaactggggggacgcatgagaaaagatgactaggttattgaattccgagttgagtccacggactcagcgcatcattggatcgagtgccaagaaaagccccagcgtatgctaagcgacccgtaccgcaaaccgacacaggtgggtgggtagaatataccaaggcgtaagagtgaaacctggttaaggaactcggcaaattagccccgtaacttcggaagaaggggtgcctgcagcgatgcaggccgcagagaaatggcccaaccgactgtttatcaaaaacacagcactctgcaaagacgcaagtcgaagtatagggtgtgacacgtgaccaatgccgaaagattaaggcaaggggttagccgcaaggcgaagctctaaacccaagtcccggtgaatgtcggccgtaactataacggtcctaaggtagcgaaattccttgtcgggtaagttccgacctgcacgaatcgtgaaacgagttgggcactgtctcaaccaggcgctcagtgaaattgtagtggcggtgaagatgccgcctacccgcagaaggacggaaagaccctatagaccttaactgtaagctgtcattgtttcttcggttttaatgctcagagtaagtgggagacgctgaagacgccctttagggggcgtccgagtcatcaatgagacaccaccctttgaaactggaggatctaaccctgagccgtgaatccggccagaggaccgtgtcagccggtcagttttactggggcggtatcctcccaaagagtaacggaggagcgcgaaggtgggctcagcccggttggcaaccgggtgtcgagtgcatgggcataagcccgcctaactgtgagaccaacaagtcgagcagatgcgaaagcaggcccaagtgatccggcggtagaaagtggaattgccgtcgctcaacggataaaaggtaccttagggataacaggctgatcacgcccaagagttcatatcgacggcgtggtttggcacctcgatgtcggctcgtcgcatcctggggctggagaaggtcccaggggtccggctgttcgccggttaaagcggcacgcgagctgggttcagaacgtcgcgagacagttcgatcctctatcctctgtgggcgttggaaaattgaggggttcagaccttagtacgagaggactgggtctgacgcaccactggtgcatcggttgtattgtcaagtgcatggccgagtagctaagtgcggacgggataagcgctgaaagcatctaagcgccaagcccttcccaagatgagttttccctacaggttcgtggaagaccaccacgttgataggtcgcaggtgtaagtgcagcaatgtattgagccgagcgatactaattaccaattgacttcatcatattacatcactccccgtcgtgaatgacaacttgctcttgtctcatttacctgtgcatgttcatcaaccaccagccacgcagatgtcagtttacgctgaatccctccccacacaaaggacggaaatcttcttagccgccacacacataccctgaaaaaaatccctcactcagaagcccccaaaaaagcagggctcccgggcaggcaggatgaagaaaaaatcacctcttccccctgaagcccggtggccagagcgcagtggtcccacccggtcccgttccgaacccggaagtgaaacgctgccgcgccaatggtagtcggacgataggtcccgcaagagtaggtcgccgccgggatttttttccatcaggccccgccagtcacttgactcgcggggcctgttcttttcttgctcgatcccgttcttctccccctacattctcttagttagtttccttcttgtaagatgtcatatttcttgtatgtattagtgttactatgttttctcatgcttttgccgccggggcgcttcttggaactgccatttctccgcttgtttgcgtatctgccgcagaaagatcgcctgtggcggcggctgaagatgtagtggcgcgtgtaactccctcggcaaagggggctgtcttgttccacttaaatccggatcagggcaacaagatcactatttccggtattgccggaggtatccgggtggaggcgtcagatgtgcgccgcttggtggcgggttatggatggtatttaaagaatatagccaaggtccatttttcgtggaacggaaatcggataacgcttccttcccctttgccggttcccgccagtccggttacggtagaaagcccgtggaatatcgtttttgcctataattactgcaccctttcttatacggcggctttttgggattggaacagatggcagcgggagattgattttctggcgttgaatgggtttacgcatgcgctggtaacggcgggtttggaaaagacatgggaagattttctgacaggcttggggtatccccgggaaaaagctcttcgttttatccctaatccggcatttgccgcctggtggaatatgggaaacctggaaggccacggtgatccgctgagccagcaacagataaataaaatggcccagatgggaaggcgcattgtctcccgtatggaacagttggggatgacacctgtacttcaggggtatgtgggatttgttccttctgactttcaggaaaatgtccggatagacggattgaagcttattcctcagggggaatgggttaatttcaggaggccgtgggtggtggatcccacttgcgaggcttttcccaaactggccgcggactggtacaaggctctccgcaaggtatacggcattcctggaaagatgtttggcggggatttgtttcatgagggggggcggaagggggatattgacgtaacgcaggcggcacaggcagtgcagaaagccatgcaaaaggcttctccgggggctttctgggtgattcaggcctggggtggaaatcctacccgagagttgttgtccgggttggatccggagcgtgcgcttgtattgcagcttaccaaggatatggctgacgggggaaagaatttaaggacttttaatggtattccgtgggtctggtgcgaactggcgaactttggaggcaatacgggaatgtacgggggggttccccttctgtcccggctcggaagtgagttgtccggctataaggataagggactggtgggcatgggaactttgtccgaagggcttgagacgaaccccctgcattacgccctgttcagcgaccgtttgtggactagggaggatatttctgtccgggagtggcttggaaagtacgcgcgccagcgttacggtttcgcaccaaaggctgtcgtgaaggcattggaagttctgtcttcctccatctataaccccgttcgttctcaggaagggtgtacggagtctattatttgcgcccgcccgtcctggaatgttcgaaaggcatccacatgatccagcggggagcgatattatcacctgggcgatattgtaaaggcggcgcgcggttatctgaaggccgcgaatgatcagccgaatttggtgaaaaaggagacgtttcgttatgatttggtggatgttgtgcgtcaggctcttgcggacgctgctttttaccagcttcaacaggtcaggagtgcttttgattccggagatttggctgcgtacaggaaacaggtaaagcgtttcctgtctctgatttcagatatggatgcccttttggcgacggatagccagttcctattaggaacttggcagaaaagggctttggattggggtggttcccggcaggaaaaagccttgatggacaagtctgcgaagatgcttatcactacgtggattgatcaggttccccggtctctgaatgattattccaatcgtcagtgggccgggcttgtttccgatttttatttgcctcggtggaagaatttttttgaatttcagatggatgtcctgaccggaaagaagacgcgtgaggccgcccatgccgcatttatggataagatggttcgggatgaactggcctttgccggaaatgggaaaatatattctgccaaaccggcgggggatactttggccgttgctaatcgtgtgatgaatacccaccgggaaatgttggacgccctgagtgcggaagaaaagcattcctcgggcagtccatgggaactccaacaaggttctccgttgcagtttgatgtgacggatcaggtgactgcttctggcacatatactgctactttccagtggaagaatggccccagcgccttgaaaatccattctgtcagattatacgagggtaacagggaggtggcttccgatgttcatgagggcagaactggcgtggaaaataaggataatatttacagactggaattgaagaagtacagaaccaaccttgattcctatatcctgaaggcagaagtaagcggtgtttctcagggcgcttccaaaggagaaatggtgttgaaaaaactggtggattgagaagtggacaggaagttgtgcagggatgggagaaaaggcggttatacgtgcaggcttttccatttgttccggaatcagtttgtttccctcgccgaaaaaaggaagaagggggatttccccctttcttccttgaaagatggcatggtgataaaatttatcggcgatggcgtaacaatagagcgctaagaccgaacagacccagcgtagcggttgccggttccggaaccacttcattacttgtggagaagtttactgccgacaaatacatgccctcccaagagttctgggtattgtttttataggtgccggttctgcagccgctatgcatgtccggagaaaggctgtttaaataaacggtttcgggaagtgttgcttccttcctattcgtggcggcggacataacggaagaagacgattgggtcgcagaaccaaagtggttgttacctgcgttgttggcggtgttagtgttcgtggtggagaatatggtggctgcttgggcggttcccaacgataaaaaaatggagataacagaaataatgggtttcatttttgggatggaaatataacttgatacattgatattcaccggaaaaaatctatagaatttcgaatcggctttgaaaaacatgaaatgtgttgatgttataaagaaatattgaaatccttgaaaattttggatgaaaaaacgattagtaatagtcttttttgtttcattatcagtattatccgagaaaaaattcatgacccaacggtaaataccggttctagattttccttactccgacacatagcaaaaattccgtcttcagaaaactcctgcttcccgaagcggaatggtcagcctacacaagctattctcttttaaaagtaaatattgacctcggattcgcaacccgtttgtcgatattcttattgtactgccccaatttatgctccggttccaaaagatgagctgtacaggaccttttgtagagatggatttttttggatatagccttttcgttcagagggctgcctggtaaatgctgaacatcagaatggccattcccgtgagggctgcgcctgcaatgatgccggaggcggtggggactttatattcccgtgatttggccttgaaaagatggtccgcagcccagccgagcacagctcctgtaaagaagaggaaggagtcgttccactggatggcccaggccaggccaaagccgatgggggtggggagccattttcctgtccggggaatatagcggggaataagcaccagaatgagtccgagaataccgcctgcaatgatggaaagcaccttgatgctgtgcaaatggctgaaccccatgcccagtgcttccgccgtggccgcccatgttctggctcccggagcattgaaagcctggagagcgttcgcatccggaaccatggagcggaaggccagcacggagacgagggttcccagaaaaattccggaaaactgggcgatgaattgtttgcgggggttagctcccagcaggtagcctactttgaggtctacgagcaggtctgccgaggaactggacgctcctgaagtgatattggccgccatcaggttggctgttacgtgcccgggtgcaatccctccgaagatgagctgtgtaacttttcccatggctccggtgggtgtaatattggcttctccggtgattcggcagacgaccagcgctaggaaaaaggatatgactaccgcgatgcagctcatccagtacggaacgttaaaggatgtatgagccagatagccgagagctcccagagagataagctggcctgtcagaaaccagctcatgggtgtttctattttttccacatctgtcagttttcgttttttactcagggaaaacatggctcctagggaagaaaaggaacgaacaatgcttttccattggaacaggaaagccacaatgctggcgacgaccatgcaggcggttcctccccacagggtccagcttacgctctcccgataacctgctcccgcgggaagcaatttctggctttccagccacggaacgtaaagagcccagcaaacggttcctccgatgaagagactaagggatgttttcatgcctaccagagctcccgcacccacgaacatgagatcccatttgaagaagatagtacgctggtaccagttgccgaggatatgttgctggaccgttccaagccatcgttctcctcctgcagccatggcgatggcattagcggcggcgaaaagggcagaataaagaagggctttggcctgtcccgccgcctttttgccttcagaatagagaactttgagggtttccgccgtagcaatactgtctgggaaccttatttgttcaatgttgatcatctggcgtttcatcggaatggccatggtgacacccagtacggcaatgaaaaatatccaggcgaaggtagtgccaagaggcatgtgctgtcctgtcagcaggagcagggcggctacggcagaggtgagggttccccctgtagaatagcctgcagaactggcagcggactgcatgcatgtattttccagaatagtcatgggggatttggaaatgcccaggcgcacaaaggcgttccagagggcaaaagagataattcctgccgtcagagccaccccaaaggaccatcccattttgaggttggcgtacagattagtgagggaaaggatggagcctagaagcatgcctacgatgacggctctccaggtaagctgcttcattctgtctccggaacccagataaacttgatcgtaccattgctgttctacttcatccggagtaccttggaatccatccagaggcagcggtttttccaagcaggaggggagagggctggaagattggggggacgtagatgccatacagttcataatatagcatttgcgggagtggtggaaaagtcgtatctgtttttctctgctttcggcgttccttctgcttgagacttgcgtgcttgtgacggccgtggtttaatgggcggcatgagccaatcttttacggataaacttgccgcccgcattaaagagaccggttccgccttgtgtgtcgggttggatccgcgccccggcatggatgatttggaggcgattcctgcgctgttgcggaaggttgtggaggaaaccgctccatatgcggcagcgtttaagccgaatattgcctattttgaagccatggggttgcgcggtctggaaatacttgaggatttgcttccggatatgcctaaggatgttccggtggtgctggatgctaagcgtggagatattggagagactcagaagtattacgctcatgcttactttgaacgcctgggtgtggacgctgtgacgttgagtccttttatgggatatgatacgctggagccttttctgaattatgaaggtaaaggtgtttatctgctggcagttacttccaatcccggttctgcggatgtggaacggcaggaactggcagggggccgcagggtttttgaactggtgggagacatggtgctccgttctgtccgggaaggctgtaaaacttccgtaggcatggtggttggtttgaccaatgcagattccagtattctggagcgtattccggatgctcctttgctcattcccggcctgggtgctcaaggcggtgatctttcctgcctgagtggttccggtcatgtggcgcctcccctgattaatgtctctcgaggaatcatgtaccagaatccggaattgggttttgctgagaaggccgccggatttgctcagcgcattcgagaggcattgaattattgatgttcatgtattttttgcaaataacaaaatgataacggcctgcttatggctgtgcatgagcttgtcaaagggagggggctgatatattgaacaggtgcatccccattccctgcccgttttttatggatgaaaagcccggaattgtaaaattcactccccattccacttccagatccgcaatgttgattgcggtggcagtgacagtgggtgttcaggtggctttgtgtgctgtgcttgtagccatacatttgcaggatatgtggtttccctccgtccagggtggggaagtggaaatgacgtttgtgtccccgtccgaagaagtttctcaggagatggaagaagttcagcctacatctgttgttccggttgcagctccttccacagtcagccctgttccggagattgcgtcagatgaagacttattggcgatgaagctgccggaaaatgaagattgttccgaaatgaaggattttcttttggatgaagctccttccgaactcttgccggaggagctcgccgccatgcggatttccatgaatgaagtaaagcgaaggcagcctgtgaagcgcccggcggtatccctgccggggcgtccggaaccggatcagaatatttctcctgataaaaaggtgcgttataaacatgctccgtccttgcccaattccgtcaattcttctaaagtcgggaaggtgaatgccgtggtgaaagtagtggttggagtaaattcccatggggaaccttcatccgtcaatcttcttcagtcaacgggaaatgcggaattggaccgcctttttatgcgttgggtgagagagaattggactttttatccggcggaaaaggacggtgtgcccattgcttccaaggtggtggtgcccgtcaggctgaatatagattaacctgtacaaggaaatataaagatgcttccggagaagacagagaataggcccgtttatgtgatcggccaccagaatccggatacggatgctatttgttcagccatagggaatgcggagtttttaagaactcatggcgaacctggtgcggttgccgccagatgtggggaaatgacgctgagaacatcctgggtattggaaaaggcaggagtgccggagccgatactgattcatgacgtgacgcccaccgccgggacaatctgtcgtcgtgatgtgattagcgtaagtccggacgatacattcctgacggcgtatcgaaggatgacggaaaattcccttcaaaccataccggttattgacgctgattacaaccttcatggcctattgcgttattttgatttgttgagcctgctcatgcctctgaatatgacggagatgaatgtgcgctccgtcttttccagcctgagcaatatcgccaccaccattgacggaaaatgtctgaccggggaatccttaagtgaggaagaaacgcagaatattctgctggtgggtgcttccagtgaacccagcgttcgaacaaggctcgcaaattacaggagaaaagggattatccgggatctgattgttatttgtggggaccgtccgaatgtgcagctatatgcagtggaacatggcgtacgcgctttggtgaccacgtccggtgctttcccttccttggacattattgagacggcccagacgacgggaacatgtattttgagtactccctgggatacggccagtgttggccagttgatccgttgttcccggaaggtgagggagcaggttcagaaggattacaccgtttttccggagaatatgccgctgcccgagttgaggcaggctgccgtaaagcgcaagcaggcattgttccctgtgatgagtatcaagacgaacaaaataattggtgtactgagtaagacggatttggtggatccgccccgtacacgtgtggctttagtggatcacaatgaattttctcaggccgtcaagggggtggaggaggcggagattgtggaggtgatggatcaccaccgtttgggtacccagctttctacacgggatccaatccgttttctgaatgaacccgtaggatccacatccaccttggtggcacgcagattttaccatcgtaatgtggaaccctcccaggctgtagcggtctgcctgtgcgcggggattctttcagataccctgaatttgacatctcctacgacggctcgggcagatagggaaatgttggaatggctgacagggattgccaaaatagatgccaagaagtttacagaggagttttttgccaccggttctctgttgcgttccaaaactgaaccttccgttattattcaggcggacaggaagacttttactgagtacgggcataagatcagtatttcccagattgaggaaattggtatgtttggcttggaagatgtccaggaaggtttagtgagggaacttcggaagctggtggagaaagaggggctgaagcttgcttgccttttggttacggatatcgttactcacgattccatgttgctggccgtcggggatgaagaagctctggaaaatatcgagtacgagcggcttggccctaatttgttttccgctactgatgtggtaagccgaaagaaacagctttttcctgctatttcccgtgcattaaagacgttgtagatgccggaaatctttgctttttacaggcaagatttttcctgaggaggaacggcgttgccgtgctgtaaggggtatagatcagggaattgcaatgtctgctacgatagaacggcggatagtatccggtatcagcacagtactggctctttcaggtttgagcggcggcgtgcaaaaaactcggtctaggcgtaatagagggaaattgacaggttgcgtagctccgtaaccggcacctttcagtttgaagcaatcctgaaagtcggaactgagtttggagaaaattggggattgaggggcagcgctgaagttcccggccatgataatgggaagttctccatgctgggttcctacttccctcagggtatcaaacaggtattgaagttgtttacggtggataaagcggagtgtatggaaatatttccagcaggcgggggagtacaggtcgaagcgatgttcaaaaggttccagactgatgttgatgagccgaatcgccaaggaggaattttccggtatccagtctacaatcaaaccggctgtgtccgtgatgctctgggctggaccaatctgaccgtgccttacaatgatcgcgcaacttcctatttgcttgatataagaggttctaccgaaaatgctgtaggcaaatttgagtgttcggttatagttgctgcagccttggacgaaaatgacatctgcacggagtttggatatttgttcaatgggagggggttcctcgcagccctcgtacaaggtaagaacccttatttgcctggcatccggagatggcggcattttgtagtattccattccagttctggcaatgggcgggagaaagtctgtaatgacgatgccgtacgcaacccagacgataatgccaagcagaccgatccgggaaccgaagaccagccatgcaatgagcgccggaaaggagaaaatgagacagcaagcccatatgggcagtgacgttgcaaaagccatcgtgtctgaaccggtccagaaaatagtgacgacgatgatccacaggcacagagagacgccacccagcgctattcccaagtggttgactccggatagcgttggcagaggttctgccagatgtttgcgtcttctgagccgatgcactgtggtgacagattagaagcccatgcctggagggagatccaggcctcctgtcagctttttcatttccgccgcggctgtttccttacccttggcaatagctgcattgatggtttgaaggagaagctcctggagaaattctgaatcggacgggtcaatgatggaaggatcaatgaccagttccgtgaggttgccgtcacaggtggcggtaactttcaattttcctccagctccttccgttgtaacggtttgggaggcgagtttttcttgagcggccgcaagccctgcctgcatttgctggacctgtttcatcattttcattatgttcatggtcgttgtgtctgagtggatgagttgactattgggaaatgatacgagcccggaaaatctccatagcagcatcaatcagcggatccgtgtagtaagagttatcttcattttcctctttggaagcttcctggacaggctctgcggtttttttctgcggggtatgaggtttaggtgcaggaatggtggatgcggaaggaggtggtgcaggcagaggagccagttcttcctgcacgggttcgggaatggagaaatcctgacggatagaaatagtaacagaggtcccaatatattgggaaagagcagcttccaaagctgttcgcagagggccggttccaagactgtccatcccctgacggtcagaaggatgaaaagaaatggcgactgctacaccatcataaccggaaaaaacgctgttggctagaaagtccgcttgaagagggaatttggcggacatttgttccaacaccgttttccagtcttcttccgtgattgttcttcctgattgttgggacagaactgccggttcctctttttctacgggtgcctgggtttgggatgatgtgcttggagtatcgaatagattgtcaaagaaactgttagttcgtctttccagaggaagattttcctctggatccataaaagtaggctctggagaatccgtaggaaatttcgacacatcggaggcatcggagtctggatgccgggtgatttcttcggaggcaggtacggtttttgtccgcaatttagtggcggagtagggaaattcttcctctgcaacggcaagagaggtggggggggcagcgggtgtaagagtttcctgttgtggttcggcttcctgcgtaggatggggagaagcttgagcgtcagtactctgaattttctgtactgcgggagatgaagcaggggaggacacagaaaaatctggaatcggatccatcaaatgttcttccgtagctggggttgggtttgttgcagcaacaggagactggatgttttgccggggggccggagtgggtgccgtggcggaggaaataaatgtacttggttcctgctgtgaagcaagatctgaagaagaggccggtgccgcggtggctagcggagcaccttccaacgccatgataatatcgctgatgctggcctcagccagagtatgaacggctttaatcaggcccatttccagatgaagccttttattggtggaccagcgcattttatcttccgtttccgccagaacttccaccaaacgcaggattttgtccgtatgggtgcgtttgaccaattcggcgagttcctccttggaggattccgggagagaatcaaagctggcttctggatctactttagagaccagaatttcacgcacggcggagataatttcggaaaggaactggctcatgtctcttcctgcttccgcctgttcatgcagaagatgcaggagagagggaagttccttgttcaaaataagcgccagagcatgggccacggtctcccgggaagtaatgccgaaaatgtggagtacctgctgttcttcaatatgatctccacagaaggaaacaagctggtccagcatggattgtgcatcccgcatacctccatccgccactttggcgacagcaaaggctgcttccctgctcaaacttactccctctgcagaagcgatatggagcaggtgttctgcaatgatttcagaagggatggggcgcaggtcgaagcgctggcatcgcgatagaatggttggcagtattttgtggggttccgtggttgcgaaaataaatttgacatgaggtggcggttcttccagcgttttgagcagggcgttgaaggattccttagtgagcatgtgcacttcatctatatagacgatacggaaatttcctctgctcggagcgaaccgtacgttgtccctgagatcccggatgtgatcaatgccgcggttggatgctccgtctatttcaagaacatccaggctccgcccttccgcaatttcttcacatatatcttcatgcgggtcaaaatccactttgggcccaccgctgcagtttagagctttcgcaaaaattcttgcggttgatgtctttcccgttccacggggacctacaaagagataggcatgggcgagacggttgtgctcaatggcgtttttcaacgtccggacgacatgatcctgtccaaggacgtcattgaatgtcagaggacggtattttctggcaaagacctggtaactcacggttcagaaagactagaagatgagttcccgtttgaaaagaaaatagagagtaattgttttaaaatgttgataaaacggttcttgcacactcccgctacggagcttgcctgaaaaaaatatcaagaaaacaatgaggatgtcattttgatattgaaatctgaaaatgttcatgccaatctcacaaaagtaacaggaaccttctcatctctataatttcctatgtgggtcaaagtatcaatagcagccttggtcattgctcttctcggaggagccatgtattatcttgataacgaggaagctctaaccaaggagcgtagggaatgtgcttcccgctacaagaacctgaacggccttcgtggcgaatttacggaagaaaagacgaaatatgtcgatttcctggtgaagaatgaggctctgacgaatgacatcaatgctttaaccaaggaaaaggatgaactggaagtaaagaatcaggaattggcctcagccaatgaggccaagaaatctgaccttcaaacgcagcaaaccgctttggcggaattgcaatccaagagcaaggatatggaaagtatccaagccattgctgacagaatcaaggggctggaagaagagtccaagcagttggaagtggttaagcaggcggaacagggaaaacatgatgccatcgttgctgaaaccgaacagcttgttgtgaataatgccgctcttcgtcagctcaaggccgaccaggatgcccgcctttctccgcccaacctgaaaacgagggtttcccaggtgattcatgattttaatgtagttgtgattgacggaggagccgccgatctgggcgtggtgcccggttccaagttggccgtcatgagggacggcaacaaaattgccgagcttgacgtaaacgctgttgaatcccgtgtttccacggccactattctaccaagtacggtaaccgccggcgaacgtgttgaagccggagacgtcgttgtatctgttcgtccctagcatttttccggttcaatacactccatacactctcacatatatacacaatgaaaactgtcttagtagttttattgattcttgcagcaggggcgggcgcctggttctccggtcttagcggccttttcggtattaatggccagtaccaggattttaaagaaatgatttcgtatcgtaagaccttggacaaggaaatacgtacttggacaagcttgcgcaacgacatgattaagaatcgtggcttggcagcggaagaaaatcttagtctgatttccaacaaggcttccgtgacgcagcagcgtgatgaacagctttccaaggaagcggagttgaaggaagaagaagtgcagttgaatgcggacttgtccaaaatcaataaacagattgaggaattaaagagcaagttgcaagatttcggtgtttccagcgtacaggaaatccaggagaagatggaatctttggaagcttccaataagaagctccaggaagatattgaccagattaaaagtgctacggaagtggcttccaagagacgggcagaacaagcttctgagctggctagccgccagaaggagcaagctgaataccgagctgctcttgccaaaaatggggaagagtatcccgttctatccgtggatccgcagtggggttttgttgtgattggggccggacagggcagtagtattgatccaaatacggttcttcttgttacccgtgaaggtcgcagcattggtaaattaaaggtaacttccctggagaaaaatcagacggtagctgacattattaaagacagcgtaccgtctggtatgagtattcaacccggcgatagagtacaactcctgcgtccccgtcagtccgccaaataaaggtttgccacgtattttccttgaaccccgttgtgtcgtccggcataatggggttcaactttttaaaaggaaatgatgaaacgatttgcaatctcctttttgtttgtgtctttttctattcttctggtctcttcctgttcctggttgatggaaccgcaggagagggagcgtgtgccgcagccgcctcccggttcggaaaagagtgcgcttcctcataataagacccaaagatttgaggcggaagcaacgctcggcccgttggcctcgccgagacgttaacggcatccgaatgacgctggacggtgattctgttctttacagtatccgacaaaccggatacaaccgcctccggtttccaagtggagagatggctgagctggtctaaggcactcgactcgaaatcgaacgtgggctttaaaacccaccgtgggttcgaatcccactctctccgccagtttttcagtaagagccccgtcggaagacgaggctcttattttcgataggaaaggaacaggcgggaattcagataggcggctgttcagtgatagagggtgcgttcttgaccggggtctttaaggcggtctccgccaggatggttgtaactataataatttttgttggttgtttcggtcggtttaccaatgattacatgatccagaaaacgaacgcctaataatttggagcattcccgcacacgttcggtcaggaggtcgtccgtacggctgggggctggatttccactgggatgattgtgggcaaggatgaagccataggcgttatgaatgacagtggggcgtaatatgtcacgtggatgagcaatggattcgttcaaggtcccgctggatatttccacgggtttgatgaggcggcacttggtatccagcagcagaacgagcaccgtctccttttccttccagcgcatggctgtagtcagataatcatagacatcttccggtgtttgaatgggttgacgtgacagagtttcacggagagccctcgctcccagttcaaaggcagcgctcagcgtagcggctttcgccatgcctattcccttgcaaatgttcgctatttcagcagcttccatatgagctagggcatctagagagccagcagactgaatcagatccgaggacatgtccaacacatttttccccttgatccccattcggagaaagatagcaagcagttccgcgttgctgaggctgtgccttccttggcggagcaatttttctctgggcagagactgagagggcagttcctgaagtttgcggtaggtcatttcaataacagaggcgtgcggtagaaagaatggcggaaggcagatgtcgcagcgtatcccctgccgtcaatgtttgctgggtggcttctccggcggagattgccatttcggaagctcggccacacaggtagacgcccagaacggcggaaaccagcagggattccccctggcttataaagcctccgcaaatacctgccagcacgtctccctgaccggcagttgccatgccgggatccccagtgatgttataaaaaagaggttttccccgttgggtgacgatggtgcgtgctcccttgtaaaccagggcggcttcatgttctgccagaaagcagtcggcaatgtctgcccggatggcatagttgtctgcatctggcagaagtctgcgaatttctccatggtggggagtagccagaacgtgttctcccaagttccactgcatggccgcggccagattcagcccgtccgcatccagaacagtgggggtacctgtttccagaatgaggcggatggcttccgcatcttcctccgatacggaaccgatacctgggccaatgaggaaagcactgaatgtgcgaatggagatatctgcgtaactgtccacgggtctgaccatgatttccggaggcatggatggagcgattaagggatagacgtttttgtgaacgtgcagtgtaaccagaccggctcctgcccggagagctgcttcacagcagagccgggccgcacccagcattccttcagagccagctatgacgccaatgtgcccgcgtttgttcttataatccgtatagggtcttgcagagaggaatttggtaagccgtgaggaggtaataagttccgtggcggggagcgcctgtacgtgaagaccgggaaggtcaatgcagactaagcgtccggcaaacagggtggcgtcatcgtccagcaggccctgcttaacggctcctatgcacatggtgaaatctgcttccactgcattttgctgaggcattcccgtatctggatccactccggtggggatatcaatagccacggtacgtacagccccgcaacggtttcttatatagttcatttccgcgcagagagcggagatttccctgcggagcattccctttgcccctattcctagcaggccgtccagcaggatcataggttttcccgtacggggaaggggaggggcctggtattcctgagggggaggagatatttccgccaactgccgcacggaaagttcgctccattcgttgcgcgggtaagcggttcggaagcctatttcccagccatgttgtttcagtatgttaaggacggtgagagcatctcccccgttattccctttgcccacataggctacgcacaatcccgggtcggggaagaactgcatgagagattccgcaataccggaagaggccagtttcatcagggttctggctggtgttccgctaacgatgagctcgcgttccgcgatctgcatattttccgtggagcaaactttcatggcatactgatagaggcagcctttactgtaagctaaaaaaccttctcctgcaagccggagaaggtttttaaaaagaagctgaccagggagcagctaaccgatgcggaacgtgatgcgcgctttggtcatgtcataaggagacatttccatacgcactttgtcccctaccacgattttaataaagcgtttgcgcattttgccggaaatatgggccagcacttcgtgcccgttgggaaggcgcaccttgaacatggttcctgccagtacggcgcagatggtgccttccacttcaatttcactttcggagttttcttccttggactctgatttattgaaattctttctgcccttggtgtggcgtcctccgcctccttgcgggcgttgcctgttggcgttacctccggggcggcttcctccccctgttctggaatttcccggccctgcagactgtccggccgaccgtgccgctcctgtgccattgccggaaggtctggattgtccgggacggttactggtgccggtcggtctggaaccggggcgggaattttgtccgccgctggggcggctgctggatcttggattcgggctgataggactctccttgtaaagttaaaatgaacgcgtgtgtacaaatcccgcgcaggcgaatgatagaccatatttttgcaagggcaagtcctgaatgcggaagttgtgcaaataaaacacaattctatggagaaggacgggaaaaaggctgtaaaagagaaaaagtatttgacatttacgtgaataatcattaggaatgcgcccccgaattggaagataacggcaggatgccgaaaaacgagaacgaagaattgaaccatgaagaccttctcagccaaaccgcaagaagtagagcgcaaatggtatgttatagacgctgccgacaaggtgctcggccgtgttgccgttgaagcggctaacattttgcgtggcaagaacaagacaattttcaccccccacgttgattgtggcgattttgtcattatcgtaaacgcggacaaggtggtgttgaccggtaacaaggaaaatgccaaaatttatacccgtttctccggttacgttggcggtaagcaggtggacaccccccgtaagattcgtgctcgccgccctgaacttcttctggaactggctgttaaaggcatggttcctcacacccgcctgggccgtcagcaaatgaccaagctgaaggtttatgccggtgccagccatccgcatgaagcccagcagcccactgctattactctctaattgatttttcagacatgagtcagacaaccccatacaacgccaccggccgtcgtaagaccgccattgcacacgcttggcttactgaaggttccggccgcatcacgatcaaccgccgcggttttgaggaatatcttcctaccgttcagttgcagaatgctgttcttcagccctttcaggttaccaataccatgaacaagtttgatgtgaacgtcgttaccaagggcggcggtattcacggacaggtgggagccattcgcatggcgatcgcccgtgctctcgttcaggttgatgaagcttcccgttcccagcttcgtgaattcggtcttctgacccgtgattcccgcatgaaggaacgtaaaaagcccggtcgtcctggagcccgcaagcgttatcagttctccaagcgttaagcttggctggttgcgaaggaactggctttaccatttctttctcggaaaaggagtactccctgtggagtgctccttttttgttgcaggaagaactttgttttttactgcttcacgcgtctttaaaaagctttttctggttaggttgcttacggcagctttcaatgattttcctgcatttgctgtgaagggggggaggtttcccagtgcaggaatggttggttgacgagggttaccgatggtatggtgttcctgccaggatagtgtggcagcggtaaagctgttccagcaggacaacaagcgccagttcatgttgaagggtgaatttgctcaaggacaggatatggttgcaccgggaccgcagttcttccgtatgaccgtctgaggctccgatgagaaacgcgatgcggcgtacggaatgcatttgccagtcctttgccaggtcgactagctttcttgtgattcaaagttctccgcgttcgtccatggcgatgcgcaggcaaccctcgctggcggccagcagacgtttagaaacgtcttgggagcttccgtccctgacaagcttgagttccgttttgccgaagggcctgaggcggttgagatagagttccacgccttccttggcgtagcctagagaaggctttccggcggccagaatcaggaattgcatgagaagtcaggagttggaagatgagttaaggtagttcagcagggtgcgggcccaagtttccgaaatgccgcggatggcggcgatagaagccgggtccgcctttttaatggcagttacggatttgaatttttccagcaacagtcttttttttgaggcgctcatgcctggggcgtcgtccaaggcgctttcccgcatgcgtttgcggtagagcagttcattatagccgttggcgaagcggtgggcttcgtcgcggatgcgctgcatgagtttgagggctcccgtgctgtgaggcaggcaaaggggctgggactggtggggaaaaaatatttcttccctctgcttggccaggcctacgatgggcatgtctcccaggccgatggcttccaaatcagccagagcggaggaaagctgtcctttacctccgtccacgactaccagatctggaactttgatgggggcttttccttccgcgctgagtttcttaagccactggtacagggtcatgtccgcctgccgtgaggctacggcgtcgctctccgccagaatgcgggagtaacgcctccggatgacttccgacatggaggcgaagtcattttgtccgtccacagtacgtatacggtaccgacggtaggctttgttatccggcctgccgttggtaaagcgcaccatggaggctacgatatggttggaagagacattggaaatgtcaaagcattccatgatggttgggggagattctaatcccagggccacccccagttccttcatgtcttcttccggatgaacggtgccgggaagatcgggagttccttttcggaaccgccgggcgggttccagtaccttgaccagattgtcccggatgtcccgcaggtatgccgcacgttcaaagtccagttcatcggcggcttccatcatttccctggtaagttcgtccagagtgctttttctgcccgttccttccagcagacgcaccgcctggtcaaagttccggttgtaatcattgatggaaatgcggccaatgcacggagcggagcagttgcgaatcacatccgcatggcagtgcctgaagtcatggattcccggattttttgtcttgcaggttcgcagccggaaatgccggttgagccattcctgcgtggcgtaaagagcctgggagtggacaaaggggccgaagtagcgcgctccgtcatctttgcgcactcgcgccagctggaaacgaggcagtttttcccccttcggaattttcagcagggggtagcgcttgtcgtccttcatctggatattgtaatgcggacgatattgtttaatcagtttgctttccagcagaaaagcctcctggtcatttctggtttcaaaataatcaaatgacgcaatagcgttaatgagcgctcttgtcttatgattggagagtgtggctcccgtgggagaaaaatagttgcccaggcggcggtgaaggtccttggctttgcccacgtagatggtatttccccgggcgtctttcatgatataaacgcctggtttgtgcggagtttccctccagagttctttcagggttggtttctcgcggtctgccacgcaggcattatgccatatgaggcaagaaatggaactgcggaaacgtactgtattacggctacttggcttgcctaggaaaacttcttctgtataatcccctatgtcttttgtatgaatcctgtaccgtttaccacgctggctgccgccatggattttgtagtgggagatagaaattatcccctttccgaactgttcatgaaaggcggtttcatcatgtggccgctgcttttgttatccatcgccggagtagtggtgctggtcatgtgctgtttttctacccgggcttccgccgtcctgcctaccaaactggtggaacaggcggaatctttcattcgcaaacgggattacacgggactttccatcctctgcaagaatggagattcctgctacgctcgcgtgatgttgactgtagccaacttcatgttgcgcaatccctccgcccagtttgaggaggtaagggagatagcctctgcggaaggaggacggcaggcggggttcctaagccgccagatttcctggctgtcggatattggcgccgtagcccccatgctgggtctgttgggaaccgtggtcgggatgatgaaaaccttttttgagattgccaacggtgatttttccgggggcaagcagcgcatcgacatggcgggcggcgtggcggaagccttgattacgacggcgggcggcctgatgcttggcattcccgccatcctggcctatgtatatttccgcagccgtgtacataaacgggtgggagacctggaggcagccgtcacgcacagtgtttccgtagttgccacccagcttcagaagccacgagccggtgcagctggggcttttcatgaagaggaacttcccaaagtccccgtagatcccacttccctgcgcgatgtgcgcgggctctagccggaacgcatccacttctccacctcaccggaagaatgtatgaaatttcattataaaatgcccagtcccatcgggtttcaattggcccccatgctggacatcgtatttctgctgctggtgtttttcatcgtaacccagacatttgaggatgatgaaccggatctttccatcaatcttccttcagcagagactcccaagcccggtgaaaacgtgtccaatgaaattatcgtgaatatccgtaaagatggtaccgtggtaatcaaccgccagcagtacacaatgccgcagctggaagacaaacttttttccgtcgcccggttggacaaaaccatgctcgtccgtatccgcgtggatgagaaggcggaatccggcgtggtggtgcatgtgatggacgcatgtctgaaggccgggctgaataacgtttctttttccacgcgtcctccggttccatcttcaatcaatgtttccaattcccaggcttcatgaaagcgtttttttccattaatgcaggtttaataactttggcgatgttttccgccgcccaggaaaatattccggatgccgctcccatcgcggatggtccgctggtcgctaatccggagcaggatacgctggatatggcggacatgctgtacaagcaggcccaggctccggctacgaaggagaaccggcaggaatatggacgccttcttgatttaagcttgcgtaaatatctggaatttacccaacgttttccccagtccgcccaggctcctctggcggagtatcgtgctgccatgtgtttggaggagctgggcaggaaagatgaggcacatggcctgttcctcagattgattcagacgggcagccccgccctggttgccgcctccgcctaccgtctggcgacggatgcttcttctgccggggagatagataaggccatccagtattaccagctcgtgattcgcaatgcggaacagaatgatttgaaggtggacgcccagtaccgtctgggacgcctgtttctttccagcggtaatccggaggcagccgccaccatgttttgtgcggtgatgggcaatccggaagcggatgccaagtttgttctggtgtcccggatgggatatgccgccctgtgtgcggatacgggacgcttgggagaagcttattccgaatatcgcaaggtgctggaaacgcccggtgtggataacaggaacaggggaatcgctactcttcaggccgccatgctggccaccaaactgaaaaagactgcggaagcccagggcctttatgaacggcttttgaaggacgagtccctgaaggagatggcgccggaggcccggatggggcttcttctggggctgtacaatatgggcaagtacagggagatactttcccagtatgagcagcagaagggaataaagatgccgacaaaggacggccaggtgcgtctgttgatgctgctggggcagtccgcctataaattgaaggagtaccggaaagcggcggatttctttctggaagcggaaaagtccgttccttatacgcaggaggctatgcaagcctccttttaccggttattgtgttataatgaacttaagcagaaagatctcccccagcgggcccagagcttcctgaaccattatgccaaggcttttcctaccagtgagctgcatgatatggtgcgcctgatggctgcagagaacctgttcagctccaatccggcggatgccgcccggttttatgccagcattgattttgacaaagtgcccccgaagatgcgtgcggatattttatataagagcgcatgggcgattgcccaggccgggaacagaggtgtggccgccaagctgttgactgattttatcaatgattttccgaaagatccccgcatttgcgaggcattgacgttgcgcggggacatgtatgccaagaccaagaaggaagctgaggcgctgatggattttgaccgtgtgattgcccgctggccgaaagctgaatcagctgccgccgcatggcagagagccgctcagatttatgcgggacgccaggatatggcgaacatggcgaagtattatgaaggcctgattcagaattttccgaaggcgtctcctgccgctttggctgaagcccatttcctgctggggcgtgcggcgtttgaccagggagatttcaagtcttctatcagccatatggcggaggccaagactctggatccccagaaatacggagaacaggttaatgtgctttccgttctgtcctatcacaagctccaggacgtgaataaactgaaggaggccctggaaaccctgcaaaaggaaaatccttccgccgtggctcgtgtgccggatgtcatccccgcatggctgggccttcaggcctatgggatgaaggatctggaaacggcggacaagtatatgacctgggctacgcagaacgaccagcttcagaatgtgaagaaggtgatttggcgtaatttggcgaaggtgcgcctggcgctcagaaagtatgaccgcgccttggtggcttccaacaattttctgaaggatgaggaccagccttaccgccgtgcggacggcatgctggacaaggcttccattttgctggggctgggcaagtatgcggatgccaggaagacggcggaagatgcgctggctctgggcgtggaaggtcctctgatggcttccttgaaaattgttctgggggatatttcctatgcggagaaaaagtttgatgaagcggccaagcattacggtgttacggccgagctgtttgtcaatgacgccgaactgaaacccaaggctctcttcaaggcggcggaagctttggacaaggccgggcgcaaatcggaggcttcccaataccgggcccgcctgcaaaaggaattcccggattggaaacaggatggagagtctttgcctccggacgcacgataagcgttttaaagattgaaaccggaaatggagaacaggcgtaaaagatggtatgatctgtttggattgctgcctcgcaatctgggccgtctgttgctgtggttcagcctcattcctatcgctttcatcatcgttcttctcgtttatgcatggagggcggaccagtatgagctggacgaggttttggcgccgttggaaaattgcgccgcatatgatcgcaacggccagtggataggcaccttgacagatcatgaccgggtgtatgtagcgcgcaatgaactgcccgataatctggtgaatgctttcgttgcgcgggaagatgaagactttttcgaacatggcggcattgtgtactcttccattatccgctccatttgccggaatttgactacattgtcctatgcccagggtgcttccacgattacgatgcagctggcgcggaattgttatgagctgggagggaagaccctggatcgcaaggttttggaaatggccgtggcccgccgcattgagggcaagtattccaaggatgaaattctgacggcttacctgaaccgcatttactttggccagcaatgctatgggattgcgcaggcggcggatttgtatttcggcaaaaaagtggcggatctgacactggcggagtgcgctaccctggccgggctggtgcgcggaccttccatctacaatcccgtttacagcccggaggctgctgccaaggtccgcaatgcgacgctggaaaggatgtttgagtgtgaattcattacccaggaacaattatggcaggcgctccgcgaaccgatggcggtggctggtaaacgggaagctcggcccggttcttatcccgttctggtcgtttcccgtgagttgggagacctggattgctgtgacgagcaggagggaacctccagcatttttgtaatgaccacgctggatttggaatttcagaggatggttgaagatgtaagcgagcctatgctggtcgctctggaatcttcttccgtgtgggcagggttgcccaaaagggtggacaaccagttgaatcgttgtgtgcaagcggccatattgtgtgtggattcccgtaaaggggatctgctggccgtaacaggggggcgttccgcccaggacggtctggaccgatggcagtccaaggtaatgcccggcgatctgttcactcccattgtcaatttatgcgctgtcgaccagcgtagaaccgttattcgcagcaatccggaagtcactggccgcggggtaggtttcaatacagtaatagaaacggcacaaaaggccggttacaaaggggaacttccccgttcttcggacttgtataccggcaggttttccgtgcctctttcgcatgccgtcaatgccctgtatctcatcggcaatgacgggctcaatgtgagtatttcctccgtcaggcaggtgggtaccaccaaaaagaacctggtgatggtgaatgccccctctccggaagaaagccgccgggaaatcctgcctagggaatccgcccacctggtggcgtcccttcctcccttccgctacgacgaacggaccaggaaaaccttcgtcaatgtcaggcttcctggaaatacggggcatttttccgccgtcatggggcgttatttcacggtttttgcctgggtgggctttgattctccggaggccgccgtctatgaaaaaaaaggggtttccgcggcgttggcaaaaacctgttcctctctggccggggaggtgtatgaccgtgcggaggaaggccgcagaaaagctgtccgggaacgccgggagcgggaaaatgctgcagaacagggctcccaatgaagttcaattttccattagtagaagcatcatgagacactcacttgaaatgaccacggccatccaggccgccaaatccgccggagctttcctgaagaagcatttttatgagcaaaagaaggtggatgaagccagccagaatgatatcaagctggagctggacaagctttcccagaaactgattacggaggaaattctttccgtgtttcccaaccacgctgttttgggagaagaaggatacaccggggacaggaacagcgagtatgaatggattgtagaccccattgacgggacggtgaattatttttacacgattccctggttctgcgtctccatagctttgcgccgccgcggggaagtggtgctgggcgtgatttacgatcccatgatggatgaatgctggcatgtggaaaagggcgggattccgtacatgaatgatcatcccatgcattgcagccggcgggaacgcatggcggaagccgtggtattcgtggggcacggcaagacggacggttccaaggaaaaggggattgaacgtttcgccaggatcgcctggcaggtacgcaaggtgcgcaataacggttctgcggctctggccctggcttatattgcctgcggcagatttgacgcctatgtggaaagcgtcatatccatctgggatgtcgccgctggggttttgctggtggaagcagccggcggcaaggttgttttggaaccgaaggaagataatccggaacaattcgccattgtcgcgtggaacggccgcatccctatcatggaggcgctgggggagtaacccgaacattattgccgcagtaccgtatgaaaaacatgatcgctttgaccgggatcgggtatgatatccaccgttttgcggaagttccgcgccccttgatgctgggcggtgttcatattccttcctcccgcggcctggacggccattccgacgcggatgttttatgccacgccattgcggatgccctgctgggcgctgccgggttgccggacatcggctactggtttccgccgggcgatccttcctgcaaggacatcccttccctggatattgtggcgaaagccgtttctctgattcgggagcgcggcggccgcatcgtgaatgtggactcgtcccttattgcagaatctccccgtatttccccttatttggagcagatgaagggagctttgggcgccgctctgggaatctctccgatccgtgtgggcatcaaggccactactaatgaacagcttggcgcgctgggccgcagggaaggcattgccgcttttgccgtagcggctattctgatgccggaggatttggccatgccgtaagaagaacgctccggttccgtttctggaagccttttttcaaaaaagaagccgatatggggctttaaacaaggaatatgcttcaggaataacgggcaggtggaaatggcgttttttgggggaggccctttcccaggcagttttaatgaaatggcaggaaattgttaaccgttccctggcggcaaagccgtttttggctgcataataatattacccgtttccctgcacagggaagaggtgttgcctgatatctcagctgatgcaacggtaataataatccacgcgggagatgaaccaagaccatttgaagccgggtttgccattgtccagcagaaggtgggggcaacgcttgccgatccagtagtaatggggcacgacattccgcaggggaatatcgtgggcatacatgttgtaggccgccagcttggcagcgcggtcaaaggttttgacgatgctctgtcctcgcttctcacacatttcaatgccgatggagtacatgtctccggggccgccccggtctgcatggcgtcccgtttcattcagggggatatgctgcatggtcacgtatgggtctaccgtataatgccagttgcagcgcaaagctccgttattcagggcgcgcgcatgctgcatggcgtctgcggacgggttttccgtgttgtgcatggtgatgaagcgcggcttcattcgggaagaacggcggcggagcggagaagatttaggcatgaacatcggccggacgttacattctgccagcaattggcgcggagaacgtttcaccacggggaccccggagggcttaaaggagatcatgggagccattcctgcttttccggaaggtttcgaacaactggtcagggcaagcagggctgcggtttccagcagaaaagttctgcggtccatgccctggactttctccagcatgggctggagctgaccggaaaagcgggcaagataagtggcgatggtggaaatattgctcatacggaggccgggagatggggaattttcagcacggatgcgggaaaagttaagttcacgctaagattcgctcttcttctttgcaacgaaaaagtgtgaaagcttcagcattgtgccgaattcttcgctctttttgtcatattggtttgcttaaaccgttgttgagagcagaacagtctctgcttctgcggcggtgacggcatccgcgcctgccggggacagaatgaattctcccttccgggccgttttcccgtcccagagcacggaaccgcagagaaccgtgaagacggcaaagcgggaggagtccggctgggtaaaccgttctcccttatccaggcggtattcctttgtggtgaaatacggcatttccgtcaggtatccggggcgctggctgagttcccggaattccctgatggaatccaatgcctgttccaggtgcagttcccgtcctcgtccggagtcatccgtgcggttccagtcataaaggcggtaggtggtatcgctattctgctggatttccgcaatgaggtgcccggcgccaatggcatgaaccagccccgccggaatataaaggtgttcccccggttccagatgggtggagcgtatcagctgctccatctgtcctgtttccgccgcatgacggatgtccgggagtgtggcgttttcctccattcccccgtaaatcagggcgtccggggatgcgtgcagcacataccagatttcattttttacttctccctgccgggctgccgccgtgcgttccgggggatgcacctgaacggaaagattttcgcgggcatccagaattttgcagagcaggggaaagcgggggaaacgctcgtagccgggaccgaaaatttcctgccgatgttcttcccacaactggtgcaggggcattccttcccattcgccgtccttgacgatactcatggcttcaggacggtcgctgatttcccacgcttctccataagctgtttcccggtcgggcagttcccgtcccagcatggttctcatgctctggccgccccagatgcgcggctggtagatggaatggaatcgaaaaggctgcatggttgtagcggaagcgtaggatatcttttatggacgggcaagcaaaatgcccacagggtttcctgtgggcatggagagagaggaagacggagaattgcctgttatttgatggattcccagacaatgccgatttcgtcaaatggcacgtgttccttgttcttgtccggtttcggaacgccgtagttgatccggaacaggggcaggatgggagctcccgttttaggatccttgctcatgggggccattccaacttcttcaagcagaagagtcatgccgaattccccgccgggaatttcgctgatcagaatctcaatgggataaacattaccttgcttcactttgaaggatttgccggcaaccacgcctcccatgatccggttccagtggccggaagaggagtatttgtagaatgtaacaggagggacattgattccggctgttttgagctcttttttcaggtcgtcgtaaccgggcttgttttccatggctgcaatccatttggtagatgctgtctgttttcctaaggcagcctggaaccacccgtagtcaaatacgttttcattgttgaatcgtacggcaataacgtcgtcgcccgctcccacaaagcggaatgttccggatttcggagcgcgcactttgccacgatagatagcaatccatcggcttggcttgactttgtccgcacatccgtaagctttcggagcttcattggcggatgtgcggggcacgtaaaattgggcggcgtacagctgctggggagatttatagaaacggtttaaatctttttcatcccaaccgtgggtgacaaagcgggagaggatggagcagaactggtcttgggacaggttggtaggacgtccgccaggagtctgcttggtgtcgtaaaaggtacctaccagcgtgcttccggagggttgggacgtaccgaaagcagaggtggagtctcccaggtcggggccgaagccgtcccccatgccgagggcggttccctcctccagcatgacaggttcatcgggcgggtcaatgtcgatcttggggaggctcaccggagcggcggccgctgccaccacgaccttgacgggcgtctccgcatgggaggaagaggaagtttccctctgtacttccggcggcggaggcgtatccgacggcggcgcatcgtccggcgtgatgtagccgacgactttgggttcttccggaggggcgatgatgatggtcagggagtagagaatggctcctgccaaaacgacggagagaatggatgtcgctaatgcggcaatataatttttccgcctttccttgcgcagggtttccactgcgtcttccgtgggttctatatgaaggctcatgcatgtatgatagcacaagaatcccatatgttgagtaacatgaagataacagggataacatgtcggtaacaaaaaaggcggccttgccgtcctttctccgtatgggcttttcagcgtttcctccgtctttccgtccctcccggtgccagcgcaatggcaagggtggagcagatgcccagaatcaggggataatacaggtatttcatgatcagcaggggaaaaacctgggagattccggcggccatgagcatttgagccccgtaggggatgactcctctgaccaggcaggaaaaggtgtccagaatgctggcgctgcgtttgggtgggatttggaatttgtcgcttatttccttggcgatggggccagccgtgatgatggcgatcgtattgttggccgtgcagaggttggccagggaaaccagcccggcaatgctgaattccgcgccgcgcctgctgtggatatgggccgtaatttttccgataatatacgcgatacctccgttgaaacggatgatggacagcacgccgccggccagcagagtgacgatgatcagttctcccatgccggtcatgccgctgcccatggcttggaaccaggccatgaaggagaaataccccatgccgatgccaatcagtcccgttgcaaggagccccatggtcagaacggccatgacgtggattccggccagggccgtcaccagtacgagcagataggggaataccttcatccattcaatggagatatccgctgtggagggggactgcacgttccatccgagcaggatgtagcaggccaaggccagcagggcggcggggagcgccacctttatgttggctcggaatttgtcccgcatggcgcagccctgcgtacgggtggcggcgatcgtggtgtctgaaatgaaggaaagattgtctccgaagaatgctccccccaccacaatggccgtcatcatgccggcactgacctgcgtggcttgtgccagccctgtggctacgggagccagagcgacaatggtgcctacggatgttcctacggagagggagatgaaacaggaggcgatgaacacgctggcaaacagcagattgtccggaagaagccgcagcgtaagctgcacggtggcgtcaatggctcccatatccctagcagactgggcgaaggctcctgccagcacgaaaatccagaccatcatcaggatgttccggttggctactccggaggaaaacagatccacccgttccgccatgctttttccgcgggtgatgaaaacggcccagacagctgccgccataaaggctaccgtgaccggcacggcgtaaaaatcctgtacggctatggagatgaccaggtaaagcaggaagaaaaccagcagggggctcagtgcccacaggctggctttggcggggggcgtatcctggttgtccggggggctggtcattggagtgaggggagctggccgaaaagtcagttgccgtcggcttccatccggctcagataccaccggtaaatgcgttccactccctcttccagctccacccggtgtttccagcccagggagtgcagcttggagacgtccgtcagcttgcgcatggtgccgtccggcttgtctgcgttgaacgccagatttccccggtaccctgccgtagcggcaatcaggcgggccagtccgccgatggagatttctttcccggttccgatattgatgtggcagttccgcacttcccttcctccttcttgcagctggctgaaatccacttgctccatcacatggacgcaggcgtccgccatgtcttcgctccacaggaattcgcgcaggggagttcccgtaccccacagttccacggaaccgggggtaatgccgtatttggccagcacggccaggatttccttttcttcagccgtgccgtccacctgttccactgggcgcgcgttcagatctttccgcacggcgttccagtctccttccatcaggcacttggccaggtgtatcttgcgtaccatggcgggcagcacgtggctgttttccaggtggaaattgtcattggggccgtacagatttgtaggcatgacggcgatgtagttggtgccgtattgcaggttgaagctttcgcacattttcagccctgctattttggcaatggcatagggttcgttggtgtattccagcggggaggtgagcagggcggtttccttcatgggctggggggcttcgcgcgggtagatgcaggtgctccccaggaagaggagcttggatacgccatgccggaagctttccccgatgacgttctgctgaatctgaaggttgcggaagatgaagtccgcccggtagcgggagttggcgatgatgccgcccacaaacgccgctgccagaaagacgtattccggcttttcccggtcaaaaaattcccggacggccgcagggtcttccagatccagttctttgtgcgtccggccaatcaggtaggaatagcctttgttttccagggatttccagatggcggaaccgacgaggccgcggtgtccggccacaaagattctgctgttttttttcatctcagaaatgaacgggagtttttacgtatttcatgtcgtggcgcaccatgatgcgcacgagttcctcaaacggagtggaggtagggttccagccaagaagggttttggccttggttgggtctcccaacagttgttcaacttcggcagggcggaaatatttgggattcacttccaccagaatattgcccgtcttcctgtcgcgtccgcgttcttccacgccttctccctcccattccagctctattccggcctcacggaaggccagcgtgcagaattccctgaccgtgtgcatttcccctgtggcgatgacgaaatcctccggtgtgtcatgctggagaatcagccacatgcattccacgtaatccttggcgtaaccccagtcgcgcagggcgttcaggttgcccaggtaaagcttgtcctgcatgccctgggcaatgcgtgccgccgccagcgtgattttgcgggtaacgaaattttctccgcggcgttcgctttcgtggttgaacaggatgccgttaacggcaaacatattgtaagattcccggtaattcttggtaatccagaatccgtattgcttggctacgccgtagggtgaacgggggtaaaacggcgtggtttccttctgggggacttcctgcaccagcccgaaaagctcggacgtggaagcctggtagatgcggcatttcttttccatgcccagaatgcggacggcttccagcatgcggagggttcccacggcatccgtttccgccgtgtattccggtacgtcaaagctgactttcacatggctctgggctgccagattgtagatttcatccggctgcacggtctggatgatgcggatgagagaactggaatccgtcatgtccccgtagtggaggttaatcaggcggtttttcttcatgtcccgcacccattcgtccaggtaaaggtgttcgatgcggcccgtgttgaaggaggaggactggcgcaggatgccgtgtacttcataccctttgtcaatcaggaactctgcgagaaaggaaccgtcctgtcccgtaatgccggagattaatgcgattttgctcatatggtgtgtcaggttatttgctggcgggagaggttgatgaaataaaagaaacctctcccggagccgcaattcatgggctccgggcataaataacgcatttttcccagcgaggcgaggaaaatgctctggtctataggaaggggggcggagccgtcagcgggcatgttgccgcttgctggccgcaatcattttcctgaaatcccggaacagatactgggggtccctggggccgggtgccgcttccgggtggtattgcacgctgaatacgggaagcgtcctgtgggcgatgccttccacggtattgtcattcagattgatcagcgttatttccacgttgtccggcacggtgtccggatccacggcaaaaccgtggttctgggacgtaatgctgattttacccgttttcaaatctttgaccggatggttcgctccacggtgcccgaacttcagcttgaaggttttcgctcccagcgcgtgggaaataatctggtggcccaggcagatgccgaacatgggcactttcccaatcaatgcagctacttcccggtgaatgtccgtcagcgtggcgggatctcccggaccattggaaagaaagacgccgtccgggttcatggcaagcacttcctccgccgtcgtgtgggcgggaactacggttacgcggaagccgttttccctcaactggcgcaggatgttgtatttaatgccgaagtcaaaggcgacgatgtcgtattccgcagggggcagagtttttcccgtaaccagcgcgtccacttcctccggtgtcatggggtgggaaccgattttgtccacgatattgcagccttccatggagggggcgtttctggctgcttccacggcttcctccggcgtcagctccgtggtgaggcaggcgcgcatggctccggcggagcgcagatgcttggcgattttgcgggtatccaccccttcaatgccgatgacgccctgtttttccagccacgggcccagggattccgtggcacgccagttggagtggactttcgccagttccgccaccacaaaaccgctgacctgcgctttgcctgattccccgtcttccgggttgacgccgtaattgccgatcagaggataagtcatggtgacgatctggccgctgtaggacggatccgtcaatacttcctgatagccggtcatggacgtgttgaagcaggcttcccccacttccgtgcccgtggccccgaagtgcgaaccgatgaagacgcttccgtcttccagtgcgagaatggctctcatggtgatgtaagtatgcttaggtggtgcgggattaaaggttttgggcgtggtactcctgaatagtgcacacctgaagatttttgttcttcagcgcctcaatggcattcacgcaggcctgtgcggaagccaggttggtgcaataggaggttttggcggcaatggcggaggaacggatgatgatgtcgtccgcccgtgcgtcgtgggagccgggggtgttgatgatgaaatcaatatccccgtttttaatatgatgcacgatgttggggcggcgcgcctcgttgactttgtaggcgcgttcgcattcaatgtcgtgctggagcaggtgaatcatcgtgccgcgcgtggcgcacagcgtgaatcccatgtccgccagttgccgggccatgtgaagcacccgttccttgtcccggtcattcacggagatgaagactttgccttccgtcggcaggggattgaatgcactgacctgggattttgcgaaagcgatatccggatccggatcaatgcccatcacctctccggtggatttcatttccggccccagcaccacgtcgatgcccgggaagcggccccatgggaaaacggcttccttcacgcaatagtattccggagtgatttcccgggtaaagcccagttccgccagcgttttgccggccatgacctgtgcggccagcttggcgaggggcttgccgatggatttggagacgaacggaacggtgcgggaggcgcgcggattcacctcaatgacgtaaagctgttcatcttttacggcaaactggatgttcatcagcccgcagacgttcagtttgcttgccagctccttggaagcccgcgtgatttccttgtgcattttcatggaaattcccatggcgggaatcatgctggcggaatcccctgaatggatgcctgccggttccacatgctgcatgatggctccgatgacggcgcgctccctgtccgcgatgacatccacgtcaatctctacggcattttccaggaagcggtcaatcagaacggggcgttcctcggaagcttccacggcttcattcatgtaccggcgcagttctttttcctcatatacgatgatcatgccgcgtccgcccagcacgaaggaggggcgcagcagcaccgggtaaccgatgcgcgcggcaatggcggcggcgtcctccacattggtggctgttcctgcctccgcctgtttcagccccagctccttcaacagggcggaaaaatgttcgcggtcttccgccaggtcaatggccctggggctggtgccgataataggcacgccgtgggcttccagcgcattggccaggttcagcggcgtctgtcctccgaactggacgatgacgccgtccggcttctcctgctcgcagatatggagcacgtcttccagcgtcaggggttcaaagaaaagcttgtcggaggaatcatagtccgtggagacggtttccgggttggagttcacgatgatggtttcatagcccatttcccgcagagccatggaggcgtgcacgcagcagtagtcgaactcaatcccctggccaatgcggtttgggccgccgcccaggatgaggatttttttcctgcctgtttcgcgggcttcattttcatctccataggtggaataaaagtagggggtgtaggcttcgaattccgcggcgcaggtatccaccagccggtatccgggcacaatgccctgttcctggcgttccttccggatgttttcttccgtggttccccgggccagggcgatctgcctatcggaaaagcccagcttcttggcttcccgcagatccagcttgtccaggctatctcccgccttggccaggccctgcatttgtgccaggaaccagggatcaatctgggtaagctgctgcacttcatccagggaaaatccgttgctgaacgccgtttgaatccagaaaatgcgttctgccgtgggaacagccagtttccgcgtgatttcttctgcggaaggcgcctgcggggccttcgcgtcaaatccccagccccagcgtcccgtttccagggaacgcaaggccttttgcagggattccttgaaagtacgaccgatggccatggcctcccctacggatttcatggacgtggtcaggtgttcgtccgcctgcttgaacttttcaaacgtgaagcggggaaccttggtaaccacatagtcgatggtgggctcaaagcaggcgggcgtttccctcgtgatgtcattccgcaattcgtccagcgtatagcctacggccagtttggcggccagtttggcaatggggaaccctgtggccttggaagccagcgcggaagagcgggaaacgcgggggttcatttcaatgacaatcatgcggccgttggccggattaatggcgaactggatgttggaaccgcccgtttccaccccgatctcccggatgacggcaaaagaagcgtccctcatggcctggtattctcgatccgtgagtgtctggatgggggctacggtgatggaatccccggtatgcacgcccatggggtcgatgttctcaatggagcaaatgacgacgcaattgtccgcgcggtccctcattacttccatttcaaactctttccagccgatcagggactcttcaatcaggatttcggaaacgggggaaagatccagcccccgggcgcatatctcttcaaattccgttttgttgtacgctactccgcctcccatgccgcccagcgtaaaggcggggcggacaatcaggggaaaggtgccaatatccccggccacccggcgcgcttcctccatggtatgcgcaatgccggaacgcggcacgtccaggccaatgcggagcatggcttccttgaacaggttgcggtcctcccctcggtcaatggcgtctgcgttggcaccgatcatacgcaccttttccctttccagcacgccgctgcggtgcagttccatggcgcagttcagggctgtctgcccgcccagggtcgggaggagggcatccggtttttcccggatgatgattttctccacgaacttcggagtaatcggttcaatataagtgcgcggagctgtctccgggtccgtcatgatggtggcgggattggagttgaccagcactacttcataaccctcttcccggagggctttgcaggcctgggtgccggagtagtcgaattcgcagccctggccgatgacgatcgggccggacccgatcacgagaatctttttgatggaggtgtctttaggcataatggcgatggaagaatcctgtagtcctggaccgcggatttccgccgggggaattaagtgcccgccgggctccggaggaaagtttttttacggtcaatgacgcggatttttagagcgtggggaacggtggaaaacggagtaggaaggaggccggaacaaggcgcgccaaggctccggagccgtgccttccctgcgggcagaggcttgacccgcgaggggggcggcacaactccggagctcgtcggtgcacccactaatagatgaacagcatttcccggtacttggggagaggccaggaccggtcgttcaccagggtttctgcggcatcgacgctggttctcaatcgggacatcgcggcaaggatgtcctcatggcagctcgtaagcgccgtctccagggtatccaggtcggatacgatggaatccagggcgtcgcccagcttgtccgccagcttctgcagggcggaggtaccgttggtccgcctggcttccagcgccctggagagcgcggcgacggtttgcccgtattcgttgcgcagggcgggtaggatgatggtggccgccatttcccaggacaggcgcccttcaatgcggatgcgtctgtggtattcttccaggaaaatctcaaacctggattccagctcccgcctggaaaagacgccgtacttttcaaacagggccacattcttttcattcaccagggtgtgaagggccgtcatcgtatttttcaggttggggaggccgcggcgttccgcttctttcacccattcttccgaataattgtccccgttgaagatgattctcttgtgttcggaaatcctgcgcttgagcgtttcctggagctgcggcaggaatgtttccggagcgaaggaggaaagttcttccgccagggaatcaagggattccgccacaatggtgttcagggtcatcatggggcccgcgcaggattgggcggagccaggagcacggaattcaaacttgttgccggtgaaggcaaacgggctggtgcggttgcggtccgtcgcatcccggggaagaacgggaagcgtgtctacgccgatcttgagcgtatcgttgcgcttgccgcagccggaagagccgttgatcatattctcaatcacttcattgagctgggcacccaggaagatggagataatggcggggggcgcttcgtttgctcccaggcggtggtcgttcccggcgctggccacggaattgcgcagcaggtcgctgtgcttgtcaacggcctcgatgatggcggtcaggacggtcaggaaaatggcgttctgctgcgggtccgaaccggggtccagcaggtttttgttcccgtaggaaatggaccagttgttatgcttgccggaaccgttgacgcctgcgaagggcttttcatgaagcaggcataccaggccgtgcttgctggcctgctggcgcagaacttccatcaccagcatgttgtggtcgatcgccaggttcacgtcctcaaacaaaggagccagttcaaactgcgcgggtgccacttcgttgtggcgggtcttggccgggattcccagtctccagagttcctgttccacgtcgctcatgaaattaaggatacggggcttgatggagccgaaataatggtcttccagctgctggtgcttggcgggaggggcgccgaaaagggtgcgccccgtctggaccaagtccgggcggttcaggtagaagttcttgtcaatgaggaagtattcctgttcaggccccagcgtaatggtcacgtgttcatccggaaggccgaaactcttcatcagcttcttgacggcattgcccaatgcctggcgggagcgcagcagcggagtcttcttatccagagcgtctcccgtataagaacagtaggcggtagggatgcagagcgtggctccgttcccgtgcctcttgataaaggcggggctggtggggtcccatgcggtgtagccgcgggcctcaaaggtgcagcgcaaaccgccggaggggaagctggaggcgtccggttcgctcacaatcaggtttttgccggaaaaactcatgatgggttccattcccttgggatccaggaaggaatcgtgcttctccgccgtggagcccgtcatgggctggaaccagtgcgtatagtgagtggctccccgttccagagcccactgcttcatggcgtgggctacatccgcggcaatatccgcgttcagcggaagcccgtcctggatagtggccaggagggtttttgccgtgtctttgggcaggtacttcttcatcacttccgtgctgaagacatccgctccgtaataatcaatgctgaccggagcgctctcgcttgttccgcccacgggcagggaagcgatggcgctgatggcttgtgttcgtgttgagtcactcatcatggttaactgttgtgccttttctccagcaagaagcgtgccaacttttcagataaactttcgcatgaatgtgctgttcattttaatatattgattattagttagatatggatatcctgacggaagggctgcaaaaaaaggaaaacagagctgcgaacgagaatggattacaaaaatgtaaaaccgcaacaaaaggatgattacaaaaatgtaaaaaattcttcttggaagaaaaatattttttattccgctgccaaatgacctgttgtgccggaagccgcgtcaggctctgtaaaacagggacaaagcagtttgaaagcgggaagatatgaagtgtggacaatattggcacggtttttgctgcaaataaatcagcttaacccaaacaaaacagcaaactgatgaatagcgatcaatttgagacaggcattcctgcgccgcagggattgtatgactttgaacaggagagggacgcctgcggcgtgggcctggtggctgacctgaagaatgaaccgagccacaaaatcattgaaatggggattactgtcctcaagaggctcatgcaccgcggagccgtgggtagcgatccggataccggggacggcgcaggcattctgctggcccttccggatgaattcttccgcctggttcttcccaacaagcttcccgccagaggcaaatacggagtagccatgatgtttggcggatgcggccatgaagaggaattggaagccgccgttacggaaaacggcggcagcgtgattgcgtggaggcaggttcccgtggaccgggacagcatcggcaaaaatgcccagcgcacgtgccccctgatccgtcagctgttcattgacggcagcggttttgcggaccaggcggaatttgaacgcaaactgttcgtgatgcgccgggaaatggaacggcgcgtggaaggctgttatgtgtgcagctgttccagccgaagcattgtgtacaaggggctgtttctcggcacgcagattgaaggattttatggagacctggccagcgagcatttcaaatctcccctggccctcgtccaccagcgctacagcacgaatactttcccaacctggagcctggcccatcccttcaggtatctggcccacaacggggaaatcaacaccctgcgcgggaacctgaaccacctgagcgtgcgtgagccgcatttgtcctccaccctgttgggggatgacctgcaaaagctgctgcctcttattccccccggccagagcgattccgcctgcctggacaacatggttgagctgctggccgccgccgggcgggacttgcgccatgtcatgctcatgctcatgccgcaggcctggggcgtcaactaccatttagggccggatgtacgcggcttctttgaataccactccgccatgatggagccctgggacggcccgaccgccgtcgttttttccgatggtatcaatgcgggcgccatgctggaccgcaacggcctgcgccctgcgcgctatacgctgactacggatgatattttcattctggcttcggaaacgggcgtagctgatattcccgcggaaaaagtagcccgcaaaggccgcctccgtcccggggaaatgatttactgcgacctggtgaaccaccggctggtatccgatgctgaaaccaagaatgaaatggccaggcgcatgccctaccgccgctgggtggagaaaaacaaaatttccgtccgttccctgtttgattccatttccgcctctgcggaaatgccggacctcgtgggccgccagcgccagttcggattcactcaggaggatgtggagctgattatccgccccatgatgctgaaaggcgcggagcctctcggctccatgggaaatgacgcgccgctggccgtcctctctggaaaggcgcctctcctgttcaattatttcaagcagctgttcgcccaggtgaccaatccgcccatcgaccccatccgggaggaactggtcatgagcctgactacatacataggcaaccatcccaacattctggaagaaacgccggagcacgcccggctgatcaagatggcgcgccccgtcattacggatgaagaactcaaccgcctctgcaatattcgggaggccggcttcccttccgccaggctttccatccagttcccggaaggcggggacgggaaagccctgcgggagacgctggaaagcctggcggaatccgccgtgggcctggtcaggtccggcgtgcgcattctggtgctgacggaccgcaacatagggcacggctaccttcccgttcccagccttttggcctgttccgtggtgaaccgcgcgctggcggccgccgggctgcgttccgacgtagggctgattctggaaaccggggaggcgagggaaaccatgcactttgcgctgcttctgggcttcggggcgacggcggtcaatccgtacctggctctggcgacggttacttccctggccgcaccgcaggactgccctctggatgtagtgaaagcctccggaaactacatcaatgccatagacaagggactgcttaaaatcatgtccaagatgggcatttccacgttgcgcagctaccgctcctcccaactgttcgaggcggtgggtctgaaccgggaactgattgacgaattctttcccggcaccgtcagccgcgtaggaggcataggtttggatgaaatagccgcggaatgcaaccagcgcgccgcgcaaaacgcggaacacggggacaagctggatgcgggagggcagtacaagtataagaaaggaggggagaaccatctctggaatccgcagacacttcaggctttccgcgctgccgtgcgtgacaatgacgaacggaaataccgggaattcgcggattacagcaaccgtcaggcgcagcatctctgcactttgcgcggcctgtttgaatttgctccggcggatgctatccccctggaagaagtggaaagcgtggattccatcttgcgccgtttcgtttccggagccatgtctttgggttccctcagcccggaagcccatgaaaccatcgccattgcgatgaataaaatcggagccaaaagcaattccggggaagggggggaagatgaagcccgctatgaacccaacgcccggggcgaagtccgctacagcgccatcaagcaggtggcgagcgggcgttttggcgtgaccattaattatctgcgccatgcttccgagctccagattaagatggcccagggagccaagcccggggagggggggcagctcccggcgcacaaggtggatccatacatcgcccggctgcgccattccatgccgaacgtcagcctcatctctcctcctccgcatcatgacatttactccattgaagacctggcccagttaatttacgatctgcgcaactccaatccggatgcccgtgtttccgtcaagcttgtttccgaggtgggcatcggcgcggttgccgcgggggtggtgaaggcccatgcggatgtggttgtggtcagcggccacgacggcggcacgggcgcctctccgctcaccagcgtgaagcacgccgggctgccgtgggagctggggctggcggaaacgcagcagacgctggtgctcaacaaactccgttcccgcgtccggctccaggtggacggccagttgcgcaccgggagggacgtcgtgatggccgccctgctgggggcggaggaattcggtttcggaaccgccatcctggtctccatcggctgcgccatgctccgcaggtgccatgaaaatacgtgcccggtaggcgtcgccacgcaggatccggccctgagggccaaattcagcggcaagccggaatacgtcatcaattacctccgcttcgtggcccaggaaacgcgggaaatcctggcttccctggggcttcgttccctggatgaagccgtaggcagggcggatctgctttccgtaaaccgcgccatagatttttacaaggcccggcatttggtcttttcctccatcctgcatgcggcagagggggacggacgcaggtttgacccctcttttgaaaaggaaccgctggacaactacgaccgccgccatctgctgccggcattaaagcccctgctggaaaagggggaaaagacggaactctgccgcgacgtccgcaatgtggaccggacggtagggacggaactttccggtgagctggtgatgaaattcgggccgcgcggcctggcggaagatacgcttacggtgcacttcaccggatgtgcggggcaaagcttcggggcttttctggctcccggcgttacctttgaacttgtcggggaggcgaatgactttgttgggaagggcctgtccggcggcaaaatcatcgtgcgtcccccggatcatatctcctacgtaccgtcggacaacgtcatcgccggaaacgtcatcggctatggggccacttccggcagcatcttccttcacgggcaggccggggaacgtttcgccatccgcaacagcggcgccaaaatggtggtggaaggcattggcgaccacggatgtgaatacatgaccgggggccgtgtggcggttctcggcaaggtgggcgtcaatttcgccgcggggatgaccggcggcctggcctacgtgtatgatgcggacaacaacttcgatcagaaatgcaacctgggcagcgtggacctggaaacggtcatgccgcattccgccgatgaagcggaattgcttcagcttatttacgagcattatatggctaccaggagccgcagggcttacgacctgttaaacaactggccggaagaacgcggcaaattcatcaaggtattcccggtggaataccggcatgccctggccatgcattcctgaaagaagcatgcagcagttttctgttgtttggggtaaggcaggggcctccgcgggtgcggaggcccccattttttcagaggcctgcctgctgtttcatggccgggcattttggcgccgctttttctccttgagccattccgcatttgaagctggcaatttgcctgtccggcggcatttcggaggctgttccgttcgtttgccgggtaacggccgttccggctgccgggaatttggagaagaatgttccagcaatgcccggttctgagcggattatgaattcgaagtcaacaggaaagtttgaatggaaatgtgttagtggagttttggttttggaaattcggccggatggcaattgataaaaaagtgaattgaaaggtaactgattggtattcttgttatttagttatttagggaattgccgcgaattcataatccgttaggtttgctccagtgggtgtttggcattttctgtcaagctgctccaattaactacgcaatgaatatatgacgaggaaaacaggccctctccaggtggagagggcctgttttttgaggaaattctgtaagggagttcctttcccttttttgaggcttgcgccggcagaatattttttcctgcgcctttccatgaaaaagtgcggccgcgggggcggacgcacttgcggagacggaaggcagagcagggattcctactttttaggcgttatattgcgcatgttgcggcctttagctttgcgctgctgttcttccagggccgcacgctgctgctccatcattttttggaaaaagcccgactttttctttttggcgggggaaagcacgggcatgggcaagcggcggataagggccgtttgtcctatggagatcaaattctgcgtggtccagtacagggccagggcggaagcgaaattgtaacagaacaggaagaacatcacaggcatcaggttcataataatgcgctgggagcgttcccccgcctgaggcgtcatcctcatctggataatcatggttacggccatgatgagaggcagaatattgattggaacgccgaacaggtggcccacggtatcaggcagggaaaggtccgtcatccacaggcagaagggctgccccctcagttctgcggaatactggagcacacggtaaaaggcaaagaaaatgggaatctggataagcatggggacgcagccgctggccgggttgatgccgtatttctggtacagcttcatcatttccatgttcaccttctgagggtcgtccggatatttctccttgagtttgaccatctccggctgaaccagggacatgcgtttcatggccatataggattttttgtgcagcggccagatgagagcacggacaacgatggtcatgcagataatggctacgccccagttgccgaaccatccgtggaagaggttgagcagccagttcatcggaacgctcaggaatacgagccagccgtatgccatgatatcgctgatggcgggataggaaagattcaggtcacgcaggtaggcgttgaatttggggccggtgtaaatatcgtaggtgagcgtcttgatttcattgggggccatggtcagattggggattcccatggccacggtgacgccgggcaccagggtgttgtcttcatgcgtcaaaggaaattcctggcgggtggcgtacacggtgcatcccctggactggtcctggggaagaaggatggtggcgtaatactggctcatgacgccggcataagtcaggtcctggagagggccttccaggacgcgggccttggcgctgctgaaaaagccgcctgtgaaataggaaggcacttcctgttccagggagccgtctgcatggtaaaagaaatgggtgtaggtatcttttggttcgcttttggcgataggataggcgctcccgccgaagatgcccatgtagcgcagatcctggacattgggagatttattgagcagggagacggtcaggcgaatgagatatttgctgccgggcaatacttccccttccagatttttgacggggtgcagggtgtacgtttttgagatgaaaagctgccgtgcggggtcatagccttccagggttacggagtccgccgtgcgtttcacttccttatacacggtgttgtcataggaaggatcctgggtggcatccatgttgaaaacgagttctccgatgccccgttgctgggcttcgttaatcgtgatattatggtccgcgactttttgggagtccacgatatcgttgtgcagggtaaccgtgccgatggaaccccctatgcggttgaacgtgtaagtgatgaagggttcctgcctcccgttcacttcctgcgtggctaccagagtgatcggggcggttttgtcttcttcaagggctttgttgacggaggtctgttccggggcggaggttccggctccggggcggacgccggcaaccggggcattggctgcggcggcagccgcctgcggtgcgggaatgggggcggtttcagcctttttattgttgcccatgtaaatattcaggcccagaagggcggcgcagatgcctatgatgatccatgctgtgcgatccataatgtgatatagcttgattggagttggtgaaaggaaaggggaagaaaggtaattgttcagcgtgggtggcgcgccgggggcacgggatcataacctgatccgccccacgggttgcatcttaaaatacgccatgtgccaagaagaaagccgcgccaggctccgtggatgtgaacggcctggatgaagtactgggaacaagtgggtgtatagcggcagccgctcccgggcccccccagggcatgcaggggagcgctgatgaaggtttggtaccccttcacaagggtgatgagcagccatttcatcatgtcttgtcttgttcccgggaaagaagttgcaatttaagttttcgggcggctttccgccagtcccgttccaggtcggcgtagctggcttccacggccctccagcggaggacgcacaccaggtgtacgccgttttcaaaaggagccccgtgcgccctcagtatttccctcacgcgtctccgcagtttgttgcggacaacggcacagccgatttttttcgtacagatgataccgaatttggagggttcctccggatgttccaaaggggctgcgcttaaaacaataagccgacctgctacggatggcccctcgttgcgtacccgggcaaattggaatgccctggtcatgctttgttgacgagtaagacgcatctcccgcgggtcggcccgtgaaaagaagttccaaggaggcgttaaccggatcctggcggctggattaacggccgtgctggatggtgtggcgcttgtactggatttcggctcccttgggaagcaggcgcttgcggcctttagcgcggcggcggcggatgatgtccgctccgttcttggtggccatgcgtgcacggaatccgaactgacgcttgcggcaacgcttggatggttgataagtcctcttgctcatgatgttgaaagatgcttcttgtgaattactagattcagtgccgtccgtctaagcggcctatgcacaaccggacggaaaggataactattttgattgttttgtcaatccgtcaggcgattaatttgccgtttttcttgcggaaagcactgggataagtagtttttatgattgatagacagtgtttttctatttcagaaaagcccgcctgctttacagaaagagcagttccgcgtatgtggggacgggccacaggtctgcgtccgtcaggctttccagcatatcaatggtgcttctcaaattgtccatgcccgtctggatggccctggtatcggcttcatccacggcgcggcgcagttcccgcacctgtccggggagaatatccagaagcgtgccgatttggttggcgcgatccgtagtagctttcattcccgccttgattccggatgccttcatctgggcaatggcggtggtaagctgcgtgagctgttccgttacggcggggatgtaaagggtttccaccatcaggagggccgtttccgcttcaatgttgatttccttgtggaatatttccgtctggatttcatggcgggcgtggagttctacggggctgaccactttgtacttttcaaaaagcgccttggccttgggcgtttccagagcggccagggcttcaatggtgccggggatgttggggagattacggcgttccgcttcctctacccaggcttctccgtagccgtctccgctgaatagaatgcgcttatgcttcttgatgatgttttgaaggagcttgttgagggtggcgtggaactcctcgggcttgtccttgacaggttccagaatggtgcagatttcatctaggctttccgccacaatggtattgagcaccgtcatgggccatgcacaggtttgggaggaacctacggcgcggaattcgaatttattgcctgtgaaggcaaaggggctggtgcggttccggtcggaggcgtccagagggaacatgggcagggtgtccacgccgatgttgatggtcttttgggtgcgcgcttttttagtgcctcctttctcgatttgctcaatgatttcatccagcagatctcccaggaagatggaaatgatggccgggggggcttcatgggcacccaggcggtgttcattgccggatttggcgacagaggcgcgcagcagatccgcatgttcgtccacggccttgatggtggcgcagagcagagtgaggaagatggcgttttcctgcgggctggaaccgggattgagcaggctgccgtaaccgggggcggagagggaccagttgttgtgcttgccggagccgttcatgccggagaagggcttttcatgtagcaggcagaccatgtcatgcttgttggcggttttccggagcacctccatgaccagcatattatgatccacggccaggttctggctttcaaaaatgggcgcgatctcaaactggccgggagcgacttcattgtggcgcgttttggccgggatgccgagtttccagagggcttcgtccacgtccaccatgaattccagcacgcggtccttgatggagccgaagtagtggtcttccatctgctggtgcttggggggcacattgccgaagagggtgcgtccgcacatcatcaggtccgggcgcagggcataaagctgcttgtccaccaggaagtattcctgttccgcccccaggtcggcgctgacatgaatgttgtccggaccgccaaagcaggacaacagccgcttggcctgtcgggtgacggcagtcatggatctcaggagaggcgtctttttgtccagcgcctgtcccttgtaagagcagaaagcggttgggatgcaaagcgtggcgccgttttccgtccgtttgatgaaggcggggctggttgggtcccatgcggtgtagccgcgtgcttcaaaggtggcgcggagaccgccggaagggaagctggaggcgtccggctcgccctgcaccaggctcttgccggaaaatttgagttccagatttccctccggatccacgtccacaaaggagtcgtgcttttccgccgtgctcccattgagaggctggaaccagtgcgtgtagtggctggctcccttttccagagcccacgtcatcatggcctgagccacttcattggcgatgtcggggtccagtttttcgtccttgcggatggtagccagcagttttttgtaaacggggcggggcaggtaattgcgcatggtctccatgttgaagacatcctgaccgtaaatttccgcaataaaggttgcggcgttgccaacatcggaaggtgggtttgtatgcatcttgatagggaacgcgccaaaaggctcggaacataccaaaccttaaaagagactttttggcaagccgaatcctgccctatttcttcaggaaaaggacttcttccgcccccatccgttttcgggaagaagcgtaaacggttttccggtttctatggttctccggcggcaatggagaaattggggaaggagggggacgctgtaaaggaagggatgggccgtgattgtcgggaagagggccggacgggagttggtgaagtgccgggttttttgtttcatgaaacagcgcgggtgcctgccgatcggtattttcccgtatcttgcaagaaatttatttcgttttcagtagtaataagtacaaccatattattgtgaaatgcgttttctgttaatagcaagatgtttattgttgatgatgctgtgttgtgcgggagcggggatgcggcttcatgcccagcctttgaataagggccggattgccattctgggtgatagtattgcttacgcgggccattgggccaatgaagtggaaaacaccttgagggatgataaaaaatttgcagcctgcgagattgtcaactttgccgttcccagcgagacggtagccgggttgagcgaatatggccatgcgggcggcagattcccccgtccatgcctgcatgagcgcctcagccggattctcaagatgtaccagcctcaattgattctggcctgctacgggatgaatgacggcctcatgcaggcgtttgacaaagcgcgttttcaagcgtaccaggaagggaatatccgccttaaaaaggctgccgatgcggcaaaagcggagattgtcttcattactcctccattgttccggggggattccgctgaacaggctgagtacgacactgtattggacaagtacgcggaatggctggtttctaaaagaaaagacggctggaaagtcatagatatccgtcccgggcttcggaaattcattgccagagagaaggccgggaatcccggtttcaggtattccggtgacggcgtgcaccccggcccggaagggcaccatatgatagcccgggaagttcttgccgggctggttccggaaataggccttgctcctgaggttgcggaaaaagaccatcggccgacgccggatacgatgaaaaaacatgagaaagtccgcaatgaatggctggtaaaaacaggacatgcacggccggaaattccggggtatgatccggaaatggccaagcgtcagttccctaggacggtttctgtctggaatggttttttacgggaggagtttaccgtgggcggccgcagggcattcatcgtctttcccgacaaggctgttgtttccggaaaagaacagttgtggatatggcggccgcaattttttgattataagcctatagcagatctagagctggtaaggcgcggttatgcggcggtatttatcagcatggaagacctttacggttctcccaaggccatggatgtgatggatcaattttacaggtatctggtgggtgaacgcggtttttccagaaaaacggtgttgtttggactgagccgtggaggcctttatgcgcttaactgggcggagaagaatcctttgtgcgtggctggcgtttatgtggatgcccccgtctgtgatttcaaaagctggccggccggcaggggcaagggcaaaggttcgccggatgactggaacaaatgcctgcgcgcctacggctttaatgaacagcaggctttgtcctataaaggtaaccccgtggacaatatgcgcggcatggctaaagccggaattcctttgttgtttatttcccggacggaagatgatgtagtccctattgaagagaatacggatgttttcgctaagcgttacgccgggatgggggggcctgtaagagtcatccgccgatccggagggcatcatccgcacggttttgacaatcctgcccatatcgtagattttgttctttccgttaccggacagcccgtccccttgcgcgttgcgtgcctgggagacagtaatacttttggagcaggagtagccggagccaataaggatgttttgcgctggagccatcttcttggtcaggaattgagggaaaaaattcaaacggaaagaaatagaagtgctgaactgcggcgttaacgggcgtacccttctggccaagggagaccttccctatattaaaacgggcgagtaccggaatgcgctcaattctcatgcacagattgccattatcgcgttaggcaccaatgacgccaaaccgcagaacaggaaattcctgtccgagtttaagcagaattatgccgccatcatcgccgaactgagggaaaatatgcccggtattcaaatctattgcgcaattccgcttccctcgtggcaatcttccagccaaattgacaaggaaacggtgaaaaataaaattgtccctcttgtgaagcaggttgcgaaggacaataagtgtaaaaccatcgactttttcaccccttttcaggataaaccggaactttttcccgatggcgttcatcccaatgccgatgggcaggtgattatggctgatgctgcgctcaaggaacttctgaagaagtagttttttaatttaatcaatacggaataaatgaacgccagactatcggcaatcacaggttcgattctcctgctgtcgtccccgctgcagggattttccgcaacaactcatccggattcctgcatgaaccgggattggaaaaaagagattcccctgccagtatatccaaaccgggaaatgacggaactttatcaccaaacatgggaaattgcggcagggcgcgtcaggaaagggccggaagggctccccgcgtctccctatatggatgaaaattgctacgaagatcaaatctggatatgggacacctgtttcatggtgctttttgccaagtatgcgcccagggcgtttcccggaatagaaagtctggataatctttacaaacctatccatgaaaaagccgctacgccccttagaatccatttagtggataatcccccgctgtttgcttgggtggaaaaggaatattttgatttcacaggagataaggggcggctgaatcatcttcttaatgaaaagcggtatttgcagaagcatttcaaatggtttgcccgggctaaggctggtgaacggtttgagtgttccccccagcgtatttacttgaattccattggggatgatggctttacctggacggggggagcgagcggaatggacaatactccccgcgggcgtgatgccggaggataccataaggtgctatgggtggatgccatttcccagcaggctcttagcgcccactgcattgctgccatggaacaggctctgggaaatgaggatgaagcaagaaaatggaacgctgaatatgaagcgcttaagaaaaagatcaaccatctttactgggatgagcgggatggattttattacgatgtcaccattgcggacaaacagccctgccgcgttaaaaccattgcttcctattggccccttctggcccggattgcgtccagggaacaggcgcggagcatggtaaatcatctgatgaatcccggggaattcggaggcagttatccgacaccttccctggcccgctcggataaggattatcatcatcaaaccggggattactggcggggtggaatttggctgccgacgacatatatggcgattaaggccattgaaaagtatggctaccatgaggaggccgatgctattgccgagaaggttatcaaccagcagcttgccgcttacaggaatatggaaccgcatactgtctgggagtgctacagcccaagcggagatgctccctccactgaacacggacgccgtgtaagaccggaattttgcggctggtcagccctggggccgattgcgttgttcattgaaaatgtgctgggttttaagaaagtgtccgccgccggaaaggaagtccggtggaggttgaaaaaaaacaagggccgccatggaatcaggaatttgaggtttggcgatattgtaaccgatattgtttttaatggtgaaggcacggtgtcggtcacgtcgaatgcttcttactctctaatcattaatggcaatacttattcagtaaggaagggggatactgaaattaagctgtaaggaccttctgtttatccacggaagggcgtcattgatgttcttccgcgggttttttccttttgccggggcaagatgcgggtttttcccgtgcctgcgccaatttttttcttttggaggcggcctgagaggcaagggtgacaaaggaaattccggaagggcggcaaggcaatgttccggaacattacttgagaggtaatgttgtctgccgttttaacggggagggcaggcttcctccatatgccttacggaaattttttggtaaagggtatgggtttgtccgggggcgagggaaatggaacggggctccgcgtttcccgtttcaatgcacaggaatttattccaggactccgcacccaggtccgccatgtttttggcgccctgttgtccaggattccagacgatgacggaagaggcatggttccgctccaccgtgatggcgcggttcagcatgaggtcttccagcattgtttttcccgaacaggagggtaagttgtaaacgcggtccagacaccccagcggcgccagcgggcgttctccgtgcttcatgggctgggcggcttcttcccggaacgggatgtcctccagcccatgaacgcggcatttggtcaggttgccgacggcaaagtagttgtggaaggcttccgtgagcttgcagggctgcgtgcgcgccgtggtttccagcttcatggtcagcgtgcggcccagggtaaggcgcaggatggcggcgggataggattcatcttccggatagaaagccagggagagcaggacgttgccgcgcttgtccatttcctggtggtggaggcgccattccgaggtgcgcgctatgccgtgggacggtgctccttcccgggggccgaaccagggccagcagacagggatgcctccgcggatggctttgccggggacaaaagctgcgttgggagaaagaaaaaggcattcctcatgccctgccggcttccatgaggtgaggtgcgctccctgaaggcacagggatgccgtgcagagcggtgttgttacgtccaggaaagaaagcccctggtttgttgtgcgccggacggtcatggctgaaggcgttcaattgtccaggagccgttttcctgaagtttgtacatgaaacggtcatgcacgcggccggggccgccctgccagaattcaaaggtatccgggataattcggtaaccgccccagaaggagggaaggggtatttctcccttggagaatttgtttttcagttccatcaacttcatttccaacagttttcttccggagatgacggagctttggtgtgaaacccaagctccaagctgggattccttggggcgggtgaggaaatatttcagggattccgcgcgggagactttgacggcttttccgtaaatgatgatctggcgttccagcattacccacggaagcatcatgcagacctgcggattttcttcaatatcgcgggccttgtggctgccgtagttggtgaagaaaacaaagcccgtccggtcaaaatatttgagcagcacggtgcgtagggagggcctgccctgggcgtccgccgtggccagggaaaaagcgttgggttccggaatatccgctttcagggcctgttcaaaccaggtttggaattgttcaaagggattttccgccaggtcctttctgtgcagctggcctttgaggtattcttctctgaaattggacaagtccatggcgtgttgaacgatgaggggttattctacgctgaaatccagccccatatccagggagggggccgagtgggtcacgtagcctacggagacgaagtccacgccggattccgcaatggcggctaccgtgtccagatgaacgcctccgctggcttccagcaggggggtggtgcgtcctccgcgcatggcgacggcttgtttcagcatttccggcgtcatgttgtccagaaggatatgatccacgccttccagtttaaggaagttgcccacctgttccagggtgtccgcttccagctggatttccacgccgggcttttcctgacgcagcctgttgatgcattcctggaggtgttccgtatttccatccgtcatcaggtggttgtctttcaccatggcacggtcataaaggcccatgcggtggttggtgcctccgccatggagcacggccgctttttccagcagacggtagccgggagtggttttgcgggtatccagaatgcgggcgctggtgtgggaaatggctttcacatattgtctggtgagcgtagctactccggaaagacgctggatgaagttgagggcggtgcgttccgccccaagaatggagcgggcggaaccttcaataagcatcaccacggcgccgggcgccacggcttccccgtcatgcaggtaaacttccaccttcagggtgggatccaccttgcggaaaacttccgccgcgacattgacgccggaaagaacgccttttttccggggggtcaaaatagctctggctgtcagatgttccgggacgaagtatgtggaagtcacgtcgccggagccgaagtcttcggccagcgccagattgatcagggtttccacgttgtcggatacggtttctgcgggcatgaaagaaaagcggcttaatattcgcggttaagaagatagttggccagttccaccaggcgggcgcggcgttcttccgggaaaatcatcagggcatccagagccgcctgagtgcggcatttggcttcggaacgggcgccgtccaggccaatcagggccggacaggtggatttctgggaattgacgtccttgccggcggtcttgccgagtttttccgtggaagccgtcagatccagaatgtcgtcaatcacctggaaagccagccccaggttgtaaccgaagtccgtcagagcttccagctgggactccgtggcgtttgcggacatgccgccgaagcgaagggccgtggttagcagggcggccgtcttcccttcgtacacggtgcggacttccggttcggaaagctgcttgtgttctccctccaaatccagaatctggcctccgatgagcatggtgctgccgccggtggctgccagctccctcacgtaatccctgacggtatagcgttccgtatcgtccacctgggcgattacggcaaaagcctccgtcagcagcgcgtctcccgccaggatggcgacgccttctccgaaggccttgtggctggtgggtttcccacggcgcagatcgtcgttgtccatggctggcaggtcgtcatggatgagggaatacgtatgcatcatttccacggcgcaggcgggaaccagggcgtccactgccagtcctccgcaggcctccgccgccgccaggcaaaggacggggcgcattcttttcccccccgcaaatatgctgtagcgcatggctttgtggatggtttcggggctttcgttctctgctggcagcagtctgtccagcgctgcgtcaatcagggcgcattgttctgtgatgtagtcgttcagtgattgttcacacatggcgttatggaataggtgcggggtgtggaggaaacaggtcagcggttgaccagcaattccgcgatttgtacggcgttgagcgcggccccttttcggacctgatcgcccacgacccagagagtcagggcattgtcaatcgccatgtccatgcgcatgcgccctacgtagcaggtatctccgttggtgctgtccagcggggtgggccacacgccctccgctgggttgtccatcagggcgactccgggtttgccttcataggcgctgcgggcagtttccaagtccacaggtttttcaaactgggcggtaacggagatggaatgggaacggtaaacgggcacgcgcacgcaggtgcatgttaccttgagttcgggcagggaaagaattttacggccttcattaagcatcttaagctcttccttggtatagccgttttccgtaaaggaatcgatctggggaagaagattgaaggctatctggtggggataaacatttttcactacgggatggccgtccactacggcgcgcacctgggtttccagttccgcaatgccgtgctggccgctgccggaaaccgcctgataactggaggcgatgacggttttcaacccgaaacgctgatgcagagggaagagggccatcagcgtaatgatggtggtgcagttcgggttggcgataatattgcgggggtggttgaaggccgcttccggattgatttccggcaccaccaggggcacgtccggctcctgccggaaggcggaggaattgtcaatgaccacacagcccgcagccgccgcgataggagcgaatttcagggaaatgcctccgcctgcgctgaacagggcgatatccaccccatcaaaggattttcccgtcaattcttctacagtcagcattttcccacggaaagcgacctgttttccggcggaccgggcggaggccagaagcttcagggaacctacgggaaaattgcgtgtttccaggcaggacaggatttcaacgcccaccgctccggtggcgccgacgatggcaacatggggtgcttggttcatgattgttgtcagaaaatgacggatattttccgtccgcccccattatacggcagcccggtcatatggcaatacgattgcaagccttcaggcttaaaaatgaaaaactgtccgggattctacaccccggacagttgttgaaaaacgggaaagatcgcgttttttatttcagcgcttgcggcgcagcatcagcagggacaggcccaaaaggctcagggatgccgtagccggttccggaacgacatcctcagcagtggctgacatggaaaaaagcaggttggagttcgtgtttccgccgccattgcgggtggacatcacaatgtaagccgtgtcgctggtaaggggagtaccgctcaagtccacggacagggtcatgcctgtttgaatcagggaagaggcctggccggtcaactggctgatctgccagccttctgccgtctgataaacgatattgagcgtcgtgaagtttgctccggattgcagcccggcgcagtccacggaaagagtcaatccggtatagctggcgtaatcactggtaagcgttaccgctgttcctacgatagagccgccgtaagcatttctgttgatgaaagacacggatacatcagtatccccggatgcggtgacgctgccgtaaataccggagccggaattgccgtttgcagtggtgccttgccagccggtggtgccttgcaaccatgtgacgactttttgtgcagtgatgacacttccgctgttgacgtctccgaatccagacaatttaaggtttgtaggcagaggtgccccttcggctgcctccccatttaggtcgattgctacggtggcggccattcctgcgccgcaacacaaagccataagaccggaaagaaataatgtgttcttcatggttgttcgttgctcttttttattgctgtaatttgccgggctgtcttgaacccgctcatgatgaataaagcggattttcaatccgatatgccctgaaaacagtgcatgagtttctctttctgcagggtgcggactgtttcctgcggctgttgaaacggacattcccggcagatgtaccagctttcagggaaaagagttctccggttttcagacttatcttgagcagtctcaaaagctggcggcggtttctgcacgggtggatatttcggcaggctttccgtatgcataaaaaggttttcaatgatgcaataaagttcggcacaaattcttggttatcagaatttacgcttgacttccggattgaaaatccggcatatcctcactttccatgaaaggcaacaaaacaggctcccgattttagggagcctgtctttaaaggaaagagcggtgcaagcctgctatttaacccattttcccgcgccttccggcagcctgccgtcagagacggggccgtagcgggtggattccgtgttgccccagagggggacgcctacgatgcgtttccaccagcgggacatgctggctcccgtatagcagccgaagctccagcagtcggactgcggcgtgaaaatatcccgccgtatcctgttcaggtccgtctcatggatccattccgtggaaacggccatgatattgttgccgtagtccagcatccacgcatagcagttggaatggccgaagtagtaaaaggattccaccttgtcgccgtggaagcgcggggaggaattcagcgcccggatggcctggtcggcgctgtttacccagacgagcctgattttatacttggaagccaggtccgcaatccagcgggtgtaaggtttgccgtcttccttcccccgggttgcgtaaccggggcggtaaacaatccaggtgattctggcggcaggatcttgctgctggatctgggcgatgcggatggtggaggcccttacaaagttggcccaccaattgtcatgcctgtcaggctgtattctcagcccttcccattgcctgagtgcggggccgccgcacatgacgacgtgaacggcccgggacagtcccgtgccgcccagcaacagggccagagcgagaaaaaggcgtgaaagcatgcccgcaccctacctttgctccccgtatctgtcaatccggcggagcgttttttgcgggaacagacgcgcgtgaaaagacaagggagggggttcatgtaccctcagcaattcaccacgttgacggccaagccgccctgggcggtctccttgtatttggattgcatgtcccttccggtgtccagcatggtgcggatgaccttgtccagcgggacaaaatgagcgcccgtgccgcccagggccatgcgggcggcgttgatggccttgatggcggcgatggcgttgcgctcaatgcagggtatctggacaaggcccgcaataggatcacaggtgaggcccagattgtgctccatgcctatttccgcggcgttttccacctggtggggtgttccccccaggtactccgcaagagcggcggcggccatggagcaggctacgcccacttctccctggcagcctacgtccgcgccggaaatggaggcgtttttcttgtacaggatggcgattcccccggcggtgagcaggaagcgatgcacggcatccggatacggggaaacgcagaatttggtggcgtagttaagaacggccggaacaattcccgccgctccattggtcggagcggtgacgatgcggccgccggccgcgttttcctcacttacggcaatggcgtacagattgatccagtccatgatggagagagggtctttcaaggctgattctccgtgcaccagaagattcttgcgcaaagttttggcccggcgcggaacctgcagaacgcccggcaggttgccgcgcgcgctcatgccgttggagatggactgcttcatcgtcgcccagatcaggtccagtttttcacggacttcccgttccgggagcatggcgcattcgttcgccatgacaatggaggaaagagggcatccgcgctcatcagccatgtgcagcagttcctccgcggattcataaggaaaaggaaaggtttcccggtccctttcttccggatgcagaagttcctgttcggaagagacgaacccgccccccgtggaataaaatactgcgtcttccaccgggtctccgtcctggttgacggcagtgaactgcatcccgttcggatgcaggcgcaggggctggtagtgggaaagatccaggtcgcgggaaggagagaagcggacgtttttttcttccgtgacggacaacgtttcctgctggtgcaggcgggcgatttttccgggaatgctgcgcggctccaccgtatggggttcttcccccagaagccccagcatgatggctgtgtctgtgccgtgcccatgtccggtggcggccagggagccgtagcattcgcagcggatgcctgagatttccgccaagcgcggggagtggcgtatctgttcaagaaagcggtgcgccgcccgcatgggccctacggtatgggatgatgaaggacctatgccgatgctgaaaagctcaaaaatgctgtaatggtgcatgtccgttttcctgtagcggggaagggccggaaatcccgctgggaattccggcccgttccgaaagatgggtttacagccccagcaggtagcgttccgcttcaatcgcggcgctgcagcccattccggcggaagaaatggcttggcggtagtgaggatccgccacatctccggcggcgaacaatcccggcgtcctggtcgccatcatccctgtttcccggataatgtagccggcatcgtcccggtccaccagatcccccaggaaagaagtgttcggcgtgtgcccgatcgccataaagacgcatttgacgggaagttccgtttcatccccttctactacgtccttcagcatgacggcttccagttctcccttgtcgtccgtcttatagcttacgatggtggaattccacatggggaaaatcttttcattggacagcgttcgttccgccatgattttggaagcgcggagcgtgtcgcggcggtggatcaggtacacccgggaagcgaagcgcgtcaggaacatggcttcttcacaggcgctgtctcctccgcctaccacgcacacaggcacgtcccggtaaaaagctccgtcacaggtggcgcaggcggtgagtccgtggccaaccagcccttcctctcccggtattcccagatagcgggcggatgctcccgtagccacaatgatactccgggtttcgtaattctggccgctggtcttcacggtgaacagtccggtggcttcatccctgacgacgctcttgacgtcctcatatgcaaaccgggtgccgaacttttccgcctgctgctgcatcaggaacatcaggtccggccccatcacgccgtccggaaagccggggaagttttccacttccgtcgtggtggtcagttgtccgccgatttgggaacccgtgatcagaagcggagagagattggcgcgggcggtgtaaatggccgccgtgtaaccagcgcagccggcaccgatgataatgacttgttcgctcataatagtatatatgtccgttgccatggtaaagggcccgtgcccgttttgcgagtagattttgcgctatgcggagacaatgcagcggcctgcaatccggcggttgcgggacgggttccggcagtggcggaaaagagctgcctacatgtatccctggcgacggtctgcaatattctggccctgtctgcgggaagattgctcagccgcgtccctttcaaggacaagcggcccggcaggcccagcggagactttccgaataacgtgaagtagattacgcatgccgtcaggtagctcccttcctccgtcgggtgccggccgtcaggctggtacagctgaatgcctggatggcgtttgaggcaattctcccaggcaatgcccacgggggcgagcgctgctttttccctccgggcaagtttcaaatacgtttcaagaagagccttttgctcctgcgggtccggagttccggaagctcctcttttcccccacgtcagcatcaggatgggcgttcctttggcggctcgtatcagagagcaccatttttctccgaactccatggttcgttccggagtccggataggtgtggcgctttggtcctggagaataacgaagtcccatgccgttccctccatgttgctgcgggcacgcctgtcattccaatgggactggagggatgctgccggagccgcgtgcatgtgcacgtccggccgcaatccttgggtatctgccatggctttaaccatggcgggcatgcggttgaaaaacgtatagctgtttcccagaaagagaatacggctgccggggcgtgcaggaacacagcgcggccaggagggggatgcgggcggctcttcccaggcctggagagggcgggggaaaactgcccaggaaaaaatcagcagcaggaatatcttggcgggcggcatcatggctttagacgggttcccatgtttccggaataaaatttcaaatggaattcatgacgtgagcaggctttttctatacatcaggtaaaagtaaattcatagagataaaagagaacatggaatgcctttgtttcggcatcccttgtacgggtgccggggctgccgtcagtcccggcaggcagacggggatttccttgtctccgtatcgccgcgcgaaggtatttttcttccttctccttgattgggaagcactgcatcaattgaagcctgaacaactggttgtatgactggggaagactttccggaggacttgccgaaaggagacgggtgtggttggatatgatccatgaagtctgagtcgctgaccaagcgccgtgtggcgggggtggatgatccgctgtttctggattctctggatatttaccggacaagctttccggtgcatgaacagcggcggatacaggatttcccgttggcgtttcaagaccccggtttttgttatgaagtatttttaaatggggaaggccgggtggttgcgatgctggtgacgtggcgtcgggaaaaattcgtgtatctggagtattttgccgtggatgcctccctgcgcggccagggcgccgggcaaaggattctggaagaattgagggatgcgtttccgcacaaggttattttggaaattgatcctccggaggacgggatctcacgtcggcggctgggattttatcagaggtatggctttgtccccaatccgcagtttgattatatccatcctccttatacggatgagggtgaacctttcccgctcctgctgatgacacatggagatttgctggatgaggagacataccggagctttgtggatttccaccatcgccacgtagtggcgaggtgaataaatggccggggaaaacccgcgccatggggggattttctcatcttgaagcaaattatccttggggaggccgatatgagcctgtaggacatcaggctcatgttgcggttttgcctgtttatggaacgcccctgagtctgtattttccgaatcagaagagccgttccgcatttttgggagacggctttttgaaaaatgcagcgggttgggatacaccggaagactcagctccatgcccgatccacggcttccctctcttccggggcaagatatctggagagccgttctcccatgcgcagcctgtattcgggaatactccaggaatggagcggctggacggcggaattggtgaattgccaggaggggacgggaacgaccacgtccagcacttctccggctctggagggcattccggccagtaccgccgcaatggtggaggaaagttccggatgttcatccagaatatccagcagccatccgcagcccaggtccgtgggaatggcctccgtttcggccagcaggtccgcgaggcgcccgggagggagatttttggaaatgaaagacaaataaggggcaaaccgcatgtctcccaggctcatcagggcgtccagcaccggagccatggacgcctgtccgggacagggagaggcgcagatgacattcgccaatccggcaattccgggaaaccgctcctccggctggggcgcggccagcgtataaataaggaaagcggattgcctgcgaatatccggcgcctcatccgccatggcaaaaggcagcagggccctccatccgtcccctttgcgctgccggataaaagctgccagttgcagagcgcatttgcggcgggcgtccggagcgcagcgggattggaacatattgtaaatggtgacgccttcttcttctcttcccgtttcattgcaggtgaccagcccgtaggcaatcatggccagaggccattgatccgaaccgatttcctccctgcgggagggatccgtgacgagggcggcaagccgcttgatttccgacaaagagctggtttgatcctgaaaaaggcccatgccctcatgatagccggaggcggaaacctgccaaggaaaaaccgtggactgcttacgggaacccggagttttccggtgaacgctgttgaggcatgttgttgagtgtgattggcgttttatcctttatttattggcattccggctcacgtccggacaggaattccgtattttttgatgaaattttttcctgtgttcctctccgcttttcccctggtagaggtaggcggttttggagttgtatcctgccgttcggtcgatgaggtcgagaacctcgccgtctccgtatcccgccttcctgatgtatttgacgacttctccggcctggtcggggaagtacttcaccagcatggggatgaatcttttctccataattctgataacataagtgtcaagcatctgattccttgatgaaaatgtaaccaggttattccatttgtgagtccattcgtaatctttgatgtcatttccaatatccttggctgaagcgtccatttcagattgatgttttatgggagaaaagatttcatgatatagtgattcctcattcttgtggaaatccttgatatgcattttttttatttttttaataatgcttgaaagaagggatatattaaaatgtatcaattttcttttactgatctttaatgttgttgatagttgatttatatccataagggaaatcgctgtgctgatccttgctttgctgtaaatatcattatttttctcgtttttataaggccacggttgatcactggtgtaatccggagcttcatacatgggggccccgcctatcagataaaggctccaaatcatgtcgcaggcttcttcccgtgtcatcacgccgtcatgctgcagtttgttgattgcggtcagaaccgttttagcgtgctgataaaatgctttcagatcattttgttccagcaggcttttcaggagcggagcatgcccttctgtacttctccggatatggatggaatcgggcggcatgagttcatgatcgaatgaatgtccctccgcggaggaaaggctccatccgaggcagatgaagatgattatatggaaaacgtggttcaccgtcttgtccgggttgtttttcctggttgggaggaggcagatggcgcaatgaatgaacgttcggcgtcactctctgctctgtttccgctgaagctttttcctgtgttcctctccgcttttcccctggtagaggtaggcggttttggagttgtatcctgccgttcggtcgatgaggtcgagaacctcgccgtctccgtatcccgccttcctgatgtatttgacgacttccccggcctggtcggggaagtacttcaccagcatggggatgaatcttttctccatgattttagagacatagctatgatacatgctgtttcttgacgaaaatgtaaccaggttattccatttgtgagtccattcgtaatctttaacgtcagagccgatgacattcccgtccggattggcaggatgggaacgtattattgcatctttcagcgctgtctctttttttccgaaatcagggaggtgtagagatttcagccttttaatgatggcggcggcgtaagcggcatggagatgtttcagccgttgttcgtggatgcccaggttgcgcgacatctgtttcgtatccatgatggagagcgcggaaatgactcttgatttggcggcaatgtcgttgtcccgctcgttttcataaggccatggctgaacgctgtcgtaatccggagcttcatacatgggggccccgctgatcagataaaggctccagagcatgtcgcaggcctcttcccgcgtcatcgttccatggcgccgcatggcgttcaattctgacagaactgtgtttgaacatccatagaattgtttaaaatctcctgattttaacaattcttttaatttttttgatttttctcccatttttccgcgaatatggatggaatcaggagccgggagttggcgatcaaatccggtctcttcccccagggaagttgaacatccaagatgtatggcggcaatcgcgtaaataaaatatttcatcatttttttaggttcatttattttgactggttgataaatacgtgcttgttatttttttctgtgcacctgctgacggaacagttgaatttggaaaccgtcgtcgtagctatttcgttgacgacgtcaatccagtcgtaaaaaaaatgctgttcaacagtctgaatggtttttacatctttcccgtcgacattgatgttccagtcgcaaatccatttatgagtttgaggcaagtcgtagaattttaattttgcaataggttctcggcatccaatgttgtcagatagcctgtttttggtgtcaaggcgtactggtgcaggattgggatcatgtggggctgccaggctgccttcagccggggcgggaacgcagcccttatcccgttcaataatatggacatttcgaaaattcacgcttatagggaggaacgttaattccaagacagctgatgcccctgccatttcttgatcaccatcctttggcagatcaaaataaatgactcctcttttattaaaatccggatgatttctgtcatatgatttccgtaaatgttttgcgctgatcccttcgggaacaatggctgataacgtgattttcgcttctcttccttcttccgtgactgctttaacagtaatgtcgcctccttgggagaggtcatttctaataaccaatgtttgaatgacagagttgtcttcctcttgaaaagaagccagattttctccttcttcgattgtccattcgatctgggatgggtctccaatgagctggggcttgtctgaaaccagggttaatattactgtttcacctatgcccaatttctttcttttttgatcgttctctttctctttttccggtacggaacctttttcttcttcttgaatataaatttgggcagagtattctgccgcctgtgattcgatgcgcaatacctcatttgccagtaaaggcgctgtgaagcagaggcccagcagcatcatggcgagatggcgttttgccggcattcccggggataagacgtatttttggaaaaacggggaggatgcccggatgatggcgttcgcgttcatgttaaaattttctgtgctggttaccggttctgccgcaggggcgagactttattgccgctgattttgttgatcaatatttccccttgatgctttaattttttgtcattccatatttccagcagacggcggtaggttgccacatagtatgtgcgggtctgttctcttttttccaatgccgtgatggcgccttccatcatgccggcggagtatcttttcattttaggcgtccatgaggcattgttccctttcctggcccagacggaaagatgcttcccgatgaatccctccctgtatttgattatcttgccgatttcagggcaatccgccacgagtttgttccagcacagcctcgtgaagagttcctctgccgcgggagaacagtcagaatccaggaaacaggcgtacagttcatagggattgaccttgctttcccggattttgagtatgtttaccgctgcatgatggaggaggttgtgttcatggggcatggcctgcgccagttctttaagcagggtgagtttttgccggtcattgattcctttggccttcatgctcaggtaacgacgccatgccggataattaaatgggttcatcttgcaggcttctttcagcaacaattcccgttggacgggacgcggagagcagtcagataaaaccgtcatcaggaaggattcttccgccagaccgtgatgaataaaggcattgtaagccgggatgagctggacggggccgttccagggtatctggctttttcccgttgaccagttccatccgctgatattgttgccgattttccagtgtccgccggggtgtttccagataaaggcacagtgtcccggctgcccgatggcccacgcggggacgcctttggctctcagaaagcctgccgctcctttggagacggcgccgcacacgcctccgtattccgtataaagctttaatgtgaccggtttgtggtcgtaaaaagcggctccggcatgaacgctgactccttggaggtttttcctgcgataggggatgaaacccatgaatttatttccagcctgttcgggagggatctgttttttctctatgaactgctgggcccaggacaggtcttccaggctctctctgccacggaaaacgatggcccattcccacggctgcatcgtgtccgcctggggatggcatgcggattggaagtaggattcccggtaaaaattgaatttggacaggcattcttcaggagggatgacatttgaggcaagccctgcccccagagccatgctggtttcaacggggcggagcgttttattgttcgcgttccagatgcggtaaaatatggatagggtttgtttgccggctgccccggatagggcaagcattctgaagacttccgggtgggtggagagccatttcctgaatgccccgtccttgagttcatgctgcgtgaacggttctccgttttccgcggtgctgaaaaattggtacaggtggcataacagggcgacttgcggggcgtgtgccatggcccggattttatccgtgtcaaggtttgcggttcccagtttcctgcacagaatatcccgggcttttccggagatgaacgaggaacgttcggctgaaagtagtgtctggatatccggttcctgcgctgacgcctggataacgggaaaggctgccagggggagcgctcctaaaaggagaattcggaagatattattcatgggagatgggcggaattgtatccatacctaatataatccatcatatggcaaaaagatgatgaactgtcaacggaaatatttttattttctgggaaaatgattgaacgaagaatcaatggaaatagaaacccagtgaatgaagaggcgccgcgaaaccatgtccgcccgttgaatggaggcgtcaagggcggatcaggttttccatattgctttggaccaggtcaaccaggttgttgacggtcatgcccagttcctgcgccgcgcgtcggtaaagttccggaagggtttccggatgcccgtccgattccagcgccagccgatggagcggtatggaggcaaggagtcccggacgttccatttcccgcagccctacggaaagaagccagtttcccgaaggaagttccgtgccgagatgcagtgcccccgtccagccgtgcaggacaatgttcaaacggggatattttgtcagcatttccgccagcgtgccccatgcgcggcagcagtgcagggaagcggggcggtccagacgcgcggccagttccagatgccgttccagcgcttccttctggagaggcagccccgggatgccgcgccggcatttgtccagccccgtttccccaacgcccgcatgggggattttttgcagaagggattccagcctgggcatttcctctttccattcagccgggttcaggaaccagggatgaatgccgaaaaagggcgtaacgtgttcatcccgttccgccagaagggccacctgtttccagtccgccggggaggtgccgcagatgaactgcggcgccgtgccggaagcggctgtagaggaatgggtgtgggcgtccggcagattcatcgttgcttaatgggacagagatggcgcgtccgacggttcaatgatatcaaaactctgtttcgccaggcgcacggcggcggcgcccgtttccatttcatcatggatgacgttggcgatgcccgcgtgatgcagggaagccacttccgaacggaatttggcgcgggcaatcaccgtgatgtccgcattggctcccttgatctgcatgtaggtggacagggccggggcagggtccgggaatgtgaaggcaatcagccgcgcggtacggacgcccgccaggtccatggtgatttggtgctggatgtctcccagaaaggccagatggccgccgttgagcagggatttgacggtgtccgcattcaggtcgataatgatgcaggggatgccgtactgggacaggctttcatgaagcctcctgcctacggggccgtagccgcaaatgatggcatggttcctgatgccttccatgcgtgtgatcagggtttccacgttgaggcgttcccgttttgttttcaacccgggaatgcgcaccagcagcggggtaagtttccgtgccgccttcatcagcagcggagtcatgcccatggagacggcggcaatggcgtaaacgttggtggtcaccagcgccgggatgggggatatttcctgcatgaaagggatgagcaccagggaaaattcccccacattggtgagtgcggtggaggccatgatgcccatgcgcccgggaattttcaggaagcttgcggctgtaaggcaggctacgaatttgatcgcaaggacaaaggaggcgaaggttgccacctggccgatgtgttcccacagtccatcaatgtcaatcaacagcccggcggaaacgaagaagatggtcaggaaaaggtccttgaaggggagcacttcgctaagaacccggtggctgtaataagagctgctgacgaagaggccggcggtgaaagcgcccagggcgatgctcaggcccagcagactggcgagcatggcaattcccgaacagatggcgaacaccatcagggtgaagagttcccggcttttggtccgggcgacggccagcatgatgcgcggaagcaggtagcggccgatcagccaggcggctcccagaaagacaagcccccgcagcacggccatgccgatgttgagcgctgtttcccatgagtcgggcgcggcggtgaagatctgcggcatgattgccaccagcatgatggcggcgatgtcctggaacagggcaattcccaccgccatttttgccccggaggttccgctcaggccgaattcctggaaggatttcagcgccaccgccgtggaggatagtcccataatggccccgaccgtcagggagtggctcatgtccatgcctgtggcgtaatgaagccccaggccgaaagccgcagtgcagatgaacatctgaatacctccgccgaccagagcggttttccgcaggtgcttgagttcatcgacggaaaattcaagtcccagcgtgaacatgagcaggataattcctacctcggaaagagcctggatgctgacgtcggaattggggatgtggtccagaatgccgcagttggccagaattaccccgcagatgaagtagcccgccagcagggactgccggaagtgggccagaatgagggcaatcgcgatgattcccatgaagacgacagtaagcagaatgaagaatggaggcgcgtcattagggcctccggaggccagcagagagagaaccatggcggtcaggtcgggaagttagggaatggtaatgaggttgatttccggcgggcagttgaagcggcccggccctatatagcctatgccgcgggtgacgaatacctgcttgtcctcataaggatggaaccctgagtgcatggtttccccttccgacgccaatagcggggtggaaaagaaaggcagtttgatttggcctccatgcgtatggccggagagcatcaggtcccagcggtaatttcccagcaattcccttcctttggggttgtggctcaggacgatggttggcatgggcgagttttcctccaattcgcgcgggctcatgcaccggtccgggaaaaagtcaccctcccgcaggtctcccagccccaccagtttgaattccacatttcccagcctggggatggagacgaaggcggcggaattcctgagcagtgtgaagcccccttcctttaggacgcgttccacattgtccgcaagggccatgtcatggttgcccagacatgcgtaggccggggcgacggaggagaggcgtttcatctgggcgatgtagtcgcctgcatgagtgacccgcagaaaatccgtgtacagatctcccagaaatacgatcatgtccggtctggcctgttccgctattgttgccgctttttccagcaggggcagattggtgtggatatccgacaataccaggatacgaaggccggaaaggccgggtacacatccggcaggggccgtgttttcattaaattctagatgattggcttcccagtgcatgtaggaggccagcagggaccccagcagaatgacagccgtggccgcatacaggagcttgcggagctgggaacgctttttggagaaagggtgggtggtcatgatagggaggggttgagaatggccagttccggcagggtgaataatccgttgcggcgcaccagcttcccgtccaggtaaatatctccgcccccggccgcttccgtctggatgcataccatgtcccagtggatgcgggactggttgctgttgtccgccacgtggtaggcctgccccggcgtcaagtggaaggagccggaaattttttcgtcaaacaggatgttgcgcatggggcgtgtgatggccggattgacgccgaaggcgaattcccccagcctccgcgcgccggggtctgtgtcaagaatggcgttgagctcccctgttttatctcccgcttccgcatgcacgaccagtccgtttttcagcgtcaggcggatgttgtcaaaggggattccctggaacaggctgggcgtattgaaggaaatgtggccgttggcgctgtcgatgacgggggcggtgaatacttctccgtcgggcagattgcattcccctgcgcacgggatggcaggcagccctttgatggaaaaggaaatgtccgttcccggcccggtaattttcacatattcagccttttccatcatggcggccagctttcgcatggcgggacgcagggcggcgtaatccatcaggcaggtgcggaaatagaaatcctcaaactcttccgtgctcatggccgcctgctgggccattcccccggacggccagcgaagcccgcaccagcgcgtatggcggatgcgccgctgggagacggggttcagggctttcatggcggcggccatattttcctgtggaacggaggacagttcaaaggcgttctccccgccgcgtatttcaatgtaggcgtccatgtcctccatttccgccaggcggtggcggccgatgatgccgtattgttcttccgttgctcctgagagcatttcccggttcaggcgggactggttcaggcgcagaaagggtattgctcccgcattcctcgcctcccggacgagggctattcccatttcctccggaatatccgtcagttccagcagaaccctgtctccggggcgcagggctgtggaataccctgcaagctgggctgcaagggcctgaaaacgggggtctctcatgcctttattaggcaaatacggcagcctttttgtcaagccggagacttgccacgggcaaaaaactgtggttttatcccccggatgtccagattgcccaagttaggaatactcggttccggttccggttccaattgccagtccatttatgatgccatccagtccggttctctccgggcggaaatcgccgtggtgatgtctgacaatccggacgcctatattctggaacgcgcccgttcctggggcattccggcggaggttattgactgcgggggatttaaaaccagatttccggaggaatcccaggcatccgttgccgcgcgcctgaagcaatacggcgtggactgcgtgtgcctggcgggattcatgcgcctggtgaaacttccgctgctgaaggaatttccttcccgcatcctgaatatccacccttcccttcttccagacttcccggggcttcatgcctgggagcaggctgtgaacgccggagctgtggagagcggctgcaccgtccattatgtggatgacggaatggataccggccccatcctgggccaggctcgcgtgcccgtgctgccgggggatacgccggaaagccttcacgcccgcattcaggagcaggagcataccctttatcccgccatgatcgcccgcgttctggaaacgctggcatgacctgattctccttctgaccggaaagcaatcaggcctcctgccgggagaggatgacaggatgaccgattctcttgtcttgtgatatgaacggaatccgttaaaaaggagtcctcttttcaaagaaaggataaaaataccatgaagatgaaaccttccatcgccctgtttgccgcttccgctcttctggcgggtgtggcaggcgcgcaagaaaaggccgccgaagctccggcagccgaccaacccaaacaagagaaagaaattactgtgtctcccgaacagatgaaaaaggacctgggctattttctgggtttccagagcggtcagcaacttggttccattcctaccctgacctttgacgacctggactaggaatccttcctgcagggcatcaaggatggcatggtccgcaagcccgccaaggactaggaacagctgaaacccgccctggatgcgttccagaagcaaattgacgaacgcatttccgccaaggccaaggccaatttggaggccagtaagaaattcatggaggaaaacggcaaaaaagaaggcgtcaccacaacgaagtccggcctccagtacaaggttgtgaacaagggcggcgaagaaaaatttgatgaaaagaagttcaagaaccccatgttcaaggtgaagtacaagggcacgctgctggacggcaccgtgtttgacgacaccaagggcaagtccgtggaacttcctctccaggtcatccccggttttgccgaagcgctgacctcgatgcccgtcggctccaaatggattgtctacattccttccgagctggcttacggggaaaacactcccggcgctccgattgaacccaattccccgctcatctttgatctggaactggacggcatttcggaagcccctgcttcccagggaggccccatgagcatttctccggaacaacttcaggagatgcttaaacagagcggcgcccagcagcagtaaggaaaaaataattcaagtcagggccgttcccgggagggagcggcctttttgtttctatccgtaccgctttcatcaggaaagcgaatgggcagactgggaatttataatcctgcttcttttcttaatctatgtattttacttgtaatgaaagagtgatggttttgcttctctggatatgtaggcggatatgctggacaggtggagtttattattttccattatttatttaatgcgagtcatttctgaaaatagacttgccaacggattataaatccgggtattactgatcacaatatctttgatcaatatgagacttcatctccctccgtccttgcgttccgcccttctcgcttccctggtttccttctccggcatttactcttattcccatgctgcaacctcggcggatttctggcagatccccgattttggcggtcctgattttacatggacgggggcaggggaaggcgatgctgtggggacggcaggcaactgggagggaggctcggcgccgtcccgcgtggacaataagggttcgcatttgatttttaatggcgtggatgtgacggttacgggaacgcctcccaatacctcggacggaggcggtatttccgttacggggaacggaagtgtgtctgtggggcttggacaatggggcggcaatgtttacgtggagaagggttcctcccttaccacttctttcggtacccagctcaaaaatatggagccagaggggcatgccaatatctatgtggacggcactctgaacatgactactccgggagggaatctcaattttgacaatggtaccggtgccgataatcattactggcacattgggcttgacggaatgatcaacctgtcaaacaccaccacaattaccaagaacgccaaaacatggaatgtggaggtagtggttgccagcgccatggaagagcttgcggtcaccaatcgcgagatggttgacgacgccctgatcacacgctatttcatgtctacaggggctgatttgggggcatccctggattccctgcgtatttggaagcaaaccggggataatgcttatgaggcattgacgagggttgattccgccggccagctgggggcgggtaatttcctgcttgtttccaacggttccggcatgtccgtgcagtacaagggggaagggtatgatgcagaaactctggtgtggaattccaacgggacatggagcaatacgggaacgggctggtacaagcagggtgacggaaccaagacggatacttccttcctgaatggggatgccgtcattttcacggcagaggaaggctccaaaacagtcaatttctccggagggatcaatgtctcctccatgacatttgagacggattatgcgctccttcccggggaaggcgctactctttttgcccaggaaacggttttaagcaacggttcgtccctgacgttgggtgacggggatcaccgtttttccggttttgaaagcctggtgacgggaggggaaaattcttccctcacggtttacatgaaaacggatgcttcttctgcaggaagcgtcaatttgctggagggctcggcccttcagaatctttacgtatatggagccttgagactgggtgcttcttcccagtcgggatcatggatgcttggcggagccagcctgcatatgatggcgggttctaccatggtgttcggttccgatgcggggacatccatcggagcggggcaaacggtaatcgcggagggcagcttgaatgtctatgcgcagaatgtttccgacagcaacacgtatctctggaacctggtgggcggcgagagtgtctcgactggagatacgctgacctttaacggaaccagcaacccgaccatagcagggaatatcacatacgccgggaatatcgtatctggcgcccagaccggttccacggtgacgtttaagggaaacatccaggcggaatcgttcaaggtagcccattattacggcagggttcatatggccgataatgaattggaagttaataaactgtgggtcggggccggtggtggatatgaaaattcttattatggggctcttgatcttgattccggcaatgtgactacggcaggccaggtccggcttgccgagctgggtcatggggtgcttaatgtgaaccagggttcctccctgactgtcaccggcaacaatgatacccatagcacaagcgccagtttcctgctggctcactgggcttattcaggggaacttaatttgaggggcggttctttgaccgcattgcagacttcgatgcatctgtcctggtctggcacgggcattttcaatgccgtttccggaacggccgatttgctgggaatggacttttgggctcaaacaaacggttcattccggggcagcttcctgttgggcagcgcaacatccggggatgctagggtgaacataggttcttatggcatggccaatgtggcgggagaggccgttatcaaactgggagaaggcacgctgggggctttgtccaactggggtataagctataacccggatttcacggcttcttatgtagaacttctgggcacggtgaatgggactatccttgacacgctggatgccaatgaccatgccacgggacgtactgttaccttttccaacgggctgacgggaaacggcaagctcgtgaaggttggcgatggggttctggttcttaacggaacggcccaggctccggttcctgccgaaggagaaacggcggccgtccccggctttaccggaacagtggaattgagagaaggcggtttgacggtgaaggattccagcgttatcgggcagggggctttgctgatcggaggcggtcttactgtgaacgttacgtccgcggacgggtatgtgctgaatgccggttccacgctgggctccacgggaatttccggaggaacggctactttatccgccgggttgacgttaaacggcggcaccctgagcttcagttctcttgattcggagacggcggccctgaccgtcaactccatcagcggcagtgaggctacggaagtacggctggggctgtcttccctggaaacggggattagttatgccttgctttccggagcagggttgacggaaagttctttctttactttgggcggagctgctgcggagttgtacaatggaacgttttccgtcagcaacggcactctttacgtcaatttgagtgacaaggaaggtttgttgaggtggaagagcggcacttggaatacggaaagctcgaatacttcctggagccttgacgggacaccgtcagcttatgccgacggggagaccgtatatttctccaatggcgatggcgtggataaaaatgtgacgattgcggggaatgtcgctccaggcagaatcaatgtttccggtacggatttcatttttacgggtgacggttccattaccggggatacgacgctgaacctgctggacggagcttccctgaccatgaacaacgccaactcctatgccggggataccgttcttggcgatggcagcaaactcgttgtcggcaatgccggagcgctgggcaccagcacggtcctgttgcagggagattccgttctggaactgaccacggggacgtggaacgggttgggaacacgtttgaacgtcaattcctcaggcacgctgaaattgagcgggaacgcctccggaacgacaacggccgccctgactggagtcaggtatgagctgggagccaataccacgctgaccctttccgccggaacctatggaaatacgattaccggggccggtacgctgatatccgcggtaggaacgaatgtccttaatggaaatgttgatattacaggagagtacagggtgctggcaaccaacggcacggcatgtacctggacgctgggggccggcgcttccgtgacggcgggaagcttcatcggccgctacgagtacaatggaacaaccacgctcaacatcagccgggacgccgtgatgaatattaccggcacgctgcggattgcccgtgacggaaaaggcgtcatgaatattggttcgggcggcatggtgctggcccagacgctggatttggggcagaactgggatggagtaagcgccaagggcgccaccattaatctgaatggcggttccctgcttctcggttcaggcggcatgacggcatccggaaataccaatacgattgccctgaacatgaactccgggacgctggggacgacggcggcggaaggctggtcttccgcctacaatatgtcccttactggaaatgtgacggttgatacccgccagtatgatgcggaaaccaagtcctaccatgaccaggcttccaccggcatcaccctcggaggcgtcctttccggagcgggcggcctgacgaaaaccggcttaggcaccttgaccctttccgggcagaatacctatacgggcctgactaatgtccaggccggaacgctggcgtttacgaatacgaatgccatggccctgggcagcatttccatgggtgcgggcgccagaatgacgacggcttccgctctgacgctgaatagcggtgctaccctcacttttgacatgacgggcgtggtggcgaatgagcctgtcatcaatatcacggcagggtccctggctcttacggattcgtcctgtgcgctgactatcaataattatggtgaattggaggcatctaactatgtcctggcccagtgggctgcggatggaagcctgacgacggattccttcacatggacgcccgacatcaccaaggaagggttcgaatattccgtggtggtggaaaataaccagcttgtgctgaaggttgctgacgtcagcggggacaatggttttgtctggaacggaggaacggactggaagtggatcaacaccagtgttgacggctggacgacgaggctgacgggggcggatacgctggataatcaggaaatttacttctcctccgcggaagcgggtgaagtcaaggtttccggcattgtaactcccaagagcgttgttttcaacagcggcgcttacacgttggtcagcgatcctgacagcgaggggtctattgcggattccacagctcccaccacgcttaccgtgaacggtacggctgaagttgccttaaacctggccaatacctataccggagggacgatactcaatggcggtacccttaccattggcgctgacggagcgctgggaacggaaggggatattatattcaacggggggacgctggcctatgcggattccgctgccggtgaggatgcgacagggtatgacatttccagccgtgtcaacgtcggagacggaggtttcctgaacgtttccgtgcttggcgccggggataccgtttcctgggccggcttgtcagccgatgtcatgggggccggcactaccctgaccaaaacgggagcgggcacgctggcccttggatacgcagggaataccttggcccaccttactgtggaagagggtacgctctctttcatgggcggtgcgactatcggcgtaaatccgaacaatgctactattgtccgcgtcagtgaaggcgcttcccttgctctttccggcggaaccgtcaacctgcatgcccagctcaatggggcgggcaccgtcactatcgggactgcggatactgcgggactggtcaatatctccaatacgggcaataccaacttcactggccgcctggaactggtcggcaacggggtgaatatgagtaccaatgccaactgggtagcctttggggcaggaaatacgctgggaggcggcaccgttttcatcgacggcaagggcttccatttttccgcaggtacgacggcggccaattttgaaatcggcgcaacccacggtgcgatgcagaacggctcctccggcgccacatacactttttccggaaacctttccggttcgggtacgtgggccatggctgcgaacgttcggatgaacaatgtcctcacgggatccctcaaggacttctcggggaccctgtccaccaatgagacttccgccaacaacaatcgccaggcctggaacttcggttccggcggggtttgcgccacgggtgaagggaattccgtttttggagacggcgctattctgggaggtaacacgggttccacggataccgggctggccgcacaatacaacgtcaactacaacaatacggaactggtgttgaacgctctggtgcagggcaactccagcctgacgcacgcaggcacgggcactctgattctggatcaggccaataccgctacgggagcgctcggcattacaaatgccggagccgtagtccagcttggcacggaagacaaggccggccagtgggccggaaccgtgctgaatggagcgggaacgctgaaaatcgtcaatggcgcgctgacctccgccatgacgcgggcggaaggcgccacggcagccattgtcgtggactcagcctcttctgtcaatttgggggaaactgacggcagcatgctcaagggtattacgctggctgccggaggcaggcttgccaacgtttccggagatattacggtgggggcgggagccacggaaacattgaatcttaccttgggggcggataacatcaaccaggatgcggccggggcggccatcattgaccagggagacggcaggcttgtcatcaacaatcccgccacagtcaatctggacattgacgctattgtgaacacgctcgtcgcccataaggaagccggtgcggaaagctggctcaccctgacgaccggaacgctggaatgcgaaaaccttggcgatatccagttcagcaagattctttccaattacggcatccgcgtgacgggcaccgatggaggaagcctggtgctcagcgggcaggtcagcgggctttatatggtggatgattcctctacttccgatcctgataccgtcaccaactacggcacgctggggatgtactccggcgtggtgatttcccaggacaagacgcttaccgttcagttggccggcgcacccggcgattccgacggggacggcgcggtcatcaacaacctgctgggcgctacgggaagcacgctgaaagtggaaaacaccaatgcggacggaggcaacgctgttgtcatcctcaacaacgaacgtctggaaacgggattgcctgctcctgatgattacgccggtgcggattccatcatgggcggaagcattgtcggggaaaacggagtcaccttcgtcaagcaaaacacgggcaagctgacagtcaacggttcttttgtgacggacaccctgcgtgtggaaggcggttccctcgctcttaacggtgaagggaacagctttaatcatgtggaacttgccggcgcagaggaagggagtgttctggacatcaaccggaataccgtcatgggtgatttgacggacagcggcgaaggcgcagccctgaacatcggcagcggagcctccctttccgtcaacggcgccagcaatctttcctccagcaccatccagggcagcggaacgctgaccctccgtgatacgctggaaatttccggaacagcctcccttcagggcggtgttcttcttgatctggcaaaagatgacgattccacgggaacgctcgacctcggttcgacatccggcagcaccgtttccggaatcggcggagagggaacactgaagagcgcaggaggcgttttgaccgtcaataccggtaattcgggcggcggttccgttttcagcggtacgctggagggacgcgggcagcttaatatttccggtaatgccgggcagacgtttgaaaacgtcatgactgctgccggcagcagctgggcagttaacagcacgggccttctcaatatccggatgggagggacggtagacaacccgagagccaatacggcgctgaccttcagcagcttgacgctgggagacggttccagtacgaaccttaccttcaacacggactacgctggccccattatcagcgtgaccggaaatatcagcatcagccagggcgcggaaataactctcagttctactggcgggaatgaactgactctggacgcagacggcagttatacgctcatgcacgcggatggcaccattgatctgggaggaagcgacaggctggctatcctgctggatccctcctcctccgctttcaagaaatttgaaaatgatgcgtacctggtgatggaaaacggcaaccttgttctgatggccacggcttccaaggacaataaatatgcccgccttgcggatacgtttaattccagggccggagcagaacttctctggaacctgcccggcgatcttgctgcggattccatcctcaagaaggtggatgacgccgtaggagccctgacgtcttccaacccctcggaagcgaaacgcaccatggcagcagtggctgggagcacggtcaacgcgctggggacggcgcagagggacgccctgcgcgaccagatgggctggatcaggaaccggaccaccctcatgggcgtcaacccggcctacgtcaacgacgacctcccccgctttcacatgtggatggaaggcacgggctcctacgccaagctcgacacccgcggggatgaaagcggctaccagctcaccacctggggaggtactgtgggcgtggacgcggacctcagcgaccgcctcacggtgggagcggccttcacggccaactacggcgacctgacggccagcgcggcggacagcgccgacgggcacctggacagctactacgccagcctcttcggccgttaccaggacaggcgctgggcgcacacgctcatcctgacgggagggtggaacgacgcgaaactcaaccgtacggtcaactacggggaaggaagctacgggacgcagggaagcaccagcgggtggggctttggagcgatgtatgaactcacctacgacgtgtacctcaacgaaaaccgcagcagcgtgctgcagccgctgttcaacgcctcggtggtgacgacgcggatggacggctatgaggaaacgggtgcgggcaacgcgggcctgaacgtcggcaggcaggactggacgacggggacgctggcgctgggcggccggtggatggggctggtgggcagcaacatcttcggacgagaagcgctggcggaaatccgagtaaacgcggcgcaggacctgggagaccggagaggggaaacgaacgtctctctgctgggcaaccccggctttgcgcaaagcgtgaggggagcgaaagtgggaacgacggcgctgcagctgggagccggactgagcgtgccggtgggaacgaagggaaccatctacgtgaacgggaacgcggacatccgtgacgggtccagcgcgctgaacggaagcatcggctaccgctacgacttctaacaagaaagaaaacacaaggagggggcccccaaccccgaaaggccttcctcctaaccctccagagccgctccggaattattccggagcggctctgttgcctgaggaaaacccctgggggcggcccgaatgggccaaaaacaaaacagcggcaagaaaaaaaatacgccgtccccacggaagccatggccctttttcccctcgtcccctcccgtgaaacgcctcatcctctcctcaaatctgtaaaaacgcgccaaatgtttccggaagccctctccgctgtccggagccggaaaagaacggaacgcgagcaatagggccttttttatgcgatttcagcggaattttgcaaggctaggccctacgcgcgcgcacgcgttttataatattagtcttgcaaaaaattaagataagcgtagtatatttcggttatgtccgaagataccaacgaggttgttgaaaccaccgtttccacgacggcgcagcatgaatacggcgccgcgcagattgacaaactggaaggcctggaggccgtgcggaagcggcccggcatgtacatcggggaccctgacgaacgaggcttgcaccattgcgtatttgaagtgctcgacaactctattgacgagcatctggccggctattgcagcaagattgacattgtcattcatgtggacggttccatttccatcgtagataacgggcgcggtattccggtggatatccacccgaagttcggcattcccgctgtggagctggttctgaccaacctgcacgcgggcggcaaattcggtcagggtgcgtacaagtactccggcggcctgcacggtgtgggcgccaaatgcgtgaatgccctgtccgactggttcaaggcggaagtgcgccgggacggcaagcgctatcagatcaaatttgagcgaggcaagacggtggaacccctccgcactgtaggttcctgtgcctgtgaagtcacgggaaccacgatcacgtttttcccggatgccaccattttcacggataccacggagttcaagtttgaccgcctgacgacgcgcctgcgggaactggctttcctgaatcccggcctggtcattgaactgattgacgagcgtgaagctccggcgcgccgggaaacgttcttctataaggacggcattgtggagttcgtacgtcagctgggcacgaacaaggaagtgatcaacgaggaccccatttccatttccggcgtccggaaggtggaagtggagtacgacggcaagaagatggaggacgatgttctggtggacgttgtgttccagtacaacaacacgtatgaaacgaacatcctttgctttgccaactccatttacaatggggacgggggaacgcacctttccgggttccgcggcgccctgacgcgcgtcatcaacggttacgcaaaggccaacggcctgttgaaggaaaaagatccctccctgagcggcgaagatgttcgtgaaggcctggtggcggttatttccgtcaagatgcccaacccgcgtttctcatcccagacgaaggacaagctggtgaatacggagattgaaggcgtggtgggcaatgtcgtgtacgaggaaatcaagacgtactttgaagaaaacccggcgatggccaagaagatcatcgagaagagcatcacggccgctcgtgcccgggaagccgcccgcaaggcgcgtgaaacagtccgcaagagcgccctctccatcggcggcctccccggcaaactggcggattgttccgaccgggatccagcgaagtgcgagctgttcattgtggaaggtgactccgctggcggttccgccaagatggggcgcgaccgccgcacgcaggctatcctgcccctgagagggaaagtgctgaacgtggaaaaggcccgcctggacaaagccctggggagcaaggaaatccagaacatgattacggccatcggcgccggaatcggggaaggggatgatgaagcctccttcaagctggaccgcgtgcgctaccacaaaatcatcatcatgactgatgccgacgtggacggtgcccacatccgcaccctccttctcactttcttctgccgccacatgccgcagctggtgcgcgccgggtatctgtacatcgcccaggcgcccctgtaccgcatcatccgcaggaaaaaggaagagtacgtgcaggatgacgtggccctgaaccgcaaactgattgaactggccgttaatgacgtgaccctgcgtttcgcagacggctcccgttccttctctcccgaagaactctccgccattctggaaacgctggtcaacctccagcgctatacggaatccatgcaggcgcagggcggttccctggaagacctgctcagccatcgggaggccaacggggaattcccggaattcctggtgaaggtgcgctgcggcaatgaagaggaaatactcttcttccatgacatggaggccctgaccgccttttctgaggaaaacagggaccttttcatcttcggcacgccctcggaagaggagctgctggaaaatccgcttccggaacgggaggggcccagccgccgctccatcactcatgaactgcatgaagccaaagccatcacgcgggccctggcccggctggcggaactgggcattccggggaatatgattgtctccatggatacgcccctgtttgaactggtggagggtgaaggggataaggaaaaagtaactcccctgttctccgtcatggacattctggaatccgtcatctccatcggcaagcgcggggtggaaatcacgcgattcaaagggttgggtgaaatggatgccaaggacttgttcaagacgacgatggacccggaacggcgcgagctgctccgcgtcatcctgaacgatgacaacgccgtcagggccgatgaaatgttcaccatcctgatgggggatgtggtggaaccccgcaagaattacatcgtggaccatgccctcaatgtccgcaaccttgacatttaacccccgcactctctttcagcaccatggaaaataatagaatcaaaccggtggatgtagccagtgagctctccacttctttcctggactactccatgtccgtcatcatctcccgcgccctgccggacgtgagagacggcctcaaaccttcccagcggcgcatcctgtacgccatgaaggaactcaatctgtcccctgggggcaagacccgcaaatgctccaaaatcgtgggcgacacgatgggtaactaccaccctcacggggatgccgccatttacggcaccctggtgaacatggcgcaggactggtccatgcgggatattctcgtgatcggccagggcaacttcggcacgccggacggagacccccccgccgccgcccgatacacggaagccaagctctccggcatgggcgtggccctgatggcggatttggacaaggacaccgtggattttgttcccacatacgacaatgaacacacggaacccaccgtgttcccctccgctttcccaaaccttctggtgaacggcggcacggggattgccgtggggatggccaccaacatgcctccgcacaacctgggggaagtggtggacggtatctgcgccgtgattgacaatccccacatgactgtggaagagctgcgccagtacatcaaggggccggattttcccaccgggggcgacgtgctgggcttttcaggcattgacaactacttccgcaccgggcgcggctccgtgcgcatccgcggcaagatagacatggaagtaacggattccggcaaggatcttctcatcatccgggaagtgccgtatggcgtgaaccgcgccgcccttcaggaacgcattgcggaactgtacaaggataaaatcctgacggatatttccggcatccgtgacctttccgatgagaaaacctgcattgaaatcgagctgaagcgggatgcccgcccgcaggtggtcatgaaccagctttacaagctcacctccatggaaacttcctttgcggtgaatatgctggcgattcatgacaaccgccccaagacgctcgccatgatggacgccatcaacttctatatcgagcaccgccgcgaggtggtcgtgcgccgcacgcgctatctgctgggggatgcggagaaggatgccgagcgcctggaagccttcctgctggccctgcaccacatggatgacttcatttccattatccgggattccaaaaaccgggatgaagcccgtgaacgcctgcagaattacaccttctccacgcagacggcggaaagcctgggcatcctgatccgttcccaggcctccatccagggggaccgctacgtcttcacggaacgccaggtgaactccatcctggacctgcgcctgtaccagttgaccgccttggaaaacgacaagatttccggggaatacgcggaactgctgatccgcatcaaggactacctggatattctggcgaacgaatcccgcgtgctgggcattgtaaaggacgaactgaaggcgattaaggacaagtacgccacgccgcgcgtcacgcgcatcattcccttctccggggatatggccattgaggatctcatcccgaatgacacgatgatcgtcaccatcacgcacagcggctacatcaagcgcaccaactccgcggaataccgcgtgcaggcgcgcgggggcaagggcgtgaaggctgccactaccaggggagccaaaaaggatgcggaagcggactttatcgaacacctgttcgccgcccagaaccacgactacctgatgttctttacgaacaccgggcgcgtgtacgtggaccgcgtgtatgagattgacgaagcggcgcgcagcgcgcagggccgcaatatcaagaacctgctggatctccagccggaagaagccatcgctgccatcctgcgcctggaacgccgggtggatgaaaaaggcaatgacattacctttgcggaaggcagcggcaatgttgttttcgccacgaaggacggcacggtgaagaaaaccagcctgaacgatttcgccaactaccgcaaggccggcatcattgccattaatctggaggaaggcaacagtctggtgaatgcggaacttaccagcggggccgatgaaatcgtgctcgtcacgcatgacggcatgagcatccgcttcccggaagaagatctgcgtacgcagggccgcaacaccatcggtgttcgcggcatccgcccgcgggcgggggactacgttgtggccctggccattgtggacccgcagaaaaccctgctggtggcttctgaaaacggcctcggcaagcgcacttcctttgatgaataccgcacgcagggccgcggcggcaccggcatcaagaccatgaactgcacggataagaccggcaaggtggtttccgccacggtcgtgtccgatgaggacgagctgatgctgatgaccacggccggacaatccgtccgcatcaaggtggcgactgtgcgtgaaacgggccgcgccacccagggcgtgaagctcatgacgctgaatgagggcgaatccatccaagacatttccatcgtcattcccgatgatgaagatgaagaagccccggcggaaacggaagacgcaggagccggggaagtgtccggtgaaatggaagctccggcggaagaataacatccaggttttcctgctccggcgccatgccggagcagggggcttcatgggccgtttttatggaagaccccctttcattggagcaatgtgccggacgtctggaacggcgtggattccggagttttgtagtgccgggcctgagggaggctgcggaggtgatgcgcggcctggtgcgggagttcaggccgtcgtccgcttcctatggggattccatgaccctgaaggctgcgggcattcttgatgacctgcgctccaatccggacattcagttctatgacggctttgttccgggcatggtgcgggaggagaaatgggaaatccgccgccagggcatgacggcggacctgtttttaaccggcgtcaatgccgtcagcatggaagggaccctgcactgggtggacatggtgggcaaccgtgtggctccggtggcattcggaccccggcgtgtcattttgctggccggttccaacaagctggtggccacgccggcagaggcccgggaacgcatccgccgcattgcgcccctgaacgccaggcggcatgaagggttcaggactccctgcatgcacaccggaatctgcgcggattgcaattccccggaccgcctgtgcaacatccacatgtcccttgttaaatgctttcccaaaggaagaatttccgtcattttgacggaagaacccggaggactttgactcatgccttttcaaaaccggatagaaatcatggccccggcggggtcgtttgaatccctggcggccgccttgcagggcggagcggactccgtgtacttcggagtaggaaagctgaacatgcgttcccgcgccacggtcaatttttcggaagaagatttgccggaaatcgtcgcgcgctgccatgaggcgggcgccaaagcctatctgacgctgaatatcatcgtgtacgatgaagagctggaagaggtgcatgccctgtgctccgctgcccggaaggctggtgtggatgccgtcatcgcttccgacctggcggtgatttcttatgcgcgttccattgggctggaagtccatatgtccgtgcaggccaacgtctgcaacatggcctccgtcaaattttacgcgcagtacgcggatgtggtggtgctggcccgggaactcaccttggcgcaaatcaggcatatcattgaatccatccggaaggagggcgtgaaaggcccctccggtgagctgctgcgggtggaaattttcgcccacggggcgttatgcgtggccgtgtccggcaaatgccacatgagcctggcggcctacaactcctccgccaaccggggggcctgtttccagaactgccgccgcgcctaccgcgtgacggatgaggaaacgggcaatgagctggtgatagacaataaatacgtgatgtctcccagggacctgtgcaccattccggtgctggaccagcttctggacgcgggcgtctccgtactgaagctggaagggcgcggccgttcctcggattacgtcaggacggtcacctccgtgtaccgggaagccgcgcgggcgtgccaggacggaaccttttcctcggacagggcggaagcgtggatgaaacggctggaatccgttttcaaccggggattctggcagggcgggtattacctgggcgtgaagtggggggaatggagcggttccgccaacagccgcgcagccctgttgaagatccacattgccagagtagaaaacttttataagaagaacggggtggctgccctgttcctggaagccggcggcttgtccgtggggcaaaccatccttatagcaggccccactacgggagccgtccgcatggaagtggccgccatgcgaagggagtcggcagagggaatggaatccgtagaagccgctcaaaagggagaaaccgtctatctggcggttcccgaacaggtgcgccgccgggacaaggtatatctgctgcgcccccggatgctggaggatgcctgaatgcccggctgacccttttctcttctgcctgccttttccaaaaaccgggaattgacgggcagaatgattttaatttttccgtttcctgcccggctgggccggctgggcgttcggtttcagccggggcctcttgaaattcacggcggatttccggtttggaagtccggcttaattaagctatccgttcattatctttcgtttgggataaaaatgttggaaagtgattttccaattgaatgaaaaagaatttctctggcgtattatttgaaaaccatacgccatgcctgcctatatttcctttctgcgccttttttcatgttcctgcgccttgctgggcgcaggaatgcttcacgcttccggtttacagccctggctgcgggagctgtccgtaattccgccagcgccttccgcggagggaagggattcatggatgcggcagctatggacgcggacggcggagtatgctgcttccctttccgagcctgctgccgctgacgattgcggggatgcgatggttttgctggttcccgtatttcaggcatggccggacgggaaggcagccggcgccgcgctggcggaaattctttccgttccggcagagagtattggagccgtttcttcctgggatgacctggttaagcatcaggaagccattcaggaacgagtccgtttcctcaggctgaagaagctggcggcctattacgattctgcggccatccgccgtgcggtgaagcgaaaccgggacaagtacggggaacggtacgccggtgcggaaggcttcctggcacggctggatgagtgggaaaaggagctggggcctctggaccggtgggtggagcaggccgggccgggacaggcggccctgctgcgggagatggtggatctgcggagaaaagccctgattgaagccctgccggaacagaacggcctgaaggcatgggtaagcgtgcggcggttcaatccgtccgggaaaagttctttcaatcatgaccgtccggcgaactggcagggtatttccagcatgccggggcccgggcgcagataccgcagcggcattgtgaaatttaacggggtttcctcttcttcccctgtggagcagttgctggcggacgaccgctgggtcgggcatctggatgttgatttttccggggagaagctcatgttcaccgggaatggattcggcaagaaggaaaacaggccatgggacgtgtttgagctggacttgaaaaccgggaaaaaggaatcccttaccgcgcatatgccggcggatacggacagctataattcctgctacctgccggacggccggattattttcgtcaatacttccggcatgcagggtgtgccctgcgtggccggggtggattacgtgggcaacctccacctttacgaccgggaaaagaaaacgacccgccggcttacctttgaccaggacaataactggttccccaccatgctgccggacggcagggtgatgttcctgcgctgggagtacacggaaagcgcccactatttcagccgtgtgctgatgcacatgaatccggacggcagcgaccagaaggaatactatggttccaactcctactggcccaacagcttgttcaacgcacggcccctccccggaaggccgggcatgtttgcgggcattgtcagcgggcaccatggagtcaagagactgggggaactggtcctctttgacgtgaacagggggcgcaccgccacggagggtgccgttcagaagattccggggtatggaaagcccgtggaaaacgtgaccaaagatcagctggtgcagggattgaagactccttatttcgcagaaccttatcctttgagtgacgagtgtttcctggccgtttcttccccctccggcaaccagggcgtgaccaatgtggtctggtgcgacgtatacgataacattgtccctctcacggcctcatcctatttcgtttatgcagaccccgcgcccctggggccacgccaaaaaccgcctgttctgcatgaccgggtgaagacggaaagcaagacggcaactgtttatatttccgacgtgtaccggggccgcgccatggccggagtgcccaggggggaagccaaggccctgcgcgtgttcatgtccgagtacagcccccgcaatacgggaagccactatgccatgggcatggaaagcaattgggatttgaaagtgctgtacggcaccgtgcccgtgaatcctgacggatccgccatcttcacggccccctcctgccagcctctgacgctccaggtgctggacggggaggggcgcgcgctggcgctgatgcggagctggtttaccgccatgccgggggaaacgctcagctgcataggctgccatgaacggcagaactgcgcgccgcccgccagggcggtcatggcatcccgccagaaacccgcccctatcgtcccgtggtacggcccggcgcgcactttctccttcatgaatgaagtgcagcccgtgctggaccgccattgcatacgctgccacacagcggaaagcaaggcccgtgaaggagtgccggatttcatgacattggaggccgtcaagggggctcccgcccccggttccgtctcttattggaacctgcacccctatgtgcgccgcaacggcccggagggaaactatctggggctggcccccacggagtttttcgcggatacgtcggagctttaccagctccttaaaaaaggccaccatggcgtggaaatgccgcaggaggactggaaccgcctggttacgtggatggacatgaacgccccttatctgggcgaatggccgggagagcgcaatgaagggctgctgaaacgccgttatgacctgcacggcagattttcaggagcggaacgtaactacgtgacgatgaaggattccctgttccggagaagcgccggcggttccatccctgacgccgggaagcccattgccggcgccggaggaaagagcgttcccgttccggaagcgcgtaatgaaacgctgactgtggatttggggaacggcgtgaacatgacattccgccgtattcccgcagggaagttcaggatgggaaatgaacgggaaacaccggcggaacgtcctgtttccacggtggggattaaaaggccgttctggatgggtgaggcggaagtgacgctggagcaataccgccgctttgacccggagtatgctaacggatggtatgacatgcattacaaggaccaggtgaggcccggatacgacatggatgccgatccgcgttttcccgtcatccgggtgccttgggccagggccatggaattttgccgctggctttccgggaaaaccggaaaaaaagtgaccttgcctacggaagcgcagtgggaatacgcggccagggggggagctgatacggatttcttcttcggggagcgggatgcggatttttccgcgtatgccaacctgggggacgtgacgctgaaggaactggccgtttccggcgtggatcccaggccgattaaaaatcccaaccgtttctgggacttcgtgccgagggatgaaacatacaatgacggaaaactccatctggcccccgtcaagagttacaggccgaatgcctacggattgtacgacatgatcggcaatgccgcggaatggacccgttccgaatacaggccctatccctggaaggaaggggacgggcgcaatgaaggcctggactcccgtgttccccgtgcggtgcgcggcggttcctggtatgaccgtcccagacgggccacctcctcctggcgctggggatatcccggctggcgtccggtgtataacgtggggttccgggtaatcatagaagactgattgttgaaattgccatgaaactgacaaaaatgctccgcgtctctgcgactgcccttggctgcctgctggccctcatttcatgcaggcaggagccggatgctgcttccggccctctggctccggtggatgtgaaggtcgtcaatcacctggttgccgtgctggggcatgagagatgcgtgctggaactggtggaccctgcttccggggaaaaggtgaaaagcatccggctggcccagcctcccaacggcatggccgtggatggagcaacggcctatgtggcggaaggcggcccgcgcggagcagtagaagtagtggacctggaaagcggggaattgaaatgttcctttccggccgggcatacgcccatgtctcccgtggtgcgggaggaaaagctgtatgtagcctgccggtttgactcccgcgtgctggaaatggacgccgctaccggaaccgtgctggattcctggaatgtcccccgtgaacccgtggctctggccgtttctccggacggcaggaaaatctgggctgccggccatttgccggccggggctgcggacggggatttcacggctgccgcgctgactctggtggaagatggaaaagcggtccatttcccgctttccaacgggacgcagggagtgcgcggaatggcgataagcccggatggccgctatctggccgtggcgcatgtattgagccggtaccaggtgcccaccacgcagctggaccgcggctggatgaatacgaatgccgtgacggttatcgatacggacgagccggacaagcctcatcccgttctgctggatgacccggatgcgggggcggccaatccgtggggcgtttctttttccgaagatggcggaaaactgttcgtgacgcatgcggggacgcatgaactctccgtaattgatttcccggccctgctggagcgcatgaagcgggaaggccggggcaatgagccggtttccgaaaggcttggtttcctgcacggtctccgcacccggatcgctctgcccttgaacggcccgcgctccgtggcctccgatgggaaaaacgtttatgtggccggatacttttctgattctctggcagaaatctccctgaaggatgcctgcaaatccagggcaattcccctgaacggccaattccggccttcccgggaaaaactgggggaacggtattttaatgatgcttcccattgcttccaggggtggcagagctgcgccacctgccacccggacggccgggtggacggcctgaactgggatctgctgaatgacggcatgggcaacccgaaaaatacgcgcaccatgttcctttcccaccggacgagcccggtgatgacgctgggcgtccgcgcctctgcggaagtggccgtgacggcaggctttgtgcatatccagtttctggaacctttcggtgaattggcggaatgcgtgaatgcgtacctgaaaaacatgaaggaagttcccagcccgttcctggtggcgcataccccttccaaacagcagacagggggggaggggtgcgcccagtgccatgctcccggcgtggaaaggggcgccttgtccgaatccgcccggaggggcagggaagtgtttaaaacagccgggtgcgtgcggtgccacccccatccctacttcactaacaaggaactggtggccacggggacggccacggggctggatgaaggtaaaagcgttctggtgccctccctggtggaagtgtggcggaccgctccttacctgcacgacggccgtgcgaagacgatccgggaagccatcacgacatgcaatccgggggatatccgagggaagacgagttccctgaataaccgtgaactggaggatttgatcaattacgtgcagtccctgtaaaggggcgggagggcatgatgacggcgaatgcacctgaacaactggaatggtccggcaaaaacggggcggaagaacgcttcttctgcatgacggcggagccgggcgcaagttttgaggaagaactgcattccctgatggccaggtaccgcaatctggggggaggggaggaagatgaattcctgctgcgtttccatgtcagcgacccggtgcgccagtcggctgcgctgcggcggatgataggggagaggaactcctatgtttccatggttggccagccccctgcgaacggggcccgcgtggctctggaagcctggcacatcggcgaaatgttgggaaaaaggcatatggcggaacagggcggaacggtcgtggaagccatccgggcgcattaccggctgttcctggcgggcaagagggaattctcctccccggacagctgcggccagatgcgggaggaattccgctggctggaccggattgccgccttacaggggggagccgtgccggatttgattcaccgcacctggatttattgccgggacattgacaacaactaccggggattggtggaaggccgcaacggatgctttgaccgttacgggctgactccggagagccatttcatcgccagtaccggcattgaaggatgtacggagctgccgggccgcctgctgcatatggacagtctgggcatcgcggggctggagcccgggcaggtccggtacatggaagcgccggactacctgtcccccacgcatgtgtaccgggtggcctttgagcgcggcgtccgtattgtgtacggggaccgctcccattatttcctttccggcaccgccagtattgacgcggagggaaacattgtccatccgggggacgtggtgggccagacggcccgcaccctggaaaatatgagagtcctgatggaaaggagcgggggaagcctgtccgacctgaagcaggccgtagtgtacctgcgcgactgggcggaccgggaaacggtccggaaccggctgatggactctccgctggccgctgtgccgcatgtgatgctgaaagcccctgtctgccgccccggctggctggtggaaatagacggaatagccgttaatggagccggagagtccgcctttgcccccttgtaaatcctgccgttcccggaaccgcggcgcacgggcgatttcccttgttatcccgtgcacggaaatggtatcatgaaagcgcatgacttatcgccttaatacggaccgtctggtatttttttccgtgctgttgtgggtgctgttgccgccgggtgtttttgcctgggaagggaatcctccgggtccggataatgtgcggtggctggagcagttctgttccagctacatgcagtttctgaccctgggcggcgtgttgtgcgcggttattggttttgtgtgcgccgccctggtctggctggtgcatcgtctggactgggcgcggagcttgaaaatcagcgtgctgtttgtcatgtccatcctgtgcctggttttgtatggcggctcgctttcctttgccgtgttttatcttcccctggccctgattaaccccgccgtgtattgtttcagcgtcggccgggcggaatgagcgtgcgggcaggaatggttttatctttcttttccgtggcggatgtccgtggcttccttcaggaagacgacggtggcggcgatggttttggcaatgtctcctatccgttccagagaacggataatgaagagaaggttgacgttgagggaaggggagtcctcccgttcgggggagaccagaagggccagcgctttgcgatgggctttgtccagttttttgtcgcgcaggcgtatttccctggcggcgtccacatcctgcgtttccagacacctggcggcgtctctgaattcggatacggccatttccagcagagggagcacaatatccggggagagggattcctgatgcctgatggaggccttggcatgcttggcgatacccgttacttcctccatgcattcctggagcttgtccccgcatcgggagaaggtgatgacgagcctcaggtcgcgtcccagcggatggaactgggtgagtacggaggagcagagggagagaacctgccgggtttcttcctgcagcgggtcgctgtccgcaatgatgctgttggccccgtcgctgtccgggccggaaatgacccgttccagaatgtccatgtatttcagcaggctgccgcagatggcattgacgcggaggcggatagcgttcagggccgcgtcgtagtgggggaggatgtgattgccgggggatgtcatgaggagaatggtttggaatgggcttttagctgaaacggcccgtaatgtaggcttccgtttctttttccgtaggattggtgaagatttgggacgtttccccgtattccaccaggcggcccatgtacatgaaggcggtccgattcgcgatgcgtgtggcctgctgcatgttatgggtgacgatgacaatggtgagttcttttttcaggtcttccatcaggtcctctatttttaaggtggcgatagggtccagggcggcgcagggttcatccatcagcaggatttgggggcggttggcaatggcgcgcgcgatgcacagccgctgctgctggccgccggaaaggccgtaggcgctttcatgcagcttgtctttcacttcatcccacagggcggctcccttcaggcttcgttccacggtttcgtccagttccgcgcacctgttgcggccggccacacggaggggaaagacgatgttttcataaatgcttttagggaaaggattgtatttctggaagaccatgcctacgcgcttgcgcagggagatgacttccacgcgcgggtcatacaggctggtgccgtcaatgcggatatccccctggtggcgcacgtccgggaccaggtcgttcatgcggttgatgttgcggagcagcgtggattttccgcagccggagggcccgatgagggcggttacccggttggtttcaaaggtcatgccgatgttgaagagaacctgtttgctcccgtaaaagaaggagaagtcttccacttcaatgatgggctcgtcgtctgcggcggctggttcagtcatgggatggtgaaggagaatggggttagaagctggaggccgcgtattttttgcgcaggcggttgcggatgaggatggccgtgaggttcatgaccaccaccagcaggatgaggagcagcgtggtggcgaaaaccatgggctgggcggcgtccgagtccggagactggaagcccacgtcgtagatatgaaagcccagatgcatgaatttgcgttccaggtggatgaaggggccttccccgtcaatgggcagggagggggccagcttgaccactcccgtgaccatgagtggggctacctctccggcgccacgggccatggccagaatgaggccggtcatgacgcccggcagggcgctggggaggatgatgcgtttaatcatctgccatttggaggccccgcaggccagggcagcctcccgcagcccgcgggggacggcggagagtgcctcctccgtggagacgatgactacgggcagcgtcatcagggccagcgtgagggatgcccacaggatgccggaggtcccgaaggtgggggtgttgtccacagccagctttttccagtagaaaagttcgtcgatgctccctcccagatagtaaacgaagaagccgaggccgaaaacgccgaagacgatggaaggcacgcccgccaggttgttcacgcagatgcgcacgacctgaaccagagtcccctgtctggcgtattccctcaggtagatggctccgatgacccccacgggcgtgaccagcacactcatgagcaaagtcatgatgaaggtgccgaaaatggcggggaagatgccgccctccgtgttggcctcccgtggatcatccgtgatgaaatggtacaggttgtggaggaagacgccgcattttccgaagaatcccaggtcattcggctggtagccgtaaacgattttatccatgcggatttctttcttttccccgtctcccagggcatacacaagagagtctcggccctgttgagccctcagtttggctgcttccgcggtgtatcgggcgtattcggtattgagctgttcctctttggcgcggagccggtccagttcaccggccgggtcgtccatatccgtgagaatggggtttttcctggggacggccgtacgctgtccgttttcttcccggatgtcgtaggaacgttctatggccttgatatccagtctgacgtccgccagacgggtattgacggagccgatgtccctggtgtcaatggttttgaccctgtccctcaggtctgtttcccgatccagcacgcggcggaaagcctccatgaattccggtgaggcggcggggatggtttctccggaggccagcttgagttccaaaggtttgaccagggcgttccctccctccatgcgttccaggcacagaaggcctttgggggtggcggaggcagtgacattgtgcgcatccacatagcggtaggattgtccataggattccttgctgccggtgaaaagctggtattcccgcacgtctctggctgtggagccgggatgggcggggtctgcggggacgtggcgcgtctggtcctttgtgatgccggcgtacaggacaagcggttgttcttcttttgaagaaggggcgagcgtcagttcatggatagttttgggccagaaggcctccagaccgttgaagacgatgatgcccagcaggccgaaaatcatgatgaggcccagggagagcccgatggaggcgagccagatattgacttcccccagggggcgtttgggggcgggcggaaggctgaagtcctgtttcatggaaggtggatggatgggagggaaagggatggatggttcacacgacgttgaagcgtttgcggagacgctggcgcactatttccgccagagtgttcagaatgaatgtcatggagaagaggataaggccgcccaggaagaggacccggtagtgggtggagtcctgcgccgcctccggcagttccgtggcgatgttggcggagagggtgcgcatgccgttgaagatattccagtccatgatgggggtgtttcccgtggccatcagtacgatcatggtttcccccacggctcggcccagacctatcatcagggcggagaaaatgcctgcggaagccaccggaagaacaacggtgcggaccatctgccagcggctggcccccagagcctccgaggcggcgatgagggaaggggggacgttgctcagggcgtcctcggaaatggtgaagatgacagggatgacggcaaagcccatgatgaatccaaccaccagggagttgcgctgttcatagggcatgccgaagccgttgcgccacaggtctgcgaaactggcggcctggaagtccccgtctccccacaggcccatgacgctgcggcagaggctgatgaggggctgttccagccagtagcccaggtattcccagcagaaccaggcgcagagcaggatgacgggggtcatgacgatgtattccacaccgcggctgaatttgttgcgccaggctgcgggccgggtgatccagaaccatgcgatgagggccgccaggccgggaatgaggacggccatgcagagcagtgcggggactttgtcttccattctgggggccaggtaaagggcgccgaagaagcccagtactacggaaggaagggaggccatgatttccatgacgggttttaccacccgtttgacggcaggggccatgaagtgggccgtgtaaatggcggccgtgaccgctaccgggacggcgaagacaagggcgtacagggtgcctttcagcgtgccgaagaccaggggcatcagggacagcttggattcataatcatccgtgccgcccacggattgccagagccatttgggagaatcgtacccctcataccatattttcccgaccagggctttggcgccggcttccgggtgcttgtcttccagagagaagaaatggatgtttcctgatgggtccacggcaatggcggcgttgaattccgcattggcggccagttgaaccggaacgaattccagaggtccgctgttccagcggatgtcggccgtggttccgtagcagagcctgagttcccgcggagtggagaccaggaaggaacggttgatgccggatgccgcgtaatactgcaccggaccgtccatgggagagaattgcctggtctggccgaagaggcgcagggaagtgccgtccgggcgggaatggggataaaggctgaaaatcttaaggcttcccctgtcgcctcctatgaccagggacatgtctccgaaaagccagttgacggaagtcattttttcccctttccccagcggggtcggaatcatctggcgtctgacccatgtttccccgtcttcatcataggagaagtaaagaagtttgtccgcgtccgtagcgatgacgaggctgtctccggaggctccgggcagcatggccgtggggcggccttccagctggtccgtcaggtcatggaatccggaaggcgccagttctccctcatgaagcagggagtgggattcttccagcgtcatcagcaggaggcgcgtgccctgttccgtctccacggttgcggtaaatattttccgttctcccgcgtccgcataggctatgccggatattttgccggggacggagccgttttccgtcagggggtagagagggccggcctccgctccggctttgtccgggccgtgggcattcgtccggccgtggacgttgagtccggaatgaacatggatgaggcccaccttgccggattccgtggcgatggggtaggcggtaagggatgcgtcataggaatgggcgcagacggtttcgccgtccggcagggaaacgggaacggaggacaggttcccggtagttttgtccaggaagaagatgtttttcccgttgccgtagacaaagggaagcgtgccggaagggtccaggccccaggttcccggaaccggagaggagggcgtggggtgctgccgttcttccacgtccgcgctctggaagagaggaatcgtaacggccagcaggaagaaaagaatgccgaaaacggctacaatgacggtgaatcctccgccgatgatggttttggtcatgatgcggtcaaaccacagcgtggtttttgccacctgaaagcgttccggaacgggtttgggctttctggaaggtgcgggggagggagcattggaactcatgacggcagagaggagaagttggagggcaggactccggcgggcgggccggagtcctgccccggcatgtgtttacggcacgggaagggagtgtttattcaatgctcttgagcacttctgagctgactttggcgggaatcgggtaataaccgtccttggtcacgatttcctggccgtctttggatacgatgaatttgatgaattccctggtcagggtgtccagggggtctcccggtttcttgttgacgtaaatcagcaggtaacgggagagcgggtatgttccgttgatgcagttatcgtaggaaggctgtaccgccgcctttccgcttttttccgccagggagagggtttttacgccggaggtgacgtatccgatgccggaatagccgattccctgttcgtcggaactgatgccctgcacgacggcggaggaaccgggctgttccttcacggagtttttatagtccccttttttcagggctatttccttcacgaacccattcgtgccggaggcgctgtttctgccgtaaatggagatggcttttcctttcatggagggcactcccgcatcgccccagtcggtgatgttggagccgccgcgcttgaaagtggaggagaaaatggagtcgatctgcgccagggtaagggcctggatgggattgttcttgttgacaaagaaggccacggcgtccagggccactttgatctccgtcggcttgtagccgtatttggcttcaaaggcggcgatttcctcccgcttcatctggcggctcatgggggcgagctgggccgtgcctgccgtgagggcgggcggcgctgtagaagagcctttgccttcaacgccgactttgacgctggggtattttttgctgaatccttccgcccagagggtcatcaggttgttcagcgtatcggagccgacggcgttcaggttgccggaaacgccgctggtgggcgcatacggcttgatgctgctgtcaacggtcacttggttggagcccatgctcagggagctgagggcggcggcgatggtcaggattttggcgacaaatttcatggcgtcttttttggtgtgttgcgtcttccgtttccgtccggcggggccgttcatggcggaagacggggtagtgataccctcccgcccccatggtgaggaagagaatcctggttaagaaatcgtcacaaacccggagtagccagggagccctgtttttgggataccatgcgtccagaggcgcaggacgcgccattagaagaacatgactccgcatccagcagcagccgaccagaccgccgtagaggtggattccctggatttttgttatgggagcaagcaatccctgttcaacgtcaccatgaaagtccccaggaacagggtgacggcgttcatcggcccttccgggtgcgggaagtccacgctgctgcgctgtatcaaccggatgaatgaccgtattccggaggcgcgcgttacgggaggctccatccgcattgatggggtggacgtgacttctccttccctggataccattcgtctgcgccgggaggtgggcatggttttccagaagtccaaccctttcccgatgagcatttatgagaatgtagcctacggattgaagctggcgggggtaagaaaccgcggcattctggacgaggctgtggaggaaagcctgcggcatgccgctctttgggatgaggtaaaggaccgtctccatgcttccgccaatggtctttccggcggccagcagcagcggctgtgcattgcccgttccattgccgtgaagccgcgcatcctgctgatggacgaaccctgttccgccctggaccccattgcgacggtgagggtggaagagctgatgcaccgtctcaaggacaagtttaccatcattgtggtcacccataatatgcaacaggctacgcgcgtttcggacctgaccggttttttcatgttgggcaggctggtggaatttgatgctacggaaaagattttttccaatccctccctgaaagaaacggaggattacattacgggaagattcagttaacagagagacgattatgctttttccaaagaatatttccaaaaatggagccgggcgtgttccccatgttcccggctctggacgaaggctggctgccagcgccgccagaaagaacagcctgcgcaggcagcatcttttttatcatgccggcaaaaccttatccaatcatcaagccaatattccgaatcatgaatcacgacgcgcacaccctgagggagtttgacgccgccctttcctccctgaatacgcatttgctccagatggcctataaggcgcagagcgcccttgatttggccgccgccggccttttgcagcagaatgagtcttccgccaaccgggttattgctgatgacgaagaattggacgaactggaaatgacggtggacagggaagggctgcatctgctggcttttttcagtccggtggcttccgacctcaaagtggtgctggcttccctgcgcatgtcctccatgtatgaacggattggtgatgaggccgtgaccatcgccaaaagggccaacaggctgaataagcgcccgcgcatccgggaggctgccttggcggatcctgtctatcgggaaatggcggagcggttcagggctgtgaataaggctgtttcctcctgggacggggaggctctggcggagcttgtccctgcgctggaggatttggcggagcatgcggcgtccctgacggaggcatttgcctgcttgcctgagcaatatcaggacaatctggtttccgttgcggatttggtttttgtaagccgttccctggaacgcatcgcggaagggctccaaaaggtagcggcggaagggctttacgcggcctcctgatgccgcgtgcctgcacaggaaagcccgcagcgggcgttgttgaagcgccgttttttgttcggaaacgggattcaggcatgccgcctatctgacagtccaggtaatgctgcgcgtggaggattggccgggacgcagaatgacgctggggaagtggggggtattgacggcattggggaagccctgggcttccagcgctattccctggcgcgcctggggcaggtattccccggtatatacctggaggccgggagcatccgtcgccacaatcaggcggtgccgggattccgggtcaagaaggatggcggcgattttgtcgccctgttcggaatccagcacgtagttgtggtccagtccggcggcggtgtccgggtgggcggcggagttgcgttcccccagcagggctgctttccgcaggtcaaagtccgttccttccacgggaagaatacggccgtcggggatattggtcgcgtccaccggagtataggcggaggcccgtacctccagggtcatggaatcaatggtgggtttgccggacaggttccagtaagcgtggttggtgaggttgacgattgtggctgcgtccgcatacgcttccaggcggagatgaagggtttcttccaccacggtgtaggtggctaccacttccaggttgccggggtaattttcctcaccgtctgcggagtgcagggtcagcaccagcgtattgcgcccggcttcctgcacctgccagactttgctgtcgaacccctggatgccgccgtgcaggtggttggggccgttgttgacggccacggtgcgggaatccccgtcaatggagaacctgccttttgcgatgcgattcgcgacacggccgcaaatcgcaccgcaataacaggtgtctttcagcatgtcttcaaagtgcttgggccctacgatcatgtccatgccgtccttgacgacggagatgatgcgccccccgtagttgctgatgcgtaccgtcagcttgtcggaagacagttcaaacaattctacaggtgcgccgccgggtaaggtgccgaagatcatgccggtatatagcttggtcagtagtggatgtccaattaataggccagcacgcgggaaccgttgttgccgatgatcacgcgcacgcgctgtccgacctgaatcgggttgttcctgctggcgacctggacgaccgtgtagttgcgggtgccgttcctcttctggtccagacgcacggtgatgcgttccccggtcgtgttgttgacggccttgtcaatctggttgccggcaatgccgcccagaatggcgccgcccgccgccgtcgcgaatttggcgttgccgcccccgaacatggcgccggtcaacccgcccgccacggcgccgattccggtgccggtgttggcgttattggcctggatcttgacgttttccacgctggtgaccgtgccggtataggtttcctgggctccgccgatttcgttcaggttataggtgttcggggaaccgaagttggtgcaggaagtaatggacagcgccatggctgcacagccgatggtaagaatggaagctgttttcatgatgacgatttataaaatgggttgaaggttaagatcaagtaatttcgcagtcaacggaaggggctcggttgccctcttccggcggagaaaacccttgccggaaggttccggcaagggttcttatttattttaacggtccgttgggtcaggccttgggggcttctccctttttggggcagtcgcagggcttttcccctttgctgcaaggctggccgcatttttctgggcatttgccttccttggcgcatttcctggggcactttttatcttttttgcagcacttctgggcagcgggggcgggggactccgccggagcggcggcttcctgagcgtaaccgttgacactgaaggcgaaagcaaaggctgctacagcgaggatttttttcatataatgatatgtgaggttgtgtggtgttggtaatgcagcggcagaagagctgccgttctacgacagatagagcggcagggagtgatatttgttcaaaaaaatgcgcggagaggattctttttagggcggtttttttgatgaggacgcgcttttggtctccggggtaagtttgacagtccgggggcacgtacggagcgccggcttgcatggggcgccttcttgaggcacggtagggaacatgagttcagccaaggaacctgtgacgcgccgttttggaaatggtttgacggttttgattaaggaggacaagtctcatcccgtagtgtccctccagtactgggtaggcacgggatccatgaatgaggggcactggcaggggagcggactttcccatttgctggagcatctggtgtttaagggaacggcgcatttttccgggcaggaactggcccgcaaggtgcaggaacgcggcggccactggaatgcgtacaccagcgtgaaccgcaccgtgtactatatagacggccctgcggagtcctggcagattttcctgaatcttttgacggagcttgtatttttccccacgttcccggaagacgagatggagcgggagaaagaggtcgtgcgccgggagatggccatgtatgcggatgatcccgattccgtggcctaccagcttctgatgcagacgctgtatctcaagcatccccgccgctggcccgttctgggtgagcgcgccgcctttgactgcctgacgcggcaggacgtgctggattaccatgccagccgttatgtcccgaacaacgtggttctttccatcgcgggggacgtggatgccgcggagattctttcccatctggaattgctggtggaagacctgaaatcccgtcccctgaaccgggaacccattccccatgaacctcaccagttcggttcccgcagggtgcggaaggagtttgccgtgccttactccaagctgcaccttgcctggcgcctgccctgttccgcccatccggatacgccagccctttccgcgctgtccagcattctgggaggcggacgttccgcccgtttttatgaaaagttccatgaccgcctgggcctggtgtacagcattgaggtgcattccaaccagtctgagacggatgaaggggcgtttaccatcagcatggacgtggaccgcgcccagcgcgacaaggtgcgggacctggtgcttcaggagcttcgcaatctggcggaagaggattttacggaggacctgaagagagtttgcaaacagacccgggtcagtcgcctgcgccgcaggagttccgcttccggggtggcctcggaaatgggggcggactggttcggctcgcgcaatttgaacctgtcttccgaatggcaggaagctattgaacgggtgactacggaagatttgcaccgcgtttgttccacctggctgtcttccccgaatgtgacggaagtcagcctggaccccccgggcagcaacgccggggatgaagaaagggcctccgcctctgcgggaacggccctgagcgagcatgttcttggcaacggcatgaaggtggtgatccgtgaagaccatcgcctgccgctggcctatgcctgcatggcgttcaaggccggatgccgtgcggagaatgagcatgacgccggggtgacggacctgatgtccgagtgcctgctgaaaggaacctccacccgttccgcggcggatatagcccgttttctggaggacatcgggggagccatcaacacgtccaccggtaacaattccctgagcgtgggatgtcaggttctggcggaagacctggacgccggattggagctgatggcggatgtggtcatgaatccgtctttcccggaagacgcctttctgagggaaaaggaatcttttgtggcggatgcggaggaggatatggaagaccctctttccgtggcgttccggcaggagcggaaggtggcttacgggcatgtttcctatggaaattccccttccggcacgccggaaagcctgtcttcactgacggttcaggacatcaaaaaacagtatgaacgcattatctgcgcttccaacgccgtgatttgcatttccggagatgtcaggaaggaggaggtcctgcctcttctggaaaaacatctgggaggcatgagggtgggaacgcctccggccctgactcccacgcccgcgctgcgggccggccgggaagtggccgttctggataaacagcaggccgtgctggtagtgggggtgccgggcgtagacgtggcttccccggagatggcccaggctctgctgttccagtcctggtgcagtgatatggccggtcccgttttcaccaatatccgggaggaggccggactggcctattatgccagttcttccctgttcatcggcatggatgccggaggcatctgcttctatctgggcacttccccggaacaattggaggaagccgggcggaggctggaaaaaacactggagatgattgatgaacagggcatgacggaggaggagctggaacgcaccagggcggccgccctgtcttcccgtctgctggccatgcagtccaatggaactttgtgccagatgctggcgctggatatcctgttcggtttgcctctggaagcgtttgaacagcagacggacgctatcaggaatatggatctggcccggatgaacgcctttatcaggaaggtgctggatcccgcccagccgcgttcctgatccatcgtgcgtccgcctgccggggagtaattccccggaaaatcatttcctttttccctgtccgggaaaaaggcaggattaaataaaaaggaatatttttgcgttacatcatctgaaggctgggggaggggtgtagcggaatcgtgatttttatttcagtggtgatgcgctatagtggcagccatgactgagatggagccggacaggaaaactgcggaacgggcaatcagggaagcgtatgaatccaacccggggggctgggcggaacattcccgctatgtggcggaagcctgtaaaaatatagcctcgcgctgtaaagggttatccggtgaaaaagcttatgtcctggggctgttgcatgatattggacggtatgccggagtaagttccgaaaagcatttgatagacgggtaccgctattgtgcggcaagaggctggaaaaaggcggcgcagatttgtatttcccatgcgtttatgatacaggatatcaatacttccatcggcacgtttgacgtgagtggggaggattacctgttcatgaaaaattttgtagagaacgcggtctatgatgactacgaccgcctggtccagttatgtgacgctttggccatgccgacaggtttctgccttttggaaaaacggtttgtagatgtgacaatccggtatggagtgcatccgtttacggtggaccggtggaaaaaaattctgcagctcaaggcgttctttgagaaaaaagcgggctgttccatttatgagcttctgccgggcgtcgttgaaaacagtttccgccaggaggaaagccatgcgtgatgaagcggaagattttttggaaacggcgcatcccgatgcgctaaggcaaatcgcccgggcgagggaattgacaagggaatattatttttccgcatatagtgatacgcggagaagaagtgaaattctccgggaattactgggtgggattggggataacgtgatgatagatacgccctttcattgcgactacgggaaaaacatctttttagggaacaacgtggtcatcaacatgaactgcattttggtggataatgcgcccatccgcattggcagccaggtgctgattgcatccaatgttcagatttatacggcttcgcatccggtcttgctccaggaacgccttgtgacggggtggaaaaaaggtaagggaacatttttccgcacctatgcactgccaatagaaattgaggatcaggtatggattggaggcggcagcattctactgccaggtgtgaggataggaaaaggctgcgtcattggatcgggaagtgtcgttactcattctgtgccggccggctgcgttgctgttgggagtccatgcagggttatcaggcgtttttgacatcaacggctggaggccgccgcgggaggcggcggattcggaagcgccccttttttcatggcggaatgttttcggttcggtgatgcggcaatagtagggtttgactattgttgcgaccgacaggatgatctccttatcggttagggtcagcaactcccattgccgctggtggttcgacgagggggggagcccggcgttgaggattcgttccagcatattccgcgcaatgggtttgtcctggaactctcggatgctgcgacgtttttcgattacttcataaaattccatgatacatcagcttttgattattacgggttcatgcctgcggcggcttgtagtgacgagatacacacccgtgaatacaagcaacagcgaccccagctttaagattgaaaatacgtcctgaccgatggctatcgcaatggcgcaagctaccatcggctgaacgtaattgtacatgcttaccgttgtcggccggaggcttttcagagagcaggtgacaagcagaaaggcgatgaatgtggagcctaccgtaatataaagcaacccgtaaagttgcatcggtgggaatgccgctgcgtgaaaaacggcaacattttccagttctccggctgaaaacgggaataacgccacggtcgccacgaggaacatccacttcataatcgtctcggctgaatagcgttgcgccaaggatcgcgacaacacgaggtaaagggaataaactatgtaattgacggctatcattgcatcgccggggagactgctcccgcccgatgtagcatgcgcggtgccgaatacaagcaacagcccgccacagacgccgagcatcacaccgagcacctttcttttcgtgacaggttctcgcagaatcacggcggcaagcaacaaggcgaatatcggagtagaagaggcgatgattgacccgtcaaccggcgatgtcatcttcagccccaccacgaacaggagctggttgatgcctacgccgcagatgccgcacacggcaagcaaccccaaatcgcggtgtgtcacccgctgccgaggcaggaaaagggacaacagccaaaacagggcacatgtcacggctgcccgaagaaaggcaatggcctcgggcggcataccggtattcagaaggtgcttgaataccggtacacttatgccgaacaagatattcgctgtcaaaatgaggatgtgtcccgtcatgctgccatatttatttccaggtattcatatgtattctatcttcaacatggatttccttttgtttggggaggaaagcattttcgacgggatagcccatcgtcagcaggcaggtgaattcatactcatcgggcgctcctactatctccttgattttctccacttcgtcggcaacaggaatgtggaacacagttcccagtccttcattcgttgctgcaaggagcatattctccacggcacaccaggctgaagcgaagtaattcagcgagctttgttccaccggtttcagcagttgccacgtcttttgccggaagaacgggatgatgagcaaaccgctctgcatcagcatacgctgttgtttgggtagggcatcggcaaacatatccatcttatccttgtcgcccgattcatccacttcatgcaccagattcttgaatgccgccatatttttggcaagcgggtcgatcaccttggctatgtttttacgtccgcgcaccacaacgaactccagttggcgcaggtggtcgttggtaggcgctttgaaagcggcactgatgacctgttttacgatttcgtcactcacttcccggttggtgtagtcgcggtatgtgcggcgcttctccaatacttcattgaattccatattacgatgttttttagttatgttttattatggtatatatttacaataaaaagctgaattgtttttgaatgaagatttcaatgccatgtagcgaattaacttttgacatcaatagctgaaggccgccgcgggaggcggcggattcggaagtaccccttttttcatggcggaacgtttgatctgctcatggtaaaagtaattcacgataaccggcggttcgttgaacggccggtgcatggaatcgtcattgcgcaggtacggcaacccccgtttttccgccagctgccgtattgctgcgtccagtccttcccagtagccgcggctgcctttctggtaaatttcccgatagaggggcatcagatgcggatagcgtttgttgatgtactccagaattacggatttgtagctgccccgcagattcaggttttccagccagatcaggttgcatttgtcttcagcctgctccacaatcgccggaatatccgtaatgcccggaaaaatgggggagatgaagcaggtggtgcggattcctgcctcatggaaggccttcatggcggccagcctccgcgagatgctcaccgccatgtccatatctgcctgaaagcgctcgtcaagcgtgttgacggaccaggaaacgcgggcatggggaaatgtttttatcaaatccaggtcccgcagcaccaaatcggattttgtagctatgctgatttccgcgccgctgccttgaagctgttccaggagcgcccttgttcttttgtagatttcttcctgaggtccgtaagggtcggtcacggaaccgataaacagctgttttcccgcgtatttcccggggttgcgtatttccggccagtatttgacgtccagaaaggttccccatggttccggatgaccggtgaaccgtttcatgaacgaggcgtagcagtatttacaggcgtgggggcagcccacgtaaggattgaccgagtaatcggccacaggcagatttgacgttgacaggatgctctttacctgaatttcccttactttgattgcatcagcgttcatggttttaaaaagctcctttgcattccctgctgcacggtatcggaagggcgcagatgccccagcagcaacggagagtccgggtcatggagtttgtaattttcacgggccttttgccggttcgtatttgcatagcagtatttgcagccgttaaggcaggtgtcatacgctcctatgtcccggctctcaatgcaatggcagccctgccgcattccttgatgtttcaggttgcggaattgaacgccgttggcctgtcccagaatgttcagggtcatgcagccggaggatgaaatgccgtaacgcgtgtaatcgccattggttccgcaggtttgaatggggattttatatttggccgcgattgctcccagcccggccgccagctcctccttgtctttttccgtgagggggattagttccggcatgttggtttgcagcttcctgtacatttccacaaagctgaaaatgcagcggtcgatgtggccggataagaaggacgccatgcgttcaaaggtctccagatgccttctgacggtatattcacttgtcagcaataccgggtcataccgccatgcgatgcggtttgctccgacaatttccgaaagttttgccagcgtggccatgctttcatcaatgccgggaacacccggttctatttcctttccgtaggccgtaatcgtatagtggaagtaggtatggaagcgctcggtgatgctgttgatatgcggaagaatgggggcataatttttagagcagaagacaacacagtccacttgatccggcgtcagttcataacgggtcaccttatgttggaacaggggattgcgggaaaggacatagccttcttcaaacctcttcagcagccagcgggtgtaatactggacggtgtccgtccgtcctcctgtattgataatcatagcgtgtttttgttgatggattgaaatttcagacgcatttgttccgaaaaaaggtcggttaaacgaaccagttccgcttgctgttctccactcaattccgccatggcgtcgttttccgcctgcgcggcaggggggatgatgcgttccacgtattcctttccggctgcggtgaagcgtatcaacctgattctccggtcggttttggattcttcaaaagaaaggtaccccagcttccagaattttttgatggcggcgctgacggtttgcttcgtggcggagaggcgttcgcaaatcccggcctgcgtacagccgctctgagcgaaatagatgatatccagaataaacagctctttggtggtcaacccgtgttttctggcgtattccgtatagacggcatattgtttgtcccgcagccggcagtagttgtttacgtggatattgacgctctctttgctcataggcggagatgaataaagtatgatatttgatggtctgatatttgacaaaaagaatgtagctcttcacgcgttttttgtaaagccccaaatataaagctccagataaagaggcgggggatagggacggctttttgcgtggctaggcaaatttccggaaacggtgccggggcggcaatggctgccggcctttcaagaatccgggacattttccgtttttattcccgtatcttctgtttcgcggcagaagagtttgttgccgcatggcttcggaagacaggtgcctgtggctgccggggaaacgtttttccgtgttcacgggagttggagagcttgcccggcggggcttttccgcaccggggcaagttccgcctgctccggtgacggatgtttcgccggaggcggggagagagcgtggagactcaataaaaaacgcaggcggcgatgcgcctgcgcggtatccggcgatggttcggacagaagaaagaagcggtttttctgccggagggtatttgtgtaaaacggcatccgtccgctttctgaagaacgggagatgatccggacgctcccagcaattccgcttccggagcgggaacggtatttggaaaaaagtgcggtaccttttttccgttcctcattttcgccgccccctgagaaaccccggcgcgcttttacgcttttggagaagcggcccgtacaaggcaggcacgccagggaagaacaggggcggctgttttttagccgatttccgtgcggcccagcaagtgggcgccttcctccatggcgaggctgcgtgtcttcatgtccccgacgacacgggcctgctgcttgagttcgcagcggtcagaggtgaccttgccttccacgttgccgtagatgcggacgtctccggcagtgatgtctcccttgatttgggcggtttcaccgatggtgacttttcccttgtcggagatgatttcgccttcgattttgccgtcgatgtgcatgtcgttctggaaacggatggttcccttgatttcgatgccggaggcgaggaagttggttacgttgtctgtcattgtcgtaaaatggttggggatgggttaaatggtcatgatatccttttccttgacggccaccagctcgtcaatctccttcacgtatttgtccgtcagcttctggatctgcgtttccagatcgcgctggccgtcttccgtaacgatgttttccgccttgagctttttggcggaatccatggcggccttccgggcgccgcgcacgcgcacacgggcttcttccgcttgggatttgacaagcttcacaaggtctttgcggcgttcttccgtgagggcgggaatgggcaggcggatggaacggccttccaccaggggattgaggttcagcttgctttcattgatggcgcggccgatgtcgtggacggtgctcggatcaaagggctggatgaggatgagacggggttctggcgtgctgatgacggccaggcccttcagtttcatgacggagccgtagctggagacatgcacgtccaggttttccacgaggccgggggaagccttgcccgtgcgtacgccggagaattcctgtttggcgaagtccacggccttgagcatggattcctccgtttccaataataatgtttctgcgtccatgatgatggtgggtgctaagtgtttttggtgggttgaaaaggaatgcggggttcagctgatggtggtgccgatcggttccccgagaagtgcgcgcgtgatgttgcccggcgtatgcatgtcgaatacgatgatgggctttttgttgtccatgcacagggtgaaggccgtggagtccatcactttgagctggcgttccaggcattcctgataggagatggtgtcgaatcgcttggcgccggagacttttttggggtccgcatcatacaccccgtccacggaggtggccttcatgaccacttccgcattgatttcgctggcgcgcagggcagccgtggtgtccgtggaaaagaacgggttgccggtgccggcggcgaagatgacgattttattgttgtccagatacgagcgggccttcaggcggatgaaggattccgcgacatttttcatttcaatggcggattgcaccacgcaggggatccccgcgcgttccagcgcgctttgaagggccagggcgttcatcacggtggcgagcatgcccacgtaatccgccgtggcgcgatccatgccgcgcacgctggctttcgccccgcgccagaaattgccgccgcccacgaccaggcctatttggacgccggcgcggtgcgcctgggcgatttcttcagcaatgcgggcgacgatttccggggaaatgttgtccatgctgccggggctgcgcaaggcttccccactgagtttcaggaggattcttcgataggctggtgcggatgtgtcagacatagatgcgaattttacgcagacaagattgaaatttcacggggcaaaaagaaagcaaaaagagattccttattgatttttctccggaggtccggagatttccaccttgatggggcttctgctctccaggctgcgggtggggaaggggaaggaaatgccttcttcctcaaagcggcgcttgatgtcatgggcgagcgttttctggcagtccaggaaattgtctttccggcaccaggcccctacggtaaagcccagggaagagtcctggaaccctgaaaacgagatgaggggcgcggggtcgtccaggcagaatttgttttgtttgaccacttcccggaggacgttcacgacatgctcaatgtcgcagttatagtccacgcccaggctcaggtcgcaccggcgcgtggaaaaacgggtgatattgctgaccggattcttgatgattatttcattggggatgcgcaccatggtgttgttcggcagccggagctggacggacatcaggttgatggagtccacgttcccggtgattccattcacttcaatcatatcccccaggttgatctgcttttcccctaccaggaagaggccgctgatgatgttggacagggaggtctgggaggcgaagcctacggcgacgccgatgatgctggccgcgcccagcagggtcaggatatcgaaccccatcagggcgaaggcctccacgcctataataatgtagccgacgtttttgacgatttttaccgtcaggcgggaggcctggggcgacattttcaacgcagtgattttccggagcacctggcagaacagtttcaggagtatccagctgatcaccagccataccgccacatgcaggattttgactcccacggactgcaccatttccagcttgagccagtccggcatgttcaggaagtccatggtttttgtccagatatcttccctggaggatgcgtctgccatgagattcatatgaaggatgtagcagacgcttccccccggctcaaggggcgcgcgcgtattccccccggtttatgacagttcctccggcagcggaaagggcagggtgttcgggcgaggaggacgtataggttcatcccgcagaaggggggggcggtttccggcgcaggaaaggcggcggatgcatggccggatatggcgcctggttgggaaagaggggaaggcggggatgaaaaaaggccgttcccccggaaggggagcggccttgaaatattgccgggggggctgcttacttgctgaggtaggaggccacgccttcgtgggacggggtcatggccgcgtctcccttgtgccagccaagagggcagacttccccgtacagttcgaagtgctggagggcgtcaaccacgcggatggcttcatcaatggagcggcccagcgggaagtcgttgatgagctggtggcggacgatgccgtctttgtcaatcaggaagaggccgcggtaggcgatcagttccccgttgacttccacattgccgtcttcgtcaatttcctcgtctccggccagcacgccgtaatcggcggaaatggtcttgttgatgtcggaaacgatggggtaggtcacgccctgaatgccgccctggctgcggggggtgttgatccaggcccagtgggagaattcgctgtctgtggagcagccgacgacggccacgtcacgcttttcgaattcgcccagggcttcctggaagccgatcagctcggtagggcacacgaaggtgaaatccttcgggtagaagaacaggatcacgtactttttgcccttaaactggtcaaggctgaaatccggtacgatggtaccgtttactactgcgttagcgctgaaatgaggtgccggttttcctatgagaagcatggttgttttttggtttggttctaaaagaatgattccaaaaaacggacgaaagtcaagcggcaatgatatcccgttcgttccaaaagagcctgttttctcttgaaaatgaagctttttttgtcagtattccctccatgtcatcctcaaaggcgcaacaagacgagtgatccggaaaaattggcgtgattctcgctgtggccggcagtgccgtcgggctgggaaattttctgcgctttccggggctggctgcccaatatggagggggcgccttcatggtggcttacggcctcatgctggttctggtgggcgtgcccgtggcgtgggcggagtggtccatcgggcggcgcggcggccagatgggcgcccattgcgcccccggcgtgttctggtacctgaccaaagggtccaggctgtggaagttcctgggagtgctggcggttctggggccttcttccgtggccttttattatatggtggtggaagcgtggtgctgcggctatttctggaagatgctcacctgcccggaggtttttgccacggcggaggggacggcgcagacttttttcagtttcacgggcatgtacggcgacgggagcgccctgttgtcggacaacgggctgctctggattgtcagcggggtcatccttttgaacctggggattatttaccggggcatcagcaagggcatcgaaatgttttcgcgctggttcatgccgttgctgcttctgatttccctggtgctgctggtgcgcattttgtgcatcggcacgccggacccttcttatccggaccgcagcatcgaacaggggctggggtatatgtggaatcccggcaaggtgctggtggaggagctggaccggaacagcggggactggaagacggtttccatggtttcggcctcccaggcgggagccatggatgaagccgtgcggcaggtggaaatgtccggaggaacccggaggctgactgaggtgaccctgtgggacggcctgaaaaacattgagctttggattgcggctgccggacaggttttcctgagcctttccgtaggaacggggctgattctgacgtatgccagctatgtaaaaaagaaggaggatatcgcgctgagcggcttttcggccgccgcctccaatgaagtgtgcgaggtgggcattgccggcatgatgacggttcccgccgccgtggcgttcctgggagtggccggagccgccgggcaggggaccttcgcgctgggcttcatggtgcttccgcaggcttttgccaaaatggggtccagcgtggtattcggcagcctgtttttcctgcttctgacggtggcggcggtgaccagctccatttccatgatgcaggtgggcctgtcctttattgaggaattcatggggctgaaacgcaaaatggctgtggtggtgcagggcttttttacggctatgggcacgttcatcgttgcctggtacagcggcaatctgctggcgatggatacttatgatttctttctgggcacgctgtgcttctttgtgagcgccatggtgatgatgattctgttttcctggaaactgggggtggaccgggggttgaaggatctggaggacggttccgtcatccgcattcccagaatttaccgtttcatcatgaagtttgtgacgcctacgctgctgctggcgattttcctggcctggctggcgcagaatatctgggtgaagcaggccgcgcccattgaagctctggggcgtggggaacatggagcggtcattcccatggggtttctggcggcttatgccctgttcctgattttcatcaccatggcttccggaaggcataaggtgtaccacggtccgcgataggcggggaaggcctgctgcgcggatgcccgttccccgcagtttgcggcaggccgggaggcaatccggaggcttgaccgaagccggatttgatataggctggcgtcatgcccagagtaagaaggatacgcaggaaaaagccccgtgccggcagcgtctggaaaaagctgctgctgtggggcgtgctggggatgcttgttctggcggctgctgcggtggcgggatcctatctgtacgtcagggcctatttgaagagcgatggttttttagccatactggaacagtccgccgttgatgatatgaatgtggagaccgccaggatagaccctcttgactgggacggttccggcatccggtgcggcggcgtaacgatggaggggcatgagtttttgacttcccttcaggccaggaacattgagacggaattcagccgctgggagttgctgaagcgcgcgtttgtcattacctccgtcaatattgaggagctgaagcttcggctcgctcccgtgcctttccgtttccgggaaaaaccggaaggggccaggagctgggcggaagagaatattctgccggatacgttccgtctggaaaaggggagcattgattccctgtccgtttcctatggggaggccggccggccgtatgttttggacgggacccgcgtggagagcgcctatgacgccggttccagccagtacaggtttgaaatgcaggggggaaggctgcgccttcctttcaagggatgcccggagttttccctgatgtccggcacggcgcagtttaaccatgccagcaggagggtgaatgttccgtcctgccgcctgactacggctgccggcggttatctggacatcaagggggactgggacggctcttcctcctcctggacggcgaatatggtggtgaacggcgtccccgcctcttccgtcctggaaggccattggaaaaagcatgtccagggcagcgtaagcggcgggatagacctgcgcggcggacgggacggcgtaacccatgtggccgggctcgccaagttgcagggcggcatgctgaccggccttcccgttctggacaggctggccctgttctgcggttcttccagattccggaatcttcccctgcacgaggcgtccgcccagttctcctatcaggaatccgcctggcatatttccaatattctggtggaaagcgaaaacctggtgagggtggaaggctggctggaaatcgggaaagggggggcgctgaccggaaggctgcaggtggggctgcgggccgacggcctgtggaaagctcttccggggttttccgatgtgttttccgtttcccgccagggagcgggaggcaatctggcgtgggccaatgtgaatatcggcgggacgctggacaacccgtcggaggacttgtccgcgcggctcgtcaaggcggcgggaaaccgcctgacggaaataggaatgggcaaggcggctgaggtggcggatgtcgcggcgcggctgctgaacagagggaccggagaaaacggggcgggggatggtgcggaacgtaatggccgcaagttcaggattcccgccgcggacgaagtacccgtcccggttgtgccgcggcttcaggacgctgcggaaaaggggcttaaaaccggaaatgacctgatgaacgaactaatgaattggtaacccgtttttttcagatgaaaccttatccctgccagatggtgcaggcggtcgccgttattgtggagcgtatcgcggatacggctttccgcgccacccttccgaatggcaaaaccgccgtggcttttgtagaaaaaaagaacgcttccctgagggatctgctcaaaccgggcgaccgggtgaaggtgacgatttgcccggcggattttgaccgcgcccgggtggacggactggcggaatgaggcggacgttttttccttcattatggggggaaagaggcgttttgcccggtgcaggaaaaccgctgtaaagacggaaccgtccccatgccggaatccggacggtgaagaacgggggcatgggcgggaatttccccgtgccgggatggatgcggaaagggctttcctttacagccgggtgcgtccttccagagccttcatcagcgtcagcgtgtccgcgtggctgaggccggagccggcaggcagcccctgggcagggcgggatatcctgcaatccatttctttgagcagatggtggaggtaggtggccgttgcctccccttccacgtcagagcctgttgccagaatgacttcgcaatcaggctgccgggagacgcgttccaccagggattgaatgttgaggtcttccggctccacatcatccagaggggaaagcttgccgcccaggcagtggtacaatccgcggtaggcgctgctgcgttcaatggggatgacgtccgtggcctgttccaccacgcagatgaggcggctgtcccgttcttcatcccggcaggcggcgcagggttccccttccgtgctgaagaagccgcagacggggcagggcgtgacgtgttccgccgcctggccgatggtgcgggcaatcgcctccgcttctcccatgtgcccctggagcatccacagggccatgcgttccgcgccgcgggtgccgatgcccggaagctgtttcagggcggttaccagttcaagcacggggatgggatagtccagattattcatgagcggaaggaggttcggaatgacgccggacagggggcgtttggggacagaggatggcgagcacgcccgcgctccctgcggaaagcaggcatgggacggcattgaagaaaagaccccacagccccagcaccggggtaaagctggccagaagaaggaggaaagcggccagaacggccgttttgcggagcgtgccgcggatgagcagcaaatcgtaaacgagggccagcgtcaacgccatgcacagcaggaatcccgtgccgggagaaagggcgggggcgtccgggggaagcagaaacggggcggaggccatggcttccttcagctcccggccccagacgggagtaaggcccaggtaatagagcgccacgagcaggataagcccggctacggagaacagggcccagcgcatgagcagaatgtcctggtgcgttttggcgggcatggcttttaaatgaaaaaagcggaagcgcgatggctgcggtggccgcaaacatcagcgcttccgccggaaaggagaggcctgaaagggtcaggcgaatcgtttcacgatgacggaggagttatgccccccgaagccgaaggaattgctcaagacggcgtccaccctggtttcacgggccttattgggcacgcagtccaggtcgcattccggatcctggttgtccacgttgatggtgggcgggatgatgttgtcctgcatggccatcaggcaggcggccagttccacgcctcccgcggcgcccaggaggtggccggtcatggatttggtggagctgataagcagcccgtttttagcgtggtcgccgaaaacggccttgatggccttgatttcgcagatgtcgcccagcggggtggaggtgccgtgcgtgttgacgtagtcaatgtcttccggcttcattcccgcgtgttccagagccatcttcatgcagcgggcggcgccgcggccttccgggtccggggcggtgaggtggtaggcgtccgcggagatgccgtagccgacgagttccccgtaaatttttgcgccgcgcttctgggcgtgttccagcgtttccagaatgacaacgccggcgccttcgcccatgacgaagccgtcgcggtccacgtcgtacgggcgggaggcccgctggggctcgtcattgcgggagctgagggctttcatgttgctgaacccggccacgcccgtgggcaggatggtagcttccgctccgccgcagaccatgacgtcggcatccccggatttcatgatgcgccaggcttccccgatgttgtggttggaggtggcgcaggccgtgacgatggacatgttcggaccgccgaggccgtattccatggagatgaggccggaggcaatgttgctgatcatgtacgggatcatgaagggggacacgcgggcaggccccttggaaagaagcgtggcatgctggctttccagcgtgccgaggccgccgatgccgctgcccaccatgacgccgatgcgggttttgtcctccgcttccagatccagcccggaatccttgagagccattccggcagcgcccatggcaaagtgcgtgaagcggtccacgcggcgggcgtccttgggcgtcttgaagtacggggcgggatcgaaatccttgacttcaccggcgattttcgtggagtagccggtaacatccatggatttgatggtgtcaatgccgctgcggccagccttcatggcttcccaggtggatgcgagatcattgcccagggggctgatcactccgatgccggtgataacaattctgcggtcggtcataataagtgtgagtggttgcaaataatgcttgaaccagaataggcgacattacgggaaagtcaagctaatcccccctgtttcccggcacgggggaaacaggttgggcggaaaggtatatcctgcttacggcaaggattttgcgggtcaaggacattccctgttgcctgctgaggctccggggccgtgaacggatttcagggtaaattccgccgcagcggccgcatccggcagcgcatggaagggcggccggatattttttcctgccgcacgcctttaacggggggcatccgccgctatcggaagaggggctgcccggaattccagggaaagggaattgacgcagtagcgcagattcttcggagtcaggcgttctccattgaaaatgtgtcccagatggcctccgcagcgggcgcaggtgatttccgtgcgccgcccgccgcccgcatggacgcttgtgacggcgtccggcagggaatcatcaaaacagggccagccgcatccggcatcgaatttgtcttccgaccggaacagaggcgcaccgcatttgcggcaggaatagatgcccggctcaaagaagctgacgaattccccggaaaagggcggttccgttccctggtgttcgataatgcgtttttccgtttccgtgagggggcggcgcgtgcgggcagggccgggatcgggtacgtcccgggaggcgggaatccctccattcacggccatgactccagccacgccttccgcaatcatgcctatccatgacgcccagtgtctccgttcttcctgattcatatggcttatgaccaggttggagcgggttttgctcattcctgaaacgatatcttgtgggtattgccgtttttaaggggagagtcctgaaaatatggcagtctatggaagagttaatactccagctccagccagagctgttcccagatgccctgccgctgttcttcctggggatgggagacggacagccccagaaggcggaatgtacggtccccggaatccagttcttccatcagggtgcgggccagggggagaattccttctttctccgtcaggatttccggaacggtcgtgcagcgggtcttctggacaaagtccgggaacttaaccttcagggtaagggtgtttccccggaagccggaacgggccagccgccccgcgagttcttccgccagcagggggaggcgttgttccagcgcttccgccctggtgacgttttcccggtaggtttcttcacaacccacggatttgcgcatgcgggaaggttccacagggcggtcgtccacaccgcgggcgaagttgtagaagatggctcctgttttgccgaaatgccttaccaggaagtctttgtcccgtgcccggagctgcgccccgttggtgatggaaagggcgcgcatgcgttcggcggtggcgtgcccgactccccagaaagcttcaatgggaagtgccgcgatgaatttttccgcccgggatggatggatcgtgaacagcccgtccggcttgcggtaatcggaagcgatttttgccaggaatttattgtaggaaacgccggcggaggccgtcaggtgaagttcccggcggatttccttcttaatcctcctcgcaatgtcgacggccagcggaatgcccggcttgttttccgtgacgtccagaaaggcttcatccagggaaaggggttccaccagatctgtgtaacggtggaaaatggcgtgtatctgcgcggagacggccttgtacacatccatgcggttgcgggtgaaaatcagatgggggcaaagcttgagagccttcatggaaggcatggcggaacgcactccgaaacggcgcgcctcgtaactggccgccgccaccacgccgcgcatttccggcctgcctacggcgatgggcttgccgcggtattcgggatggtcccgctgttctatggatgcgtaaaaggcatccatatccacatggatgatttttctctggttcatgggggcgcttcatgattcctgatggggcgggaaacatgagggaatgggatgccccatcataatccggcttatcctgcaagtccagttggaaggagaagttccggcggggaggtgaaagaaaggcggatttttggggaacgggacgatttaagtgaaaaaatcttccgggcatggtaaattccgggcatgtccagcggaatgaaggaacgcctgtgccggaacctggaaaaggtgctgcatgcggaaccccgcgaattgcctgccgcagcggggggaatcctcctgtttttcctgttgttcctggcctattccatgttgaggccggtccgggagacgatgggcattgccggaggcgttcagaatctgcagtggctttttacggctactttcgccgcttccatagggggccagtttttattcggatgggtttcctcaaaggtgcggagaaaagccattcttccgtggacgtacggttttttcattcttaacctggcggttttcgcggcgctcgtgctggcatgcccgggaaatgtctggacggcccgttcgttttatgtgtggctgtccgtatttaacctgcttaccgtttccgtggcgtggagcgtgctgtcggacgtcatgaagccggggcagatgaaacgcctgtttgccctggttgccagcggaagcagccttggggccatggcggggccggcggtgacggccgcccttgccggagtggccggctatctgtggctgttccttgccgccgctgtttttctggcgctggcgatgctggcgggaatgtacctgcaccgctggcgtgacgggaattccccggaagatgaggaaacgggagttcttcttccggccgattgccgggaacgccctctgggagggaacccgtttgccggggcgtccgccgtattccggtctcccttcctgatgggcatcgggctgttcatcatcctgctggccgggaccaatacgttcctgtattttgagctgatgagcgttgtagcgtcttcctttcctgatccggtgcgccagacgcaggtattcggagcgctggacgttgttgtccaggggtgtaccatgctgcttcaggtatttctggcgggacgcattgttcggaaattcggattggcggcgttgctggcggctgtccccgttcttatttccctgggttttgtatggatggctttcgctccggtatttgccgtcgtggccgtggtgatggcggtacgccgcatcggggaatacggaatggtgcgtcccggccgtgaaatgctgaattccgtattgtccccggaagaaaaatataaagccaagagttttattgatacggtcctttaccgtggcggcgacgccgtcagcgcatggctgaaaagctcctttaacgtgttgggggcccattccccgtgggccatgctggccggagccgccatttcctttctttgggcggccaccggattcctgcttgcgggcaggttccggaaaatggccggagtacagggaaagaaatgatccttatggcggggaattttccgttttgtccggatacggcccgccagatgcggcaattcctggtgatgcctcttttccggcggctgccgccgtcagaggtgaactgctgggatgctggggaatctggcgcgttttgaaaaagcgtggcaaagccgtgttctgtggaggaataagtgccaggccttccgttgagggatagttgcaggcaggggattgcgtgatgcccttgatggcggaagcggcggtaggcaagacagatgtttttctccggcgatgaataatttctggaatgttctttatttgacggcggtttccctctgcggcggcaacatgcggattttcaatccgtttcatgtgccgtagtggatggagggttgcatgtggcagatgtcttgcggcatggagaaattaatctttatttttaaagtaacttttttatattaaaaatattacattttgttaaaatgtgatattggtgtcaaaattgtttccaaaaaaacaacaggaaatgcccgccacggcagggagtttttttggaggaaaaatcatcctgaaaacagggttgcaatgatacttaaattatttttccacaatatttagtattgattccgggttgaaaatccgttattgaagcccaagcctctgtgaggcaagtatgctggtcatctttccgttagatgattccgtcattactattgttatatattcctctgataatgaagaagacactcattacgctcattgctctggcgggaatggctcatgccgattttgtatggaacggcggtgagagcattacccaggagctttggcagacagaatccagctgatccatcaccggttcagattcctggccgtcggcaggaaccggtcccggcacgcccaattccaacgcatggtctcttatttccgtttccggtgcgagcggcagcatttcccagctggaaggctggacattgaagcttgccctgcaaaacggtgcggatttgactgtagggaacgtaaaaaaattccagggcggctgttctattgatattgatcaatcatctacgctgaccttcaacagttataacggcggcaacgatggtgggcgcacgacgttgaacaactacggcacgtttaacctggcttataccaagagccagggcggggaaggattttacgtcaatttgggagccacgggcatcatgaaccttacttcctccaacggtagttcatacaatgccaagatagcaagtctgaccgctacgctgactcttgacggaggcaccgccagcggagtaactgccagcggtcatcaaatcctgaccaggaacctggttaccctgggaagcaatatgtcttttgacggcacggacacttccctggaaatgctcagcggcattgcaggcattgattccctcaccgctgtggacgatttgactaatgccgaagttggttcttatatgattaccaaggatggaaacggatacagcgtttcctatgtggttccggaacccgcagcggcttccctgagcctgctgggcctggctggcctggcgatgcgccgccgccgcaagtaacggcaaacttggattcctgtttccattcagctcccttccgcggttaacggaagggagtttttttattatttcccggaaaggcggcgtatttccagaagatgtccgggcggaacgggagagagaagccgggagagtgtatgcatgggcctattcttccccggaggatgccgtaaccggattagccccggctattgttctgcaacgctgcaagaaaggaaaaaggcctgttattgccgggagtaaccactttctttcaaaaaaaagtggtaggcccggtaggaatcgaacctacatcgtcggtaccggaaaccgatgtcctatccattgaacgacgagcccatgttcccaaggaacgagagaaatagaatagaaaaaacgggccggatgcaagtatttttatgccggtgacgggattggcatgatgaaaatgtgaaacggggaagttaagggcagggaggtttccggatattccggggagaaggaaggggggatcaggagattttatgatgaaaagagaagatggctgccaggacggccgccacggtaacggccatgatggccgcgaaaagcggccagagatccaggaatccggctccttccaggaagatgcgctggatgagttccaggccgtatctcatggggttgagcagcgtgaggtcctggaagatttccggcatgctggagatgggcgtggcaaagccggagagcatgaccatgggcaccagcagcaggaaagttcccacaatagcctgctgaagggattgggcgaaggaggaaatgcacagcccgatggccgccgccgtgacgatgaagagcagcagggcggcggaaagcagccagatggagccctggaaggggatgcggaaccagaacatggctaccagcactacgaagacggcctgcatgattccggtgacgacggaggctgttcccttgccgagcaggatttcccccggggtgtatggggcgacgagaagctggtcgaaggtgccttcctcccgctcgcgggcgatggagagcgagccggagaggatggagttgatgagcacgagtacggcgatgaggccgggaacgatgaaccagcgtgtgatgaggttggggttgaaccaggcgcgggattccgtttccaccggggaggagccgccgtttttggagagcagttccgccccgtaggcggcagcgatttgctggccgtagctgagggcgatggccgccgtattcgtgttgcgcccgtccgcaatgagctggagggatgcgggcctccccgtctgaatgctgcgggagaaatccggcggaatggtgagccccacgacgatttcccggttgtctatcatgcggtcaatgtccttttccgtggccgcggcggcctggcgccggaagattcccgtgccttccaggtccgcgatgtattgggcggccgcttctccgccgtctttgtccagcacggcgtatggcacgcgggtgacgttcatggtggcggcatagccgaagatggctatctggatgatgggagggatgatgagggccagccggctttttttgtccctgagcacggccagcagttcttttctgacgagggaggctattctgatcaggaagtccatggcgctattcgagggatttgggtgctttcatcctggcgattcccatgagcaccacggcaaagacgcccagcgtgatgcagcagggaatgatgacggaagggatgtccccggccaggaagagggtctggagcagggtgacgtagtagcgggccgggatgaggtaggtgatggcccggacggcgggtggcatgttcaggatgtcatacaggaagccggacagcatgagggccggcatgaaggtgcccataatggcgaattggcaggccaggaactggtttttggtggcggtggagatgaccagccccaaccccagggccacaatcaggaacagggcggaaaccgccagcagcagagtgagggagccgcggatggggatgccgaagacgaaggcggcgaagagcatggagatagccaggctgaccatgcccagcaggaagttggtggcggccttggccgccaggatttctccgctgcccacgggcgtgacgaagaggctttccagcgtgccgcgttcatattcccgcgccatgaccagggaggtgaggagcgccccgatcatggtcatgatggtgacgatgacgccgggaaccaggtagtagtggctgtcgttggcttcattgaagcgggtgcgcgtctgcacgtccagcacgggggctgtccgcccgcccagggaagacgcccaggagccgacgacggcctgaaggtagttgcggatgagggtggcctggttggcgttgactccgttgacgacaatctggactttcgtggttccattgtggagcgtgtccggcgcgttgctttgcagggcgatgaaggcgtccgcttcatgggtgcgcagtttttcttcagcctcccgggtagagaagacgcgcgtggtctggaaatatctggaaagggtaagccttgtttccaggtccgtggactggctggaggcggggacggccaggtacgcgatgcgcacgtttttgatgtccatgctcatgccgtagccgaagaggagcaggagcacggccggaaggatgaccgcaatgcccacattgccggggtcccggaatacctggtggagttccttgacgatgagggctcctattcttttgagggaggcggtcatgtttctcctccttttttcatgtgttcttccgtgatggccaggaaggcgtcttccagagaagcgggggctccgtcttcacgcgggggagcgtgtttgcggatatcgtccggggaaccttccgccagcgtggttccatccatcatgatgagcatgttatcgcaaaattccgcttctcccaggaagtgcgtcgtgatgatgatggtgacgcctttttccgccagggcgttgatgcgcagccagaagtcgcgccgggccagggggtccgctccggaagtgggttcgtccagaaaaaggatgtccggggagtggagcagggcgcacgccatgctgaggcgttgcttgtagccgccgggcaggtgcgcggcgggggcgttcatgtacggagtcaggtggaattcttcttccatggagcggatggcttcctgccgctcctttccggacatgccgtaggctccggcgaagaattccaggttttgacgcgtggtcagcatgccgtacatggaaaatttctgggccacgtatccaactttcctgcgcgctctggcggcggcggtccgtagatccgccccggccacattgagcgtgccgccgctggcgggcagcagcccgcagagcatgcggaaagtggtgcttttccccgctccgttggggcccagaaggccgaagacctgccctttgcggacggagaagctgacgtggttgacggcaatgaaactgccgaatttcctgacgaggtccgttacccggatgacggtgccgccgttttccgtccgctccggttccggcgttccggcaggggcggggatgtcctgcggggcgaggtccacttggtcggcaagcagggtcatgaagccgtcagagaagtccggctgcgcgggggcggggtggtattcctccagctttttccgtgcggggtggccgtggggaacgatgatgcggacggtgttcccctgcggggtggcgttgatgatgccgggcacggcggccagcctgctctggaattggcgcgcatgcagcccctccggcgtgcgcaccgtcacgcacatgccttccgcccgggcgatgacgtcggcgggaggggcgtccataagcaggcgcccttcatacatgatgagggttttgttgcagtaggccgattcgtccatgtaggaggtgctgaccagcacccccacgccttcctctccggagaattgtttcaggatgctccacagttcccgccgggagagcgggtgcacgcccacggtgggttcatccagcaggatgaggggcggggaggagaccagggaacaacacaggcccagcttctgcttcatgccgccggagagctttcccgcaagccgcgtggtgaagcgttccaggctggtcatggcgagcaggctgcggaagcgcttttccctgtcctggccgtaaacgccgtgcatgcgggcgtaaagctccatattttcccggacggtaaggtcttcataaagcccgaatttctgcggcatgtagcctatggaggcctggatggaccggctttttttcacggagtccagattcaggacggagatagacccgccatgcggtttcatcaatcccgtgatgaggcggatcagagtggtttttcccgctccgtccggccccagcagccctacgatttccccggcggacaggcggaaggagacgtcgtccaccgccgcaaaggggactccagcggagtccggaaatattttccggacgttccggcagtcaatcaggggctgggattccgtggtcatggcctgggctgttccggggtctgtgttccggcgttctggtccagggggatggtgacggtggcgggggctcccaggcgcagccggttgtccggatcgtccacaatgatgcgcacttcatagaccagtgccgttctgagatccggcgtttccacgtttttaggggtgaattccgctacggaggagataaaccccaccgtccctttgaagccggtgtccgggaagctgtcattgcgcacggtggcggaaaagccgggctttactttgccgagctgggattccgtgaggtaggcccgcacccatttggtatggttcagggagatgttgtaaacgggtttctgcggggaggccatgtcccccttttccagaatgcggttgcgcaccacgccgttgccgggggcatagagcacggcgtctttcaggttctgctccctgatggtcaggctggctttggcctggttgtactgggccagcgcctgggctacgtcttcctcacgggaaccggccagcagcagttccagctgttttctggctacgtccagattggcggcggccacttgccgggaggcgacggcgtcgtccgcctcttggcgggagatggattttgtttcagccagcgcctccagccttttgctgcgcattccggcgttgttcagcgtagcttccgcggcctgaacgtttgccctcgcctgggctatttcttccgcgcgcgggccgtttttaacgcgcaggtagttttggcgggcggcttccgctatctgccgggcttcgtccgcggcctgccggagccgcaccgtttccagcgtggcgagcttctggccgggaacaaccgtgtccccttcgtccaccagcacggagtcaatacgttcggagatgaggaaagccagatccacctggcgcaggtgcacattgccgtaaagaacggctttgtcctcgggcccggacggagttttccggtagatgagccaggcggccgttcctgccgccgcaaggagaaccaggaggataaccagctttttcatagttttatttatacgtgtgtataatttattgcaagtaaaaatggagcccgcatgacggagaaggaattagcgatttactaacggagggagaacaggcataatccggcgtcttttacttttcccattatctgttatgatgaccgccaccgagatacgccaaagctttctggactttttccgcgaaaaacagcacacggtcgtgccttccgcttctttgatgccccagagccccggtttgttgtttacaaatgccggcatgaatcagtttgtcccgtatttcctgggcgtgtggactcccccgtggacgcccgcccgcgctacggatacccagaagtgcatccgcgcaggcggcaagcacaatgacctggaggatgtggggtatgactcctaccaccacacgttttttgaaatgctggggaactggtccttcggggattatttcaagaaggaagctatccgctgggcctgggagctggtcgtggagcggtggggatttccggcggaacgcctgtacgccaccgtgtacgcgccggacaagagcaagggtgaccccggagagtttgaccgggaagcctgggatttctgggctgagctgttccgttcccgagggctggacccggacgtgcatatcgtgcacgggaatgtgaaggataatttctggatgatgggggaaaccggcccctgcggcccctgttccgagctgcacgtggacctgaccccggaggggaatacaaagggaagcctggtaaacaaggattccgaccagtgcatagagatatggaacctggtgtttatccagtacaatgcggagagcgacggctccatgcgcaatcttccggcgtgtcatgtggataccggcatggggtttgagcgcgcgtgctccatcatgcagtgcacgaacggattcaaggatttttcccgcaaaccgtccaattacgccacggatgtattccgccccctgtttgaccgcctggaagttttgagcggacggaagtacgcggacgtgtatccggcgcccggttccaaaagggtggatgcggaggacgggacccttcaggaggcgattgccttccgcgtgattgccgatcatctgcgcacgctcagtttttccattgcggacggcattctgccgggcaacaatggccgtaattacgtgctgcgccgcattctgcgccgtgccgtgcgctatgggcgccgcctgggctttacccagccgtttttggcggaactggtggatacgctggtggagtccttcggacaggtgttcccggaactggccgcccgcgccgctaccgtgaaggaggttttgaaccgtgaagaggccagttttaatgagacgctggaccgcggcctggaattgtttgacgcggaaacggcttccgccggaaaggtgagcggcgagttcgccttcaagctgtatgatacgtacgggttccccattgacctgaccgccctgctggcggaggaacgcggcctggatattgatatggagcggttcaacaggctgatggaggaacagcgggaacgcgcccgggccgcccgcaagagcgaggtggtgcgcgccctggatttgaagacggacgccgtgacggaatttacgggatacgatgtggacgaatgcgccgctacggtgctggaagtgagccgccagggggattccctgttcatcatcacggacaagactccgttttacgcggaaatgggcgggcaggtatccgatgccggtttgattgaaatcggcggggaaagctaccatgtgatggccgtccagcagatagggaatgcccgagcccatgtggtggaggcccgtcccgggctggaggtgaggcccggcgaccgcgtgcatttgagcattgacgcggaacgccgccgccgcattgaggcgcatcacaccgccacgcatcttcttcactgcgccctgcatcaggtggtcagcccggatgcggcccagcaggggccctttgtttcggaagaccggctgcgctttgactttaacagcagcgccgtttctccggatcagctccgcctgattgaagagaaagtgaacggctggattgaggagtctcttcccgtgcactgcacggaacgcgcttatgcggacgtgaagggcaatgccgcgattgcccagttcttcggcgacaagtacggggatgtggtgcgcgtggtccaggtgggcggatgcagggatgggctggacggggtttccatggaattctgcggcggaactcatattgccaatacgaagaatatcggcctgttcaagattaagagcgagggtgccatcgcttccggcgtgcgccgcattgaggcgatgactggggacgctgctctggaaatgatacggcagcatgttgttgccaagagcctggaaatcgccaaggcggtggagaagatcaaggaagttaattacgagttggcggacatggggctggaacaggtgcctgtccccacgattgaaggcaagccggggctgacggccctgggggcttccgatatccggacggtaaatgattccctggcgcgtttcgacgcctccgtggagcatttcaaacagacggctctggatgcggagaagaagcttaaaaaagcccgcgccgggcagtccgccgccaaggcagacgccctgctgaatgagtggctttccgatgcgccttcttccctgatccaggtggcggagggcgccggggaattgcttcaggaactgctgaacgggttgaaaaagcgccagtatgcgggcgccgccttcctgctgtgcgtggacagttcttccttgctcctgggcgcttattgtggcaaagatgccattgcggacggattgtccgccggagatatgatccgcgaggttgccgctcttgccggaggcaagggaggcggccgtgcggatcaggcccgcggttccgctccgcaggatgccgatcctcaggccctggctgccgccgcccgcaatattattaacggataaaccccttacctgggccctatcggacaccaatcatggacaagaagattttcccggacgaacctgagattcccattttgcctaatttgtttacggcagggaacctggtgtgcggttttttcgccattctgacgatttttgagggaatcaaccaggcggacagcgacgctgtggctgctttttcctattatcagaatgccacttttttaatcttcgcggcatgtttgtttgacttgtttgacggccgtattgcccgcatgcgcgggcaggacggcccgttcgggcgggaattcgattctctggcggatattgtctccttcggcattgccccggcgctactggtagccaaggccgtcctgttccagctgtcccctccggaggtgggttggggcatcggcatcctgtatctgctgtgcgccgcgctgcgcctggcgcggtttaattgcatggcggccgctccccggaaggaaggccagagcagcgattttgtgggtctgcccgttccgatggcggcgggagccgtggtctccaccatgtacctggtgatgtatctggcgggcagggctccggacggggccatggacctgggcgtcttcaaatacgtgattgcgctggcaatggcgggagtctccattctgatgatgagccgggtggtctatcccagcttcaagcatatcaacatgcgcacgcgggggacgatgtacgcgattgtgttcatcgtgctggcggtcatctgcattttcaaattcccgtgggtgatgcccgcagtcattttttccatttatctgctttacgggctggtgcggccctgggtggcccgccgctggcggaacaggctggaagcccgcgatggagaataggaagacttttagaaaactgttcctgcctcttctttgaacagaccatgctgcgccggattgatgccgggcggcggtgtttccgcggcccggttccgggaatgtccctgggtccggcttttttaagggcgggaacgcagccctccctttcaggaccgtccgcaattttcctgcgcggagcgtgcgccggaacggccgggggataaagattcggcgtcccgaggaaagacggagaaggagggaaggggaggaatcgtcccgaaggaccggagcttatttgtttttctttttaaaatcgtccgcgaaggggtctttttccggggcggtgggcacggcgtgcgtttcaatgtccttggtactcttgaccagcgtgatgcatacgggcttgctgcggttgcccatggcgtcataagtgtaaaggaagcggcgcacgagttccttggtgcgggaatcgaacatttgctcttctctcaggttggcgttgccgtcgtagccgtaacgcacgaaaaagagttcgtttttctgcccgtcaaagatcaggcaggagcgcagctctccaaaaggccctcttttgtacagggttacggaaacgaggacattgcggatgttgtaagtggtttttttcatcccttttccgtcccctgttttttcaaagtagctgcgggaaccgtcttcatgtttgaccatgcgggaagaagcggtctggacattgaaatcgtcctggccggcggccagggctccggacgtcatgagcagggggatgaagagaagcaggggcgttgttttcatggtgaaaaaagagtttctgacttattaaagtgatgtatagtggctttgacaagaacgtaattagatgaactggcttgtaaggagagacgtattggatgtggcgcgcggaggcgtgctgatgggaattgtgaacgttactccggattccttttccgacggagggcgtttttatgcgacggaacgcgctgtctcccatgcaaaagagcttgaacggcagggagcccttattctggacattgggggggagtccaccaggccgggggccgcggaggtttccgcggaggaggagttggacagggtgctgcctgtggtgcgggaactccgttcatgcacggatgccgtgatttccgtggacacgcgccatgccgccgtagcggcggctgtgctggaagcgggtgcggacgttattaatgatatttccggattgcgggaggcggggatggcggaattgtgcgctgcggcgcgctgcggcgtggtggcgatgcacatgcagggacggcctgaaaccatgcaggacgctccttcttatggggatgtggtgcgggaagtgcgcggctattttgaggaacgttatgattttctgctggggcgggggctggaaccggagcagatctgctgggatcccggcatcggctttggcaaaacggcggaacacaatctggccctgctgtccaacatggacaagcttcaggtggcaggccgcccggtgctgctgggcctttcccgcaagcgcatgctgggcgccgtcctgggggatgcggagcagggacgcgcgccgctgagcaccgccgtgatgacggtgtgggggcatttgcacggcgcgcagattcaccgtgtccatgacgtggcggaatgcgcccgcgccctccggctgatccgggccgctgaaccgtttgtccgctgattgagccatggaatccgcttcttcccgtccggtattgacgtccctggcgtccattgcattttccctggcggtggtgttcctttttctggcggtacgggggatctggcctttcggaggccgcttcctggagtatatggataacgggcagctggtttatcctaccttgaagtattatgcctccgccctgatgtccggagcgtttgacggagcttttttttatgatgtcaatggcggcgcgggaatccgggtgagccctacgctgccgcatcagctgctgatcccctccacctggattgccgtggcgatgggggattccttcctgttgaaggacatggtctgggtgatgctggcggatgtggcctgcatctgcgtgacggcttcctggttcctgagacgcgtgtttccctccctgcccgtatgctggaccgtgctgctgacggcgggttatgccgtggggggctttttccagaccaagtacgggttcatgcagttcctggaccatgccgccatgttccccctgtttgccctgggcctttaccggctggtgaacgggggaaggggctggctgtatgccgccggcctcttcctgctggctacctccctgtacagcgctttcatggccgtcgtcaccggctggctgttcgcgtgggcctttacgctgcccctgaaggggacgcgggaacgccgcgtgcgcctggcccgcgtgttctggtacacggcggcggtaacgctggccacttgttattactggctgccgatggcggaaatgagccgggattccatgcgttccctgtttatgacgccgcccacgttttttgaattgtcatggccgtttgaccctcccaaattcctggaacgcctttacgcctgtttgccggggatgtcatttgccgctctggcggcggtttatctggcttgcgggaagaaggcgtccccggcgccggacagagggaggcgcctgtttatccttcttctggcggcgtccgttttgcccgcgtttgtcgagcccatccaccgcgccgcccatttatggagctacgtggattttcccgtccggttcggttttattcccaatctggcggtaatgtcgttctgcgcctggattttgtccggcggcaggcttccggggccggcaggacggccatgggggtggggatggagcctggggcttcccatagcggcttttttcttttccctgtttgtcctgaagatgacggctgcggatcttgcggtgcgtcttctgcctttgctgttttttgcatgcgcatggctgtgctggaggcatgtggagggcaaaaggctggcgtgatccatcgcttccgtgatgatgctggggctgcccataggggctgccgcgttctggaagcagggggaggaggagaaagcctccgtccaggcgctcaatgcggaatggctggcgcgcggcatgaaggggtattcaggcttgctgcgcgtgaaggacagggatcgcctgatggtggaaaacgcggattgcctggggcctgtcccgggcattggcaatttccggcatacgacgagcatcgggcatttccgttttctgaaaaacctggggtaccgggatgaattcacgcgcacgtacagccagggaggcactctgttttccgatttgctgctgggccacggttttgtgctggcgtcccggcccatggagggaatggagtgcgtgctttcccgggaaggcatgtatttatacaggcttccgggcgcccgctgggggctggtggttccccagggcgcgctggggctgcgtctggatgggaacgctgatgtgttcagcaatcttaatgccctgcacgccgcgctctgcccatcggcggaaggccccctttatgcggccataacagtgaggacggagatgagcggccccttttaccgggcgggcattccggaatatcccggcgcggtatacgggttcccgcagacggatacggcggaactccgtgtcaatggatgtgcggtgcccgtcatggcggaggcgcagaagacatccggaggaacgagccgcacctataacggggttttggaattgaagcgtgcggccgttgccggggaaaccgtggtggaggggaggatgctgcggaccgtggagacgccccttctggcggctgcggcgtgtacgccggagcaggatgttccggttctggggaaagagcaggataagtacgggatggaggcgaaaggaagcggtggccatgtggaggtggcgctgaatgccggagaaggggaggctctcatggtgccggtcgtgtatgaccggggatggagggcccggcggaacgggatggaggcgcctgtggaaaaggtgggggaattgatggcggtgcgccttctgaaagggcaaaaccgggtggtgtttgattattatccgcctttattgaaagggcccctgctgttttcctccggaacggccgccgtcttcctgctgtatgcatggtgggcgcggcggcatccggaatccacgctcaggaggattgttctggcctccggatacaggctgtttcagtgctgtgccgccgtggtgctggcggctgtttatatggggtcaatcgtgttatttatcgtgcagtccgtgctgtgacggaatacccggaaggcggggaaagaggccagggactgcgtgcggggggatgctggtgtggaacaatatccgcggggcggtaccgctcccgtttttccggttaccggattggcgggaaaaggctttccgttttgaaggatggttgacaggggaatctggcgcggtagagtggtttcatgcagtcttcctattgtccgagtccttatcgatatacgcgccgcgtaacccgtgaagtcatggtggggaatgtgggggtgggcggttccaatcccatccggatccagtccatgctgacgtccgatacgcgggatacggatgcctgcgtgaaggaggctttggagctggcggaggcagggtgcgagattatccgcctgaccgcccagaccaaggcgtatgccgccaatttggagaatattgcccgggaattgcgcgctgccggctgccatgtgcctctggtggccgatatccacttcaagccggatgccgcgatggaggctgccaaatgggtggagaagattcgtattaatccgggcaatttcgttgataagaagaagtttgaagtgcgggagtattccgacgccgaataccgcgaggagctggaccgcctgagggaagaatttactcccctggttctgttttgccgggagcatggccgcgcgatgcgcatcggttccaaccatggctccctgtccgaccgcattctgaaccgctttggcgatacgccggaggggatggtggagagtgcgattgagtttgcccagattgcccgcgacctggattaccattccctggtgttttccatgaaggcttctaacgtcaaggtgatggtggccgcttaccgattgctggtggagcgcatgaacgccctggggccggattggaattatcccattcatctgggggtgacggaagccgggggcggagaggacggccgcatcaagagcgccgtgggcatcggctccctgctgacggacggtattggggataccctgcgcgtttccctgacggaggacgctgtgagggaggtgcccgtggcttaccgcctgtccaatcctttccagccgtcggagcgttccgatgacccggtttccttccctgaaccggagttgagctatgatcccctgaagttttccaaaaggcagggtgggctggcgatgtgttatggcgtgcgcctgggctgggaacagcctgtgcgcgtggcggttcctgacgccgggttttacgccctgcagacggaacgggaggcgatgggggacatgatgcctgaattatccctggggcagctggatgccattgaggtggatccccggtgcgatgccgatctggagccgttgaaggagctggcggaaccgtctattgttactgtgaagaacgggctggctatggagcctgtatatgcgttccgccttctggctgcccgtattgaggacaggcacttgatcctgctgaaggatacgctggtgcccggttccgtttccggggaagacgtgccgctgacggctgcccgcaatatcggctccctgctgtgcgacgggattggagacgccgtgctgattcagggcgagtcggatccccgtttggcttccttcctgggattcaatattttgcaggccacgggaacgaggctgacgcgggcggattacgtttcctgcccgtcctgcgggcgtaccctgtacaatatccaggaggcgacggcccgcatccggaaagccacggaacatctgaaaggggtgaagattgccgtgatgggatgtattgtgaatggccccggcgagatggcggacgcggatttcggttatgtgggcggcgcgccgaacaagatcaacctgtatgtgaagcacacgcctgtgaagttcaatattccccaggaggaggctgtggaacggctggtggatctgatcaaggagtatgggcggtgggtggaccccaagtgaggttttaacgttgagggaacttttttgatgcggagagtgttcatcagcggcggtcacggcggtttggcgcaggccatcgtggaatgtttttccgctgcgggatgggagacggatgccccgagccatgccgcactggatgtgggagaccgttccgccgtacgccgctggtttgattgccatgccgcgtatgatttggcggtttgcgccgccggaattaccagggacaggccgttcctgaagcagacggaggaggagtgggacgaggtaataaatgtgaatgtgacgggatccgcctggtgcggccgatgcgccgccgccgccatggtgcgggagaagagggagggtcaggtggtgatgatcggttcttatgcggcgctccgtccggctccgtcccaggcggcttatgccgcttccaaggctgctctggcgggcctggtgaaaagcctggcgcgggaatggggaaaggatgggattcgcgtgaatctggtgttgccggggttcatgctgacggagatgacggccgtgctgcgggatagcgtgaaagaggcggctttgtcccggcatgttttgaaccggttgaatacgccggaacaggctgcggcgtttatcctgtttttacaggatgttcttacggcggcttccggccaggtgttcgatctggacagcaggattgtttaataatggacagcggatttattatccgcgttctcccctgctgatgatatatttccaagaaaatcatttttttaataaaaaagatagcctgctatgattttgaaaacaggaaatcttgaaaaacaaggtttttccggtcttttggaaagtgtgtaaacatggatagattcctctttccgtgtttgtaattccatgttttcaacgggaaccggatgtccctggtgtatcaaattttttcttaaattattcttcttcaatattaaggcttgaacgcggataataaatccgtagaaatgtttctccatgagtttgccgctggctgatgatgaagagaaaggaaagcgtttttcctgtggttgtccggaatatatttccccgtcccggaattatggaatagatgccttgcgcattgtcgccatgatgatggttttaattcttcatcttttggcctccattgatgttttgtctttggagaaccatggggccgcttcctataatgtcgggtggctgctggagattgccgcttattgcggtgtgaattgttatgcgttaattacaggatatgtgtgctgcgacggaacgttcaggtatgaacgtgtggtttccttatggtttcaggttgttttttatacatggggcagtttgctgctggcgctgttgtttttcccccaggaggttcagtggagcaatattctgcattccctttttcccgttttatccggccagtattggtatgtgacggcgtatgtggggctgtttttcttcattccgtttcttaacgccctggggaacaggctgaccaaattacagttccagtatcttctggttaccgttttcgtgctgttttccgttattcccaccctgcttcacacggatgtgttcccggtggaagaagggtatagcatctggtggctgggcatcctttacatgctggggatgtatgttaaaaagcatggcttgctgacgggaatgaaaacgcgtccgttatggatgttttatgccggatgcgtatgttttgcctgggttttcaagatggttcttaacgtggtgtctccatacctgattgggcagatcaagggcggtggaatgtttattcgctataattctccttttattgtagggacggcggttgccctgttgctgattttttcccggatgcatttttcatcccgaagggctgtctcctgtatttcatggctggcggcagcgtcgttcagcgtttatgtgctgcattgtaatgctttgataggaaaatggtttttgtgggatgtctttgagtggacagcgtcttcttcctcagccctgatggttgtgaacgtgttggcaatagccgccgtggtttatgccggatgcgccttggtggactccgtgcggcgttatttatttaagctcatggacgtggaaaggggcgcccgggcggtgacgggcttttgcggaaagctggggcatgcgttccggaagatatgccgccggatagattcgcatccctaaggatgagggaatgtcctgttccggcggttccgggcggtttttgtctggagctgggctagtttttattatcgcttttatccaggagggttttaagccagggaatgaccaggtcttttttgaagaaatggttgcgcggattcacattggcgaaacggaaaaaggcgtccctgtccagacctgcgggcaattggctgccgtgccagcgttgggcagggtccgcaaaccggggctggtgatggtactggaaatgatccggcgccccggccatacggtaggctgcggagatgagctggaagtccctgtccaggccgccttccgtgcaaatgacagggcgcggagcgagagccgccacgatgtccgggaagtcgaattgtttccagaagcccggaatgaggtggcggatggagttgggagcggaacgcacgcccctgccgttgggcatggtcatggttttggcacgttccagcgtgcggcacagaaagtcgttatatacgaaagcaaagatatccgggttcaggctgcccagaaccatcatgggttccgttcccagggagaagccgctgaggataatatggtttttttgcgcccaggggcgtgttttcacccaatccagaatacattgatccgcgtaggaggtgtagcccagccagctccagtccatttccagcaggaagcgggccaggttttcataatcgtgtgaagaacggcctgcggcgtgttccgcgtctccttcttcacccgttccggcattgtccaccacaatggccgcccatccctgcctgacataatggaaagccatggcgttgttgcccggctgctgtacggaaggctggtccagatccggtgatgtttcccccgccagctcttccttggtctggtctgacccgggaatgcagaatagcacgggaaccggatttttgtctgaagcgttgttcggcaggagcaccaggaacggtacggcggctcccgggaagggataggcttcccatttttccacccggtagtgttctcttggcacggtttttaccagaacgggggcggggatatccgcctggggggggaatttcatcagttgttgcatggctttccggactttttcccgccaggcgaggaaatccttcggagccatatccggggaaaattcgcatgccggacgcagtttttccagcatggtctggacgatgccccgggaggaaacatgccgctggtcgctccgggatgaatgaagcaccgcccagtctgccgcccggaatttttcactgggcggggtaagggagaaggagggaagagaaagggatgccaatagaagagagaaaaaaacggcgggctgaatagtcatgaagccagattgccataaaagaagcttccattgcaaggttgcagcggtggtcttttcaggttgttcctgacgcatcggaagcttgagtttttccgggcagggcggtagtctggccgccgtcatgatggcggggggtaagagtcttggaagcccggaaccgcgggtatgcggcctgggcctggcttccggcttcggcatgggggcggcagtccatcttgccggggtaagggaagggcgcagagtgttgaagccgttgagcgaattgtggggcgaaggtaatccctggggcgatgtattgagcggatggattccagacagggaattgttatgcagccgcaggaacggccctgcttcccagctggcgctgctgttggcgcgccaggccgtggaggacgccggatggggaaggaaggaattgagggatgccgccctgattgtgggcagttcccgcgggaatgcttccggatggctgagcccgtggccgggacggcggcccatgaaaattttggccgttcccaattccctgcatagcgaacttgcttcctgcgtcagcatcgaattgggaatttgcgggccttatcacgtgctggcgagcggctgtgccgccggcctggatgccgtaggcatggccgccatgctgatgcggcagggagttgttaagagagcgctggctatcggtctggatttgcctttgtgccgggagctgctggggacgtactgggcctccggcatgctttcccgcaatggtttgaatgatccctacggccctctggccgacggcatgtgcatttccgagggaggggcggccatagccctggaattgtcttctgctccaggtatttatgtgaaggattatctggtgaattccgatgcctatagcccgctgggcatgccggaggacggaaagagcatagccgccctgctggaggctgctttgaaaagtcgggatggagcggttcctctgaccgtttgtccccatgccagcggcacggcggggaatagcgtgtctgaacgggctgctttgaaaagggtttttaaagacggactgccggatttgaggatgatgaagccgtggacggggcatgccattggaggcagcggaattttggaactggccctgatgctggtctttgccagggagggggtattgcctcccaatcctccctgggccaccttcccggaaggcggcgcctgttctgcggaggagttgccgttggccggggggcggatgctggtcaaatccgccgcttccatgggcggccataatgtggtgctgagtctggctgtggacggttgaatattgttgaatagtgaacgcttatgaagaatcctgaacagtttttgtcagagttgaagtctgcggggctgctgcgcgtcctgcgggatgtggaatgcctgcccggaggaatggcccgtctggcggatggccgggaagcggtcaatctggcaagcaacgattatctggggctggcccaccatccgtccctggcggaggctttttcccgtgcggtgcgggatgaaggggtcggagccatggcatcccgcctggtgacggggacgcggcgggaacattcctgtctggaagaggccctggccgctttgaaggggactgaagcggcggtcagtttttcctccggttatgctacctccctgggagtgattgcttctattgcggaacgggaggatacggtgctgatggataagttgtcccatgccagcctgattgacggggcgcgtttgtccagggcgcgtttgtctacgttcctgcataacgatatggagtcattaaggaaaaaactgcagcatttgcgggacgcgaatccttccggcgggattctggtagtgaccgaatccgttttcagcatggatggagaccgtgccccccttcgggaaattgtgcgtctgaaggatgaattcggcgcgttgctgctggtggatgaagctcacggattcggtgtgctgggagaacacggggccggactggcggaagagctgggtgtttcctcccggatagattttcaaatggggactttgagcaaggctgccggggtaagtggtggatatgtggcctgttcccgcgcctgggcggatgtaatggttaattccgcccggtccctgatttattccacggctccgcctcccgctttggccgccgccgccctggccgcggtggaagtgatccgcagcggggagggaaaggaattgcgccgccgtgtttccgtgctggcaaacagtttgtccgccgcactggggatgccgggaaggcctctttcttccattttccctgttgtggtgggagagaacgatgctgccctggctgcggcggatgccctgctggaacagggctttctggctcccgccatccgttatcctacggttccccgcggaacggcccggttgcgcattacggtaacggctgcgcatgaatccgggcaggtcacgcggctggggacggcgttgaaggagctgctgcatgggaagtaacgcaggcgttgtttttggttctccgcattggagccggttcctgtttttatgcggggcctgccggaaatgggattatcctcattgatgccgccataaaaaaggaagaaggatatctgatgcccggcggaacggaatgacatccggatgtcctgaatggcagagcttgcatcttgacagggaagttttcttccagtaaggggaaagaatgaaggttcccaaaggaattttcactgaaccctataaaataacgtcatgatgaatacttctgattcttcttccccttcgtcctgctgcagcggttctccttcctgcacggccgctcttgttctcggcattatcgccctggtattggcattgatcggttttttcccgtgcctgggctggattactctgattcctgcggggctgcttgccattattgcactgatcatgagcattgtggctgtcagtaaaggttcgcccaaaggggctcttgttgttgccattatcgcgttggccctgtccgccgttgcgggaattgtccaggcatggatggccagcgctaccgtgacttacatggaacagcaccaggattatgtggaaaagaaggctctggaaattcaaaaggagcttcggcagatggagcaggaaaacagggagtcattgaggcggtccggggaggcggatggaatgtcccctgcggatggaacaggctcccaggatttgtagttcctgaacctttttaggaagatcggcgatgaatggcgggcgctcttcatggcgttcatgccgtgatagctgggtagtcaggaaagtatggctgcctgtatgggctgttctgtcctgcctgttgctggcgccctccctcatggctctggcaattagccctgacaggatgaattctctggcggcttctgttgccgtgccgcatcgtgaatgcccgttgtgcggcatgacgcgagggtatgcggaaatggcccgcggggatatacgcgccgcatggggatggaaccgaggagctccggtcttgtttatggcaggactgctcaatggaggggctgccgcggtttatttggcatggcgctggcggagaagggcgggaagccgggaaaaggaaaatagttctcccgcgtagcatgccgcaatgggaggaaccggctccccctgtccccggtaaatgacacggcggaagttttgaagcggggcctgggaagttcttctgcctcctgtttattccctgtaatggggctggcgcctggtggggggcggaatgatgttgagtttttattgaatgaattccatgccaaattcttcgtagtgccgaagatgaagttcccctgcccaggttgagcgttttgccggagggatctgcgttgttcctgaaaaggagaggggaatgcggcgccggtgtttcatgccttaggattattttttgtcaggaaggggaatagcttttctgggaacggccggtattgcccttcatggaaggagtgttcgtggtgtggaatattttgatttttctttatttcggtattttgttgataatattgttttctattaagttgtgtaattttctaacatttttattctaggcccggttgattttatatatatagtttttggatattgtatgaatatttgcatgtccatctatagatcaatcgaattgcggaagaatacatccggaagttataaggtccggctgactatcgaccggggaagcaagttctgcggcgccaggaaatctctcggtctcggcacccatcgggaggattgcgccctaagacgtgcctacctgatgcgatgcctgctgtttcatatgggatggtttcccggcggaaagattgccgtcaggaattcagccgaatgcggtatcaaggatgtggtttgggacagcatggagtgttcggaggattccggaatgttcaagcttgccggaaggggaggccgcatggctgcggatgagaccatggccatctggttccagacgaatgaagacgggaaggtccagtgcctccgtctgctcatttccggatggaggaaggatgaccgggcggatgatttgagggtgctgattcagggaatgcggcattgcgccttggaacagcgccagcatccctgccggattttgaatattgaaatcggcgccggctctttcgcggcatcccgggatgaatgtgtgctgaaaggataggaaaacggattgtcccagataccagtttatcctggttttattctgaagacgccacattccggttgggaaatccggctgtatgtccggcatgcctggcccggagtttttttggccgtcattgacgacgggaaggttgtccgtattccgggcgaggcgaaggcgcaggaggaatggtgcgctgcctgccgggaaagggagttttgtttttcctgcatgaaaaaacccccggatggaatgattgccatccgggggtttgtttaagggatccggctattttttagcgggcagtttcacctgaatgtgaatgtcgcgcagctgacggtcttccgcggcggcgggggagtcgctcatcagatccgctccccggttgtttttcgggaatgcgatgacttcgcggatggattccgcgttgcaaatcatcatgaccaggcggtcgaggcccagcgcaaggccgccgtggggcggagcgccgaagctgaaagcgtccagaatgtggccgaattgttcgcgggcctgttcttccgtgattccgagcgccttgaacatggcggactgcaggtcgcgttcatggatgcggatggaaccgcctcccagctccgtgccgttgagcaccacgtcgtaggcctgcgcgcgaaggtctgcggagagttccccgctgagcagtttttgttcgtcttccttgacggggcgggtaaaggggtggtggatggcgacccagcgctgctcttcctcatcccagcccaccagcgggaattcaataacccacaggaagtcgcgttccttgttgtccttgagcagttccatgaattcggcgcattgcaggcgcacgcggcccaggatatcgcaggagggttcccacgggccggcggcaaagagaacgaggtctcctgtttcgatgtctagggcttccgtgagtttttgcttttcttcgtcggaaaggaatttggagatggggcttctccagtcttcctcgcgcaccttgatgtaggccaggcctttggctccggcttccacggcagttttcgtcagggcgtcaatctggccaacggaggcggaaccgaatcccttggcgttgatggccttgaccacgccgccgttgcttacggcggaggcgaataccttgaagccgctgttttcaaagatggaggagacgtccgtcagcttcatgccgaagcggcgttccggcttgtcggaaccgtactgatccattgcttccttccaggtcatgcgggggaagggggtgggaatgtccacgcccagggattccttgtacacgcgtttgagcaggccttccaccaggttgtagatgtcttccggcgtgatgaaggaagcttcaatgtccacctgggtgaattccggctggcggtccgcgcgcaggtcttcgtcacggaagcagcgggcaatttggaaatagcgttccatgccagccaccatgagcagctgcttgtattgctgcggggcctggggcagcgcgtagaatttgccgggcgccaggcgggatggcaccaggaagtcccgtgcgccttccggcgtggatttggagaggatgggcgtttcaatttccagaaagccgtgctcgtccagatagtcgcgcgtggctttggtgacgcggtggcggatctgcatgttgcgggccatggccgggcggcgcaggtccagaaagcggtatttgaggcgcaggtcttcgttggagagggcccgatccagctggaaggggagcacgtcagccttgttgatgacgttcagggtgtctgcggagacttcgatttccccggtggggaggtccgcattggtcgtgtccaccgtatccgttttcaggcgggcggccacggtgccggaaatctggatcatgtcttcggagcggagctgctgggaggctttcgccacatcctgattgacttccgggtgaaagactacctgcgtgatgccggagcggtcgcgcaagtcgataaatatgacgccgccatggtcccggacggaatctacccagccgatgagggtggtcggcttgccgatgttcgcagcgcgcaattcgctgcaggtatgagtgcggtatgagttcatctttattgaaaatggaagaaggggaaagaacggtgtcaattgcttccggtgagtgaagccacggcgtcaaacaggtcgtccatggcgacgggggatgaggtgcgcgcgcccaggtcgcgaagttccatgaccgggaattcatctcccacgatcaaggctgcgcgggcgccggatttgacggccttctggagctgtccgttgactttggtgagcgtgaggggaaggttcacactgtatccctgatcccggagggcggaggcgatggcaagaacttccgcgcggcggctttcagacgcctgaaccatgaagatatcgcagcctgcggaggccagcgccgcatctttcagcgccctggcatggggcgtctgttcaataaggtgggtgatgacggcatcccccatggcaaagccggttgccggcatgtccactgcgttgttggaaagagcgcctaccagcgtgtcgtaacgtcctccgccggctacggcgcgcaggctgcgctgtgtgtcaaagatttcaaaaaccagaccggtgtagtaggccagtccgcgcactacggataagtccagcttgacatagccgtccagcccgcgggccgttaggtctttcatcaggatgtcatagcgttcggacgctccggcgggcgggttttcaatgaaggccaccagatcgccgcggctgatatgaaaggcgtccagcttgcgctggcattcttccgggcggtcacgttcaaatttgtccacgatgccgaggaaagcgggaatatcctgttcctgcacgccgtgttccgaagcaaacctgatccaggcttcccggtcagagacgcgcacaatgaagtcgttttgcgtaaagcccagttccctcatgcagtcgatggccagggctatcagttcggaatccgcccacgcggaggcttctcccagaatgtccgcattgaattgataaaattcgcgcagacgccctttctggggtttttcataacggaagcatgagccgatttcaaaccacttgagcggtttggtgtattcgcgctggtaggcggctgcaatgcgtcccagggaggcggtgagttccgggcggatggtgatgtcccggtccccctgatccgtgaagcggaagagctgggtgggcagctcgcctccgctctttttaagataaagctccgtggcttccacagtcgggccctcccattccaggaatccgtaacgatgcgccaccttcttccatgcgttgaaaagatagttgcgcacggcgcagtccgccggtgcaaaatcgcggaatccgggaagtggttgaaagcgagcgtctggcataacctggaaaaaaggatgttgtctgaggacgaaacagtttacagaattcctatgccttggcaagtccacatgcttatgatgaaggaatttcggtggaaaccagatgaatgaccctatgcaggaggatggggacggttattccggttttacatgaagtgagggaaatgggaaaaggattaattattggcgattttagtgttttttataatgatccggattttttgcgcgggctatggggaatgaaggtttaagtgcctgcggatttgtaaccggatgtcaaacaatgatattgaacagcaaggggaaatgataagaaggtgttctcaaaagtttttctgcgtatggagcatttcatctttccctttatagaaaaatattttcctcccgctttaaaaagaaaaccggggcagttttgtttgatttcataggagtatgacgtgaaacgaatgagttttttttctctttgggaatctaatatcagtattgattatgtgtaaagaatgtggatgcgggggggagctctcccatgaaagtcacggccacggcatggacgtccatgttccggtgttggatgccaatgaccggctggcagagcgcaacagaggtttttttgctgcaaaaaaccttttggttatcaatgttttttcttctccggggtcaggaaagacttccctgttgcagaagacggcggagatgctccgcggccgtgtgcgcataggggttatcgtaggggatttggcgacggataatgatgcggaacgcctgagccgagcggatatccccgtggtgcagattacaacgggcaccatgtgccatctggacgcccgcatgattgcggaggccatgaagaaaatgcctctggacgatctcgacgttttgattattgagaatgtgggcaatctggtttgcccggcttcctatgacctgggggaaggagtgcgcgtggtgctgctttccgtgacggagggtgaggacaagccgttgaaatatcctcccatgttccattctgcggatgttgccctggtgaccaagtccgatctggcggatgccgtggattttaaccgtgacgccgccctggctgcactgaacaaggtggctcaccatgcgcacgtgattgaggtttcttccaagaccggcgaaggaatggaggcctggtgcgaggagattgtggaacgtgcgcgccgcgcccgggaaggcacgattcagcatcatggccatcacaaccattgaacaggccgccgcggcattgaaatttgagatagccggcatggttcagggggtcggcttccgtccccatgtgtaccgtttggcggtacggcacggattgaaggggtttgtgcgcaatacggagtccggcgtggagattcatgtggaaggggagcccggcgctccggagcgtttctggaccgcgctgatggacggcctgccggagcatgcccgggtttatggagtggagcggatcgtatgcgagcctgccggttttgaggaattccgcattgaggaaagcgattccacccccggaggcgttccggtgatgctgccggatctggctccgtgcccggagtgcctggaagaaatgcacgacccgtcttcccgccggtatcattatccgtttaccaactgcacgcactgcggtccccgctattccattattgagacaatgccgtatgaccgagcgggcaccagcatgaaggggttccgaatgtgtccggagtgccggagggagtaccaggatgtggaggacaggcgttttcacgcacagcctatcggctgcccgtcctgcggtccttccgtgaaggtgctgttttcagatggttcagaactggggttcggccatgggtttgatacccccgcggcacaggtggcatgggtgctggcggacggtttgattgtggccctgctgggcgtaggaggttttcaattgctggcggatgcttcttcggaagctgccgtcaggcgtctccggcggttgaaggagcgtgacgccaagccttttgccgtgatggtgccggatgtggctgcggcggagaggctgtgcctcctgtcggaggaggaaaggcgcctgctggcttctccggccgcccccattgttctggcccgggggaggaaggatgtggatctggctccttccgtgtgcatgttcagccgttttgtggggataatgcttccgtcttcccctcttcatgcgctgctgatggatgtgtggggaaagcctctggtggtgaccagcgggaacctgagcggcgagcccctgtgcatctccgtggaggaggggctggagaaactgggccatgtggcggatgtgtttttggtgcatgaccgtccggtagtgcggcccgtggacgattccgtggtccgcgttacggacggcagggccatgatggttcgccgcgcccgcggatatgccccgcggcctgtgtggcgcacatctgcggcggctcccgacttgctcgccctgggggccggactgaagaataccatctgctggctgaaaaggggcgtggctgtcatgagccagcatctcggtgacctgagcagtgcggcttccctgaacgcttttgagcggacggtggaggcgctgggcagaaccctggatgccgttccgcaggtaattgccgtggacgcccatccggacggccccacttttgcccttggccggcgtctggcgcggaagtggaatgcaacggttgtccctgtgcagcatcatcaggctcatgtgctggcctgcgccgtggaaaatgaaacgccgtttcccgctttgggcatagcttgggacgggacggggttcggtacggacggaacggtatggggaggggaattttttgtgttggaggaagagggtgagccgcgcagggtggcctgcatcaggccgtttcttctgcccggtggggacgaagcggttcgggagccttcccggtgcgcctgttccctggcccgtcagatggggccgtggcgtacggaggggcttgataagcgtctggagagggggatgcctgtgcggaaacgcgaggttctggaggcgatgatggcccggaatatccattgtccgtccacctcgtccatggggcggttgtttgatgccgtggctttctggtgcggttttgacggtgcggcagggtgtgagggccatgccgccatgatgctggaatcatgggccgcggaagcttccggggaaaaaatgccgggggacgcgtatgaatgggtcatgcatgaagaagagggattgctggaactggattggcggccgttgatgaagtctgtggatgaagatttgttggaaggcgtttcccgcggctgcatcgcccgcaagtttcatgagagcctggtgaatctggtctttgacgtggcggagcgtttctgcctggataggctggtgctgggcggcggatgttttcagaatgcctttttgcttgaaggactggcgggaatggcccagtctagaaggtgccagttggctctgccccagcgggtgccgtgcaatgacgggggaatttccctggggcaggttgcggcggtcgtacgccaatggaaaggatagaatatgtgtttggccgttcccggaaagattgtgagcgtcaatgagacggaccctttgttcagattgggggtggtggactttggcggcgtgacccgtgaagtgaacctggcctgtgtgccggaagccgtgccgggggattacgtcatcgttcacgtgggcatggccctgagcgtgctggacgaggagaccgctcttcaaacccgcagggaaatgagagaaattgtggaaaatacggatccggtgtaaggaggggcgttttccgaattcaaataatgatttatgcaggaggaagcccggcagctgattgaagaattgcgccacgctgtgacgcgtccgtgggcggtaatggaggtatgcggaggacagacgcatgcaattgcttctctggggctggaggagttgctgcctcccggcctgcgcctgattcatggccccggctgtccggtctgcgttacggcggtggagttgattgaccaggccgtggaattaagcctgaggcccggcgtggttttgtgcagctacggggatatgatgcgggtgccgggctcccgcggggatttgttttccgccaaggccgggggagggaacgtgcttttgatgtattctccgctggaagcggtcgcttatgccggaagccatccggatacggaagtggtgtttttcgccgtaggttttgagacgacggccccggctacggctcttgccctgcagcaggcccgtgcattggggtatgccaatttttccgttctctgcgcccatgtgctggtccccccggctctggaatggctgatggaccaggatgagggaaggccggacgcttttttggctcccggccatgtctgcgccgttacgggggaaatggattacgggcgtttggccgcccgttaccggacgcccatggtggtgacggggtttgaggctccggacctgctccgcggcattttgatgtgcgtccgccagctggaagccggggaatatgcagtgcggaatgcgtacggacgttatgtgaaacccggtgggaacacggcggcgcaggaaagaatgaatgaagtttttgagccggaagaccgccattggcgcggtctggggctgattcccggcggcggcatgaggctgcgccgggagtggaatgacatggatgccgttctgcgttttgaatgcggaaaggggaagccgggagcggataaagcttccggatgcctggccggaaaggtgctgagggggctgattcgtcctggagaatgcccttttttcggatcgtcctgcacgccgctggccccgctgggggctcccatggtgtccggggaaggggcttgcgccgcttattatcattataaaagaagttgatgtcatgtttgagtgtcctgttccggagcctgtttccgaccgtatccagatggctcatggcggcggaggccgcttgatgaatgagctgatccgttccgtgtttctgagtgccttcgggtgcccttccggaggcgtgcagaatgacgccgccgtattggagattcctccggggaggctggcgatgacgacggacagctttgtggtgcagcctttggagtttcccggcggctccatcggttcactggcggtgcacggaacggtgaatgatctcgccatgagcggcgcggagccgttgtatttgacggcgggctttattctggaagaagggcttccgctggaagtcctggcccgcgtggcacgggatatggctgccgcggcccgtgcggcgggcatccgtattgtgacgggggatacaaaagtggtggagcgcggaaagggggacggcatttacattaatactgccggggttggcatcgtgcgccatgggttggagatcagcccttcttccgttcgtctgggggattccgtgctgctcagcggggatttggggaggcacggcatgacgattatgagcctgcgcgccgggctgtctttcggagacggcctggaaagtgattccgctccgttgcatgaatccgtggccgccgtcattcgtgccggtattcccgtgcattgcctgcgtgacgtgacccgcggcgggttgaccgccactcttgcggagattgcggaatctgccggcctgacagtgaagctgaatgaaatgttcattcccgtgcgtgaggatgtcagggcggcgtgcgggctgttggggctggaccctcttcaagtggcctgtgagggacgttatctggctgttcttccacgggagcatgaggaagaggccctgaacctgatgcgcggctgcagcgtatctgccggagcctgcgtcataggccgtgtggaggaattggggacggcgcccctgctgatgacgggacttcttggagtggagcgggtgttgacgatgccttcaggaatgcagcttccccgcatctgctgattcctggtgctgcatgattggcgttttgtggcagggaagcggtggaacccgcttccctgccggtccggtgtttcataggggtgccggagcggctctgtgcgcttccgggggaaagcgcagccggcttggtatggggaactggttgttgggagatggttcaggagggagtgtctttacctgtcccggcatcgggcaacgcttttaatgccgctttggcctgtgcatggtcctgggaggctgccttttccagccattcccgggcagtttccaggtttttttccacgccgaatccgtacaggcagatgattcccatgttgtattgctcggaggcgtagccggctctggcggcgcgaagattcctgttttgccattccctggcttccgcttccgtgaagtcctggctcttgcagaattggtcccacgtttttccgaatttcatggcagccctcgcaaatcccgacagggcggattttctggtgtattcatccgccaggcgcatgtttttttccactccgtcgggtcccagcctgtacaggtgggccagtccccagtatccgttggggctgcccagatccgccgctttttggaagagctgcagcgcgtccgggtattttttatgggacatggcgaataccgcattggccaggaagcgttccgctttgatgaattcgtaaaattcgggaatcgccgcccattcggatttaagtttgttcctgtctttcctggatttgggaggcatgccggaaggcggggatattcggaaaacgggaatgtagccggaagcgcccatattggccagcccggccatcagaaagcagcccggctggaggcgccacatgtgcatgtacaaaacgcgctctgctggcagagattccttctcaatccagtccggcaggttcatgggggggccgtaaagtcccgtcaggccgttcagcatgcgcttgtacagggatttcaggcgcgtatcgtattcctctttacccgctttggtggtggagtaaaaggaaacggctttcagacctccatcctttccgtactcgaaatgcagggagaagaaaaggcctccaataggttttttcgtcttgtaggctccgttcagccctgtacggctcaggtaggcgtctgtttccggcccttccagggatttgcaggttttcagggaattcagaagctgggattcctgcaaacctgtttccagggtccgtaaagaggcgaggcggcgccgcaggaagctgtataaagcacagccatgtagcgatagcaattggtcgatttcatgggatagatagggcagggatggaagtggtgcttcaatagcggattaggaatccgaatgaagtgttcaaagatgtttttatgaaaagcaagtatattacaatcaatagtttatattttgttccaacaaatttattttgttgagggttgtgtccgggaaaatgatggatgattttggagaaatgcatttggtatgaaaaactgatattgacgtcggattcctaatccgcagtgtttaaaataggttgaaaaatgttggttaacctttttgttatcagcatattaaaaatatgcatcctgttttcctgaagtgaaaaaggcggaaaggcgcgtctgttgtcccgcctcattcttccgttttttttacatggaaatcgttattatttttattaaaagtctttctgaatattcattcatttccgttttgtgtatcccatatgcatgcattgtggcggatttcaaatccgcatgtcagcgaaaaaaggaattggtgtttccttattgattttattatcaatggataaaatcaatattggggattgtttctttcaggatgcgttgtgatttttttctttctctatacgatgaaagtccttttttctcaaaaaatttgattgactgcggatttgaaatgcgcagatgaactcgcatggattgagagcgtttgatattcaatgggctgtttctttttttgcagtaatacgcagttttggaagatgtcctgataaaaaaagagggctcatgatacgtacccgtacgggaaaaacgggaaggccgtggcggaattgctccggagcggctgttgattctgccggggctgcgagcataaccggatgtttgtgacggtttcgtttccggccgcatcttgtttgaggaagccattccgctcatggtaccggtacatgagaattgatgtggtaacggatacgtatgaacctgatgtaaatggagtggccctgacgctggggcgtctggtcggcggcctccggatgcgcgggcatctggtgcatgtgatgagggcttctgaacggaacggctctttcaaccctggggagacggctatgccgtcccttcccctccccatgtaccatgaggtgaagatagggctgccttctgcagacaggttccgcgccagatggatgaaaaaaaggccggatgtggtatacgtggctacggaaagccccatgggagcgtctgccgtgaaggccgcccgtacgctggaggttcccgtggtgatgggattccataccaatttccaccagtatatgaaggattaccatttctccagactggaaacggccgccgtgaattacctgcgcaaactccacaacagggcagggatgacagtggttcccacggaggaaatgcgccgtacgctggaggggatggggtttgaacgcctttccgtcatggggcgcggagtggatgccgtcctgtttgatcccgccaggagggatgcttccctgcgccagtcatggggcgtctggcgggatgaagtggtatttggcgtcgtggggcgtctggcgcgggaaaagaacctggtgacggccctggggctgtacacgcgcttgcagagggagtttccggattgcggcatgaaaatggtggtggtaggggacggccccatgatgaacagcctgcgcagtgagtttcctgatgccgttttttgcggaatgcgccgtggggaagacctggcgcgccattatgccgccatggacgttttgctgttcgccagtgagacggaaactttcgggaacgttttgctggaaggcatggccagcggtttggctacggtcagctaccggtatgccgcttccgcagatatggtgctggacggcatcaacggccttcaggcggagaaaggggatgaagaggggttttattccgccatgcgccgtctgctggaagacggggagatgatccggaggcttgggaaacaggcccgcaggacggtgaattccagaacttgggattccatccatgacaggtttgaagaactgctggcttccgtggcccgggaggaaaacgggaccggctgcgcccgccccccgcgggatgccgtgctggaatgccgcacggtttttttgtcggaccttcatctgggaacgaaagactgcaaggcggacgaatgccggaagtttctgaaacatgtccggactggaaaaattgtgctggtgggggatattgtggatgcttgggctttgtcccgcggcagccgctggcggcggaggcatacgcgctttgtccgcaccttgttgaaaaagatggaacaggaggatgtggaagtcctgtacctgcgcggaaaccacgatgatattctggaaaaattcctgccttttcatttgggcggtttgaaaattgccagggagtacgtgcaccaggctgcggatggaagacgctacctgtgcgtgcatggggacggttttgacgccatttccaccaatcaccggtggctggcgatgctcggctctctgggttatgacgttttgctgatggtcaaccggttttacaacaaataccgcgcctggcggggcagggaatattattccgtttcccgcgccatcaagggccgcgtgaaatccgccgtcaattttatcggaaaatatgaggaacagcttcaacgcctggcggtaaagaggcagtgtgacggcataatcgccgggcatgtgcatcatccggcggataccatggtgggaaaggtgaggtatctgaattgcggggactgggtggaaaccatgagcgcagtgctggaatacggcgacggccgtatggaaacggtgctttacaaggattttatgaagcgcctggcatatggcaaatgcggaaccatggaggacgcggaaacttctcccggcacgggggattcatgacggaacggcctttatccggtttcccccggaagtgggacaaaatgactttgtgtgacattttgtctcttttctggtgtgacattatgtcccgttttcctttgtcgggaaaatagaggaatgaaaggaaaaacagcgtaatatgattataatatgacatttgcgtttatttttcagtatgccttgccagattggcatgccatttgcaacaaaagaggcaagaatatgagtttgcctgcatgatgcttcaggtcatgaggaaatcaaatctcaacgaaatccattcaaaacaatctaaaataacgatatggctaaaatattaggaatcgaccttggcacgaccaactcgtgcatggctgtgatggaaggcggtcagggtaccgtacttgaaaacagcgaaggtgcgcgcaccactccctccattgttgctttcaccaaaagcggtgaacgcctcgtggggcaggccgccaaacgtcaggcggtaaccaacccgaaaaacaccgtgttttcctccaagcgcctcatcggccgtaagtacagtgaactgacggaagaagataaaaaggtgccgtacgaaattgtggaagctcccaacggagatgcctacatccgcgtggatgtgggcggtgaaaagaagaccttttccccccaggaaatcgcttccatggtgctggccaagctgaaagccgatgcggaatccaaacttggcgaaacgattacggaggccgtgattaccgtccccgcctatttcaatgacgcccagcgcaacgcgaccaaggccgccggtgaaatcgcaggccttaaagtgcgccgcattatcaatgaaccgacggcggcggccctggcctacggcttggacaaaaagtccaatgaaaacattgccgtatatgacctcggcggcggcacctttgatatttccgtgctggaaatcggcgacggagtgtttgaggtgaaggcttccgacggcgacacccacttaggcggcgatgactgggacaacgcaatcatcaactggattataggcgagttcaagaaagactccggcatggatctttccaaccagcctgatgccattcagcgcatcaaggaagaagcggaaaaggccaagatcgccctttcctccacccagagctatgacatcagcctgccgttcatcacggcggacgcttccggccccaagcatatccaactgacgctgagccgccccaagctggaacagctcacggaagaccttctggaccgcacccgcaagcctgtgctggactgcattgctgcgtccgggttgaaaaccggggacattgacgagctggtgctggtgggtggcatgacccgcatgcccgccgtgcaggaaatggcccatacgctggccggcaaggaaccccacaagggcgtgaacccggatgaagtggtggccctgggcgccgctattcagggcggcgtgcttcagggggacgtgaatgacgtgcttctgctggacgtgactcctctgaccttgtccattgaaacgatgggcggcatcgccactccgatgatcgaacgcaacacgaccattccggtgcgcaagagccaggtgttctccaccgccgctgataaccagcccgccgtggatatccgcatttgccagggcgaacgcaagatgtttgaggataacaagctcctcggcaacttcaagctggacggcatttcccccgctccgcgcggcgtgccgcagattgaagtgacctttgacattgacgccaacggcattctgcatgtatccgctaaggacaagggcaccggcaaggagcagaaaatttccatccagggctccagcggcctttccaaggatgaaattgagcgtgccaagcgcgatgcggaagcccacgcggaagaagacaagaaacgcgctgaggaaattgacatcattaaccaggctgactccctctgcttctccgtggagcgccagcttaaggatatgggggacaagctgcccgcagacctcaagcgtgaaatagaagacaaggtaacgcgtctcaaggaagccgtctccaagaaggacgtcacggcgatcaaggctggcaaggaagacctggaatcccgtctggaagccctgtacaaggcggcggaagccgcccagcagtccgccggggcagccggccccatgccgggcgcccctgccgaagaagagccttccgacggtccccgcaaggcgaaaggccgcgtggtggacgctgaaatcgtggacgacgataaataagcaacccccttcccgccggagggggaagcaattccccctccggcggaacattacatcccgtattactcatctacaacaacatcaaaaaacatactatggcaaacatcaaacccctaggacaacgtgtgctggtcaagcgcattgaagctgaaaccaagacggccggcggcctgttcctgccggacaccgccaaggaaaaaccccaggaagccgaagtgatctccgtaggcaccggcggccgcgatgaaaaaggcgccctgattgaatttaccgtgaagcccggagaccgcgtgcttatttccaagtacggcggcacggaaatcaaactggacggggaagactaccttatcctgtctgaaaacgatattctggccatcatcggctaaatggcaccacacacacattcaacatcattttaaatatttaacattatggctaaacaaatccaatttgacgaaaccgcccgccaggctctgctccgcggcgtggaacagattgccaaggctgtcaagagcacgctgggccctgccggccgcaacgtagtgattgacaaaaaattcggttcccccctcatcactaaggacggcgtaaccgtggccaaggaaattgaactggaagacccgtttgaaaacatgggcgcccagcttgtccgggaagtatcttccaaaaccaatgatgtggccggcgacggcactactaccgctaccgtgctggctgaaagcatttaccgcgaaggcctgcgcaacgttactgccggggctaaccccatctccctccagaggggcatcatgaaggctgcggattccgttgtggaagaactcaagaagatcagcaagcctgtcgactccagcaaggaagtggcccaggtcgctaccgtctccgccaactgggacgctgaaatcggcaacattatcgcggaagccatggacaaggtgggcaaggacggcaccatcaccgtggaagaagccaagggcattgaaactacgctggacgtggtggaaggcatgcagtttgacaagggatacctgtccccctacttcgtgacgaacgcggaaacgatggaagcggtgctggaaaacccctacatcctcatccacgaaaagaaaatcaacaacctgaaggacttccttccgctgcttgaaaaagtggccaagagcggccgtcccttcctggtaatcgcggaagacattgaaggcgaagccctcgccaccctggtagtcaaccgtctgcgcggcgtgctgaacatctgcgcggtcaaggctcccggcttcggcgaccgccgcaaggccatgatggaagacatcgccatccttaccggcggcaagtgcatcacggaagacctgggcatcaagctggaaaacgtgggaatcgaagacctcggccaggccaaacgcgtggttgtttccaaggatgaaaccgttatcgtggaaggttccggcaaatcttccgatattgaagcccgcatttcccagattcgccgccagatcaaggacaccacgtccgactacgaccgcgaaaaactccaggaacgcctggccaagctggccggcggcgtggccgtcatccacgtgggtgccgctacggaaacggaaatgaaggaaaagaaggcccgtgtggacgacgccctgcacgctacccgcgctgcggtggaagaaggcatcgttcccggcggtggcgtggcgctgattcgcgcccagaaagccattgacaccctcaaactggaaggtgacgaagcaaccggcgcccagatcgtttatcgcgctgtggaagccccgctccgccagctggcctgcaatgccggccgcgaaggagccctcatcgtcgccaacgtgaaaggcatgaagaatactgccgaaggttacaacgtggccacggacaagtatgaagacctgctttccgccggcgtggtggatccgaccaaggtgacccgttccgctctgcagaatgcggcctccatcgccggcctgctgcttaccacggaatgcgtcattgccgacaagcccgagaagaagagctgcagctgcggctccggagcttccgacatgggcggcatgggaggaatgggcggcatgggcatgatgtaagccccgtccgtttcttcgagaccaaggcaatcggcttcaaggctccccggtttttccggggagccttttttaatatgcttcatcaggagccggtttcgggaaaaaagctgcacaggatgttcagaatttagaaaaatattgaatgattatagaacatatttgtctaatcataacatgaaaaagctgcataagaacatattgtttgcggcggcggtactggccatgccttctgccctggccgatatcccggagtcttccgttccggctgccgccgtttccagtatcaagggtgcttatccgaacgccggtcccattgaatgggactctgaaatgcatggcatggaaaggatctacgaagccgaatttagaattaacggattccagtttgacgtgaagattgctcctgatgggaaaattgtgaggattaaggaagaagtagctgcttcctctcttccggaagccgtccgtgcgtccgttttgaagcgttatccgggatgccggattaaggaagcggaaaaaattactgaaggagaacttgtccgttacaaagtggaagttgcggacagccgtgacgattatgatgtgctgattgcccctgacggaaatatccttcatgtggatcgttaggctttttgttttttacatttaatgaaagcgggaggagggcggatgaatccgctctcctccttttttgaggatcggaagcaggggcgtatgggaaaatgtgacggaatgttcacgttttaaaacgggcgtgcgggagcggcctcctgtaatagagggccgtttattacgcatatggatccgatctattactttatcataggactgatactggtgttatcctgcttcgacctcgttgtcggagtttccaatgacgccgccaactttttgaactccgccgtcggttccaaggccgctccgcgcaggacgattgtgctggtggccgctttgggtatcatcatcggctcgctgttctccagcggcatgatggaaatcgccagaagcggcgtattcatgccggcccggttttccttccatgacatcatgttgatctttctggcggtcatgttgacggatgttatcctgctggacgttttcaacacgttcggccttcccacttccaccacggtttccattgtttttgaactgctgggcggagccgtggccgcagctctctttaaaatttggtccggggaaccgggcgtcgctcaggaattgtccagctacatcaattcctccaaagctctggcgatcatctccggcattttttcctccgtttttatcgctttcatttgcgggataacggttatgtggatttcccgcctcatcttctccttcaactatcaaaaatccttcaaatacctgggcgccgtctggtgcggcgtggccctgacggctatcacttacttcgccattttcaaggggctgaagggaagcacgctggtcaccaaggatatgatccgccacctggacgcccatatctggctgtacgtttgctgcagcctggcattctggaccgtcctgatggccgtgctccagaatctttgcaaagtcaatatcctgaaagtatccgttctcgcgggcaccatggccctggccctttcctttgccgggaatgacctggtcaacttcatcggagttttcatggcggggcagtcttctatggaaattgcggccgccgccgcagcgcagggggcggaccttaccactctgtccatgggcggtctgatggcccccgtcacggcggattggcgttacctgctgggggcgggcgtcatcatggtgctggccctcatgttctccaaaaaggcgcaaaccgttacggatacggaagtcaatctggcgaggcagggcgggggagtagagcggttcggctccgtccccccggcccgcatggcggtgcgctatgccctgaatgcttcccgcgcggtggaaaaaatcatgccctcctgcgtcgggaggtttattgaaaaacgcttccggcctgtgccggaagggccggataacggtgcatctttcgacctcattcgcgcttccgtgaatttgacggtggctgccctgctgatttctctggccacgtcccttcggcttcccctttccaccacgtatgtgacgttcatggtggcgatgggttcctctctggcggacaaggcctgggggcgggacagcgccgtgtatcgcatcaccggagtgattacggtgatttcagggtggttttttacggcctttgccgcgttttccatgtgcttcattgtggcggcctgcatcctttatggcggtctcttcggcatcatcgccatgtgttcgctggcggcttttctgcttctgaaaagttccaggctccatcgtaaaagaacccaggctgcagctcaggcgcaggccgccaattaccgggatccggctgtcgccgcacgctacaatgaggaaattattgaactgatgaagcgcatggcggaaatctatgaaatgaatctggaggccctgaacgtggaggacaggaagcgtctgaaaaaactccggaaagaagcgcgcggcatccgccgttccctgagcgataaaatggcgatggaagtcatgcccgtcgtccgtgaactcccggacaaagaggccgaccgaggcaagcgctatgtgcagatggtggaatacgctacctccgtctttgaatccctctccaacattactacggccagccatgcctatatagacaacaaccatgaagggctggatttggaaaggatagagcttctgcggggaatgaacagccgtgtttcctccctctacccccgtttccgggaaatgatggaaagcaatgactataccgggttggacgaatgcctggcaggcatggacgccctggatgaggaatttgcggaagccgtcaaacagcagattattctgcgtccggaagacgcctccgatatgcgacgggcgcttctctatctcaacctccttaatgaaacccgggcaatgatccgcaaagtacttcttcttgctaaaatccagagaaaatttgttcttggctggtagcctctccctgtaattcacgtccgtgccggcggcgaatgcttccggcgcggacatcttgcccggactgttcccgtattgggagtagctgccaggtcttttttattcacacggaacaaggcttctttacggataaaccatgtcttctgcctgtgggacaatgtcttgaaaggccgtttccaggcgttgccatgtatgttgccgtctcaaagaaacaaaaaacgcaagctttgataaacaataacttgcggaacaaattggtacgggcgatgggaatcgaacccacgtctcaagcttgggaagctcgcgtcctaccattgaacgacgcccgcatgaaatgcggatgcctatttagcggcagaaggcccggatgtcaagaccacagaaaaaacgtatcctctttttttgttattttgacgcagtaatgaaaaaaaacttgtcttatcccgtgatttgaacataatgcgttcgttgcgcgggtatagcttaatggtaaagctccagccttccaagctgattatacgggttcgattcccgttacccgctccatttttttattaaattcacctgctaaatacttcctttatgaaagccaggttcgtgacaaaggcggcgcttagtgcgctggcacttgcgtttgcgggtacccttcccggtatggctcagcaaactgcttctccggcagccgctccggctgttgatcaggttaaagcctccgctgttgaaaaggcttttatgaagaaaatggcagatattgttcaggccggattgaaagccggtgctctggatatgaaagcggtgtccggagttttgaacgatgccgctaaggctggtgtgtccgatcatgtgatgggtgcgatggtatccatggctgcgggcgctttcccgtccaacgctcctgccgttgcttccgccgctgtccggagctacgggcccggggtgaaggaagaacaggtgcgcaatgtgatcgcttccgctgtttcctcccagccccatccgtatgcatccgtggctcccatttcggaagcggttgaaaaagctttgggcaattctccggtagccggtactgttccttccattgctgtggccgtggctgcccagactcctgataaccccctctcaggggtaactgtccaggaacatggcctggtaaagcctgttgaagatgttgccgggggctccctggttctgccgggcggtcttcctgtgggcggcacgcccaccagccccgctcccgtgtccaatgctgctggcaattaacctgattcttattcaataaaatagcatgaagagtcttttttatctctccctggtggccgccggcatgtttgccatccatgccaacgggcagtctctgtacacgctggcgggtccggttggtctggaagagtcccttcctctcaagtggttcttcaacctggcgggagggtatgacgacaatgtcaacgcctccaattataacaagcaggaatccgcattcatcagtacggacatagggtgctccctggccaactacgatgccgtgacccaatattctttctccgccaagctggggggtattttttacctgaaagaccttgatggcggaacgaatgaagccctttccaattccacgctgtccgccaaactttcccatagttttgaccagactttgcgttataacggcagcgtctcctttgcatggcagccggaacccaactattccaacggtattgccaatgcccgccgggacggcgactacatttacgtgtatgtttccagttccgtgagcaaggcgtggacttcccgctattccacgacgctgggtgccaatttctccatgatcgactatcaggaggattccgccaagacggataaccgcgattatgttggcatgaatttcaccaaccggtacaaatggacggaacgtctggctgtttccttgggctggacgggttcctactgtaatcgcgaatacggcaataacgaattttccaacttcgtcatggccggcgctgaatatgcggtgagcgaaaatacttctgctacgctgcgcgtagatcctcagttcaagtatgtcgagaactacggaacaaaaacctatccctccgcggaattcggcttaaaccaccgcttgagcgaccggttcatgctcggaacgttcgtccgttattccaacgaagcggtgaatacctacatcccttacaacggcgccagctattactccaatgaaacgtggcgtttcggggtacacagcacgctgaagctgacgcaccgcgtcagtctgaattgcggagtaaacctgattgccagcgattatacgcgtccgagttccatcagcaacagtgacacgtccaacctgactttcaatgctaccgccggtatcaagcttctgctgacgaatgccctggcccttacggcccaatattcctacacgaacggttcctacagcggctataactacccgatgccttcctacaaccgcaacgtgttctccttcggcgtgaattacagcttctaagtcttgactgaccattaatgcctttactcctctaattgcgaattttcattcacaattagaggagtttttatcttactgccttactatattccatgagtgcccaggatcagcagaacagtgatcgcatcgtacgcaatattgactatttgcaagttttaaaaaatcgctggaaggaagtttttcttgttttccttctggtgctggtcatttccgtggtagtgactttcctgatgccgccctcctaccgggcgaccagccagtttcagattaaactgcccaagcctgtgatggatataggcagggggggggacgtggttgccacttccaacgtgacggccaactacattcccatgcagtattccgtgctgacttccgccgaagtgcttaaagtggtatccagaaaactgaaccttgccgcggaatgggggatgacggatgaaatggcggcgactaatctggccggcatgattaaggtggcccccgtgcgtgccacggaccttgtggacgtcattgtttctggtccggatcccaaactggtgcagaatattgccaaggcggtgcctgaggcgtacaagcaggaccgtgaaatgcgcgaaaaccgtctggtggaaaccgccatcaagagcctgaaggatgtcctccgggaacaggaggatgccgtcaatgaaaaaatgatggctctcaaaaagctgattgcggagagctcctacctgcctacgtcctggagaaacggtgaacaccgcagcaccctgacggccggtatggaagaagaggaattccggaatgccaaagcgcaggccatggattttgaaaggagggaaaaggaactggcttcctatgtgcaggaattgcagcgtctgcccgacgacaagttgctggattacgtgatcagttccgacttgctgaatgcggagactgtaggggcggacgctctccgtaagacctatgctgaattttccgacaagctcaaggaaaaggaaaatctgaaatcccagaatatcggcgccaggcatcccaaaatgctggcgctgttggaaacggaaaggattctgggggataagctgaacaaggaattgataggcctgcgttcttccctgaagagcaagctggaaatggttgccgcaagccggaagcactgggaggcgaccgttgcccaaaaggaagaggatcttcagaagcatgtccttcaggttcccatgtatgaacaggccagccgtgattatgacgctgcgctggaccagcttaaggaactggattcccggtacaaagatgagattgcccgtttgcgcgtaccccgtgaggcaattgaaatgtatcagctgccgacctatcctgctgcgccctacaagccgaatgtgaccattaacctggcggtgggagcgggtgccggtctgttgctgggcatcggattggccttgcttctggaattcatggatacctccgtgaagaccatggaagatgtggaacgggctcttcaggttcccgtcttgggcattattcccaagaatgtgcctattctgcattcttccgatgtcatggggccggatgcggaagcctaccgcattttgcggacgaacatagaattcaataagaaagggctggaagaaatttccctgacctttgtttccgggagcgccggggaagggaagaccaccaccctgtgcaatctggcctatatttgtgcccagggggggtatgccaccctgatgattgacgccgacctgcgccgttccaagcttcaccggtattatgagctggataatgaggtagggctgacttcctacctgctggaagattatcctctggaggaagtcatttttcagacgcccattgaaaacctgtacgtcatgcctgcgggacccactccctttgacccttcgggcgccttgaattcccgcaagtttaatgaattgctgcaggaagtgaagcaacgttttgacattgtgctggtggattcccctcccatcctgggggtcagtgactccgccgtcattgtaagcgaggtggacatgactcttatggttgtccagccccgcaagctgccgctgaaagccctgttgaggcagaagcaggtaatcgagtccgtgggcggcaacctggccggcgtggtgatgaataatgtggacattacgtccgatcaccaatatcagtattacacaacttactattcctattattctgcggatggcgcttcctctggagagaacgcggatgcctcttccatgaagaaggtggaacgttctggaaaggccaaggagctggcagccacccagtcccatgatagtgaagatttgtattaacccattgctccatgaaaaaatatatttgttccatcctttgtcttatgctgggcccggcggggctgggctccgcccagtctccggatgccgtgccgccccagggcaccattgaaatccaggtgcgcggcattcccgccgacgacgctaccgctatttccgggcagtatctgttggacgggaacggaacgatacgcatgccccagctccctccggggcaggatgtgctgcgcgtggtaggcaaaacggcccgccagattgaagacatgctgatggccgcctacaagaaggcggagctgtacacggcccctacgtttttggtgaaggtgcagagttcggatgcgcggctgacggaacacatcgttctggtaagcggcggtgtggctatgaagaagaatgttttgtggcggcgcggcatgacgcttctggaggcgattgtgggcgccggcgacatcacggactggggatcccgctacgtgcaggtgacgcgcggtggaaaaaccgtgacgtatgattatttttccattaaggacagggcgattcccatccagcccaatgaccgcattttcgttcctcagcgcgggatttttgaagggcgcccggcaaaacttcttccctgaggcatttttcccatacccggctttccgcaaggaagccgggtttttttattgggccggttttcatgatgggggaaatatcggaaaaaacgcggatggggaaacggggggcggagtgaaggggcgtgtcgtcagcggttgatgaaaccgggaggtcttctcatgctcccttcttcaggattcttgccggaaatggatgttttcggggaggccgtatggtggaatcgcggagggaaggaagttgtttcctgaaagcttgcggcgtcggaaaggaacgcctggaaaagagggaaaatttgtttccagaccctcttgtttatgggaatggaaggcttgagatccggaaaagattaaggggggtaagtttcccgatgggcgcgtaggcccttttcacatgattggccggcgtggtctccgggcatatattgcggtgaaatgagtttagtatgaatgtaaaaaacagaaaaacaaagaaaaatgttgaacattcttaaactcaatgcatttttggaatctccaaaatatgttagagtttcgtgcggaacggctgcatgaggcttcgtaaatccaatgtgaaaactcgttaatcatgatataccgttttaagaaaacattcatcggtgtgggagggcgtgaatacattagcaatcccaaattgagcttcccggaacatgtcaaaatccgccgccgcggaacgaatcccaggtccggccagccttatacggaggcgggtagcgcatttgtggagacatccgccgtcgcggcacggctctgctgcagcgcttccgccgcgcgccagtatctgcaccgccacggtgtccgtttccgggtggtgcgcaagggtacggggcccctggccctgtactggcggcggctggatgtggagcgggttcttgctggacgggagcccgtgcgccgccgcgtgcctccgtgttatatggatatggccggggctgtcagcatgctgggagtagtgcgcagctatgtttacaggctggtgaaaaaagggctgctgcgtgaatacaggtgcaggatgaaaacagcccgtggactgcgcgtgcgctgcttttaccaccgggaggatctggaacatgtcaggctgcacgtgctccagaaaagatgacggaagcggttccggaggatgcgtttttggcttgcgcgcgggccggattgtgtcacgttaagggtatgatagcttttctgcgcggcacggtggcggaatcatatccccagcggttgatcctggatgttcatggggtggggtatgaagtgattgtgcccctgtccacgtttgacaggctgaatccccttcccggcagggagctgacgctgaaaacctacctgcatgtccgggagaacatgcaggtgctgtatggttttgccacggatgcggaaagggatattttcctgctgctgattgagcgtgtttccggaatcggcccggcaacggcgattgccattttgggttccctgtccgtggagcagttcaagcaggcggttgtgggcggagacgtttccggcattgcgcgggccaagggggtgggcaaaaagacagcggaacgcatcgtcctggaactgaaggataaagtgggcctggccgccacgtgggaagcacaggctcagggcgctacttcccaggccgccggggacgcggaattggcgctgattgcgctcgggttcaagcaggtggaatcccgcaaggcgatagccgcccatctgaaggaccatccggatgcggacgtggacgagctgatacgcgccgctttgcgctccatgaattgaaggagcttccggaggaaggtgctcatttttgcaagtttttgattttcatgagagaacatgtccgcctagcggactgttccctgtttgcggaagctggggaacatactgccatgatgggggaacaatagtgttgacggctggttgaaacgtttttaaacttgcagcgtccatggtacttgaataagtccgggactagtaattaatcaaatctgaagccctcaatcttatggccaaatacgctattaacggttttggacgcattggtcgcaacgtactgcgcgccatgtccaaggaagaacgcaacaaggttgttgccatcaatgacctgactcctatcgaaacgatcgcccacctgctcaagtatgactccacgcagggcaagtttgacggtgaaatttccatcgagggtgattatctggtcgttgacggtcacaagatcctcatcaccgtggaacgtgatcccgccaaccttccttggaaggatctgggcgtggacgtcgttctggaatccaccggcctgttcaccaagcgcgacgccgccaagaagcaccttgacgccggcgccaagaaggttcttatttccgctccctccccggatccggatctgactttcgttctgggcatcaacgacagcgaatacgatcctgccaagcacgacatcgtttccaacgcttcctgcaccaccaactgccttgctccgatggtgaaggtgctggacgacaagttcggcgttgaaaagggcatgatgagcacgattcactcctacacgaacgaccagcgcattctggaccttccgcataaggatccccgccgtgcccgcgccgccgcgatcaacatcattccgacgaccaccggcgccgccaaggccattggtgaagtaatgccgaacctgaagggctccctgaacggcgcttccttccgcgttccgactccgaccggttccctgaccgactttgtggccgtgctcaagaaggatgtgaccgtggaagaagtaaacgccgccatgaaggaagccgctgaaggcccgctgaagggcattctggcttactccgaagaagcgctcgttcttcaggacatcgtttccgacccccactcctgcatctttgactccggcttcacgtatgtggtcggcggcaacctggtgaaggtctgcggctggtacgacaacgaatggggttactccaaccgcgccgcccaggccatgaagaaactgggcgacagcctgggctgcggctgctcctgcggcaagtaagttcttttggacaacgcttgctcttcagttgcacgacaagtcttgccgtccgcctgtttcaactttccggcttttctggccgggtttgccgggcgggcggggatttatccgggagggcagaaatgccctcccttttttattcattgaaccagacaatataaaccgatatggctaaacttactgttcgcgaccttgacgccaagggaaaggaagtcctcatgcgcgtggatttcaacgtccctctcaaggatggggaaattaccaatgacgcccgcattgtggctgctctccccaccatcaagttcctgctgggccagggcgcacgcctcgtcctcacctctcatctgggccgtcccaaaaacgaacccgatcccgctttttccctgaagcccgttgccgcccgcctttccgaattgctcggcaaggacgttaaattcgttcccgccgccattggcccggaagcggaagctgcccgcgccgccatgaaggacggtgatgtggttctgctggaaaatgtccgtttttatcccggagaaaagaagaacgatccggagttcgccaagtccctgctgggcaatgccacgctgttcgtgaacgacgcattcggcacggcccaccgtgcccacgcttccacggaaggcgtgacgcattttgcggaaaagagcgccatgggcttcctgattgaacgtgaactggaatacctggaaggtaagctggaaaacccggaaaaaccctttgtggtgattatgggcggcgccaaggtgtccgacaagattgaagtgctttccaaactgatggagaaggctgatacgttcctgattggcggcgccatggccaatacgtttctggcggctgaagggtatgacctgggcgcttccaagattgaaggggacaagctggatctggctcgggaaattctggcggcggccaaggccaagggcgtgaaattcctgcttcctgcagatgtgcgcgtagccatgaaatttgaagacggcgccgaaaccttctgcacggctcctttcgctgaaggcggcaaggttccggaaggcggcatggccatcgacatcggcgataaagccattgaagagttctccgccatcatcaaggatgccaagaccgttctgtggaacggcccgatgggcgtgtttgaaatggactgctttgccaagggaaccaaggaagtcgcggaagccctggcggattccaccgccatttccatcgtaggcggcggcgattccgtgacggcggccaagaagttcaaggtgcaggataaactttccttctgttccacgggcggcggcgcttccctggaactgctggaaggcaaagttcttcccggtgtgggggccttgaccgacaagtgctgctgcggcaagtaaccgttcatggccgggcggattgttttcgcccggcattcagaatgggcttttttattccccgcacccgttttcgggtgcgggatttttgatttgccggcttccgttgaaaaagcgcgggagctttgcggttccggctttttgaagaaggtgggaatccatgctcatcccgtctttccgttccggaaaggaaggcagtctttttttgggcttgctcttaatatggtccccggtagtctgagcatgatgaaactgttgcattgtttcctggctgtcctttggtggtgttctcctgtaccggctgcggatattcccgatgcggagaatgcggaatatggcgggtatcccgggcggtacatgcttttggattcttcctcgcccgaccggcagagcctgtccactcccgtagcggcctatgtccatgacaatgggatggaagtagctctcattggtgctattcatgtggcggaaccggaatattacgaccggctgaataagctgttccgcaggtacgatgtgctgctttttgaaatgattggaggagagggcctccggcgggaagaggaattgcgccgcaagatagaccgcagcaagccgctgggggggctgactctggaagaggcgcgggaatggaaccggatagtggaatggaggaagaaatgcgagcaggaggaaaagtcttttttaatggggctgctggggggcgcctacaaggagttgagcgacatgctgggactccagacccagcatcagggtattgattattccgcagcccattttgtccatgcggacatgacgctggatgaattccgcaaggcgcaggccagaaagggtgaaagcattgccggcctgatgcttaaatccgtcttgtcctccctggttgagaaaaccgggacgaaccgggccggtgaatttggattgatggcggatttcctggccggcaataaaacggggttgaagaataagctgatggtcatgatggccaatgctcctaatggtctggagaataccgtgattctggaaggccggaatgccaagtgcatggaagtgtttgaccgttggagcggcaagggtgtgcgcagaataggcgtcttttacggagcggcgcatcttcccggcctgcacggtgctcttttggaacgcggctaccgtctccgggaggtgcgctggcttccggcgtggagtaccagggagaagggtgcggacgggcagcgcggagagggctgagttttttactcttttttcgagacgggaggtgtagcggcggatgaacatggttttccgccgctccgcctttaaagagggaagaagaggggggcgttttttccctgcctggggcaggatgccgttctctagggggcaggatgccgcgttccggagggaaccatgcggacgattcctccgcctttgatgcgcatggtgaaggaaagggcattttcggaggtgactttccgggtttccacgctccatccgtcatttttttctgccagatcccggagaatggtggcttggtatgccgtgtttttgtccaggaaattcaaaggaatggaaacggtgcgttccctgccgtctccgttcatcagagcaatgtaccactggtttcctgaccgccgggcgaaggcggcgcattccccaatggcagacggcggcaggacgatggtttcctcccatacggaagggatgttccggacaacttcccgttcaggggaatccttcgggaaagcagcttccatgtccgcagggttggagacccagtgaagaatgggggacgtataaatgatattggccgccatttggagggcccaggaagagccgcgcagcttggggccgtggccaaaatagcctcccgtgaaatcggcgtggccggagaccaggcgggtaaagggcagcgcgcagtagtgctgcccgccaatggcggcccagatgttctgttctccgccgtaaatgccttcccggctcatttcgtgcggccaggaacgttcctcccccgtgggggtattggctccgtggaagttgaccataagcttgtttttcgccaggttttccgctacggcgtcgtagaagtccaggcgttcctgagaggcggagtccatgaagtctatcttgattcccctgattcccgttttggagagtgagctgaaaaagcggcgcatattttcccagtcattggcggggttgttgacatctgaccatcgcacccatacccagatgcctacgtttttgccggcggcgtagctggccagtttggccagcttgtccatgctttccggaagtgatcggccccattttttccacccttcgtcaacgagatgatattcccatccgaattcggcagccatatcgacaaaggcatattggtcgttttccaggacattcccgcggtcccaccatatccaggtggaacggcccggcttgatccaaggggctttggagccttccggaaaaagattcctgtccggttccggagccagggaagggatgacgtcgttccggaccagtccgttcaggtcgtcattcaccaggatgacgcgccagggcatttccgaggatgagagggcggaaaagccgccgggatcctggaaatataccgcacggcatgctccatcctggagggaaaatttaatgccgctccatttcctgttgaagttggctgcttcctgtatgagcgcgacgcctccgtccggcagttccgccgtaatcggcatggtgcggacacagctgcggggattgccgggatcttttttgaaatccgttattctggaaggagaccagaccccctcgcaggggcccagggcggaggaggcgtcctgggtccacagaacggttttttccggaaaggcgaaggaggttttttcttcactgatattcagcgagggcgctttcttcacctcttccgtccactcatagcggaaggcgaccccgttgttgaagacacgggcccggagccggagggaggagttcttcccggaaaccacgtattcattgaagcagacggaagaggtggggtatttgccccgcgtctcgaaggtgtcgcgaacgttatccttcactttttccacattccatcccgtgatgcctccggcgaggttttttccgttcacgacgacgcccagcccggatggttccagaatcgttttgccgccttttttcagagaatgggcggcctggctgcccgcgtggagcctccaggacagccgcccgtccggagattgcagggatgcgtgcgtttccgccgcctgtccggcgccggtcaggaggcatcctgccgtactgctgagcataatgagtgattttacaagcatatctttatcagaatacgtccgtctttgttcatttattgcaaaacagcgaagcggaaattggaacatccatgttccgaaggagggaaaatgccgttccattggaggcatccgggcaatttccggaataaaaagggaaagccttttttcttcccacatgaatttgtagcggtatgccgttttttcgtgaaggccggggatcatttatgaagaaaaaataatagatatcttatgttcctgtgcagatagttgcaggaaaataccggattggcagggagcaaaagaataatctttacaaaataataggaagcaatagaataaagcgcattgcaaatataaggatggagcgtagcggtttaaatagtgatcctgttttttcggaccaggatgagcattccgataatgtttctgtacgcagctcctccaaattacttcctcccccttcctggaacgagtcttccgtttattccaaggaactcccggcgggagcaactttggaacattataaaatcctgaaggtgctgggcagcggagggtttggcattacctacctggtgcgggacaccatgctgaagagaaaagtagttcttaaagaaaattttccttcttcttatgcttaccgggatccgtttacagggcgcgtgatacccaacaatgaacacgatgccgagtctttccagtggatcctttccaactttttaaatgaggcccgtgttcttgcacaactggattcgcccggtatcgtgcgggttctttccgtgtttgagtgtaacggaacggcttatttttccatggattacgttcagggtcttcccatggattatctgggagagcagcagcttcttgcggggaactgttattccgaggccaagttgaaggggctgctggtgcacatcctccagattttggattaccttcataaaaaaggcatctgccacagggatatcaaaccgggaaatatcctgcttacacaggaaggggctcccgtcctcattgatttcggcgcgtcgcgccgtatcgagagcaaccacacccagaccgttctggcgacacgtggtttttcttctccggagcaggcgctgggcagaaaagatatggggccctggagcgacctttattccctgggtgctacattttattccctgctgaagggctttgcgccgcccagaggggaggaacggctgatcaacgacaccatacagccgctggccgcatcctcttcgttgtcttcccattattcgaaaaattttctgaaaaccatcgacaaggccctttctccgcgtgtggaagaccgttatgcttccgcagaagcgtggatgaaggatctgagggttgagggaggcgccgtttcaaccattcagttctcccccgaggagttcaaatcagcccgtaagcgttttttcaatttgtttgccttatcctcttcccgcattatgtcggaagggcaggaacatttgaggacgagtcggaagatagcgtttgggatgattattgtcctgggaattataggcgcgcttctgggatattctattcacggggggaacagaacggagaatgaagatgcgttagggctgcgttttcccagtgtgatgtccactcccattccccagattatttcagattcaagggatgtgtcattgttaagttccatggatcattttgacgtcaggctggatagcccgtctttatcgcgtcatgctctgccgtccgtgctgcccgaccgtttttcacttgcatgcgttcatttaagagtgcttcaggaagacaagatgtgcccgcccctgtatctgaccatacgtgatgagcaggggaagctggtttcccggtcatttaacggtttttccttcaccttgattgaaagtccggtgcttacaggattccgttttgtggatcttcctgctctgaaagtagatgccccttacagattcagttttgagaccaaggataatgttccccatcctttgaaggtggtttcttcccagattacgacgctggagagcgggaaagtcctgaagccccatttcaaattcatctgcgcggcgtatgatcccggtgtgaaagcttctctggacagcccggagaacagcaaactccgggaactgcttatcgcttcccggaaaaggaaccgtacggaaattgattccatcgtgctgacggagcgggagaaggttcagttgcggaaattcgccagggcggggtatccttccgcgcagtataaaatagcccgtcttattttcgaacgggatggaagatacggggaagaaggtggcgcctggctttataaggcggccatgggcggctttattgtcgcccagagggatttggcgtttcttcttgtaggcggcaaggagtttttcccggatattcttcagtgtccggtcagcctgtcccagaactattcccaggcggttgatttgctgttgatgtcttttacggcgcaggatccttccgccctgtacatgctgggcattttgtattcccaggggtggggggtggattattccgcagagatggtcatgaggctgtccaaactgttggccggttccggttatgatttgtcgcggctcactttgtccgcccccattttagcccattgggagcttctgggtcagcaggagggaacttatacgcggatgtgctgttccattccggacaggaagatgaaccaattttcaggcgtgcgtctggtgcggacttccaaagaggggggaagtctctttattgacaaggtgatcctgctcagggatgggcaggaagttatgtcccgttctttccgttcggctcttacccaggaatctcctgttctggaggtgtccatgaatatggatgattacgcagagaatgtagagaatttcgagtggtcaatagaagtgatcatggctccggccaacacatgcggcatcatggaaatgatgcggaaaaaggagctttccaacggtaaagagaagcagatttgatggaaagctgccggagcggtctggcggatacgcggtttcgtattcctgccgcaaccccgttcccggcatggaaaggggcaagaactgttttccgggttttcatgttttcccatgggtgaattcagccacgggatgaccgcagcggatttaaatgtttttcagcatgtccagcgtttcccggagtttgtccgcgggagcggcgcttgccagccgcgggaatttgttggacaacaggataaaatccccgtttctggtgagcatcaggcgctgcccgctgatttccaccatggagatgttggcatgggatgccaggattttgattttgtgggagtccagcaggtggcgcaccgtttccggcgcggggccgaagcggtcttcccaggcgcggagcagattgtccgcttccttaagggtccggacggtagccagatccttgtaggcggagatgcgcagggccgcgtcactaatgtattccctgggaaggaaggctcccagatagtccttgcgggattttgcggcgaactgcgtttcgctgttaatgataaagtccgttcttagagccgcatccggacggggggccgtgcgtttgccctgcatctgggcgatggattgctggagaagctggcaatacaggtcaaagcctatggcggcgatgtggccgctctgctgggttcccagcaggttgcccgcaccgcgtatttccaggtccctcatggcaattttgaagccggaacccagttccgtatactgtttgatggcggagacgcgtttgcgggcgtctcccgtggtggcggcggatctggggagcatgaggtaggcgtaggcccggtggcccgcacggcccacgcggccgcggagctggtaaaggtccgccagtccgaagcggtccgcgcggtcaatgatgatggtgttggcgttcggaatgtcgatgccggattcgatgatggtggtggccagcaggatgtccgctttcccctgcacgaaggtgcgcatgaccttttccagttcttctttaggcatttggccgtggccgatgacgatgcgggccttgggcaccagggcctggatgcggtcccggaacagttcgatggttttcacgcggttgtgcagcaggaaaatctgtcctccgcgctccagctcgcgttccatggcctttttcatgatgcgttcgtcgtaagggcacacgcttgtctggacgggctgccggttgacgggcggggtttcaatggagctcatgtcacgtgctcccatcagggcaatgtacagggtgcggggaatgggcgtggcggacagcgtcagcacgtcaattcccttgaagcgttccttgaatttttccttgtgcctgacgccgaagcgctgttcctcgtcaatgactaccaggcccagatttttcatggatacgtcatcggaaatgagccggtgcgtgcctatgacgatgtccacagctcccgttctgagcccttccagcgtggagcggatgtccgccgcgctgctgaagcggctgagcatttcaatacgtacggggtattcgctcatgcgttccttgaacgtgcggaaatgctgttccgccaatacggtggtggggaccagcacggccgcctggcggcctcccgtcacgcatttgaaggcggcgcggatggcaacttccgtttttccgaagcccacgtctccgcagatcaggcgatccatggggcgggtggattccatgtccgctttcgtctgggcgatggcgcggagctggtcctgggtttcccggaagggaaaggagctttcaaattcccacatccatttgctgtccggggggtggctgtagccttttcctgtctggcgttccgcctggacgttgaggagctgggcggcgtaatccgccacggatcgttctgcggattttttggcgcgctgccatttggagtcccccagtttgttgagttccggcgttttgcttcccaggcctatgtatcgtgaaaccaggtgagcctggctgagggggacgtgcaggatcgtgttgtcccggtagaggatgttcatttcctcgtctccggagtcaggggaggcggaaatgttgatgaatttgccgatgccgtagctggtatgcaccaccagatcaccgggattgacgtctttcagggatgcctgcgcgcgtgccttgcgcgccttgtcttcccggctggcgcggcggcgcgccgtagcggactggtacctgccgaacagttccgaggaagagaggacggccgttttcgcttccgggatgctgaaccctgccggaagttctccgcgaagaggggtgatggacagcagagcgggcgttccggcgcagatgtcccggaagcgttcttcctccccttcattggggaagaacatgctgacattccatttccggtccagccattcccggatttggcgttccgccagttcacggcgcatttcctgcatcacgaagtcccccgcctcaaagctgcccaggggattgtcatggatggcaagggagaagtcttcttcccccgccgcattttccgggggagaggtgaggatgcatacgttcccccgttccttgcagaaaggggcggtaataaccaggtcgcccggtttgatccagtcccgcagggtttccgcgccctcggcttccgtcagtatgaggttgacgtgttccgccttgcggaaggaaatctgggaatccacatcaaattcccggatggattcaatttcgtcgtcaaaaaactccaggcgcacggggtgggaggactggagaggaaagacatccaggatgccgccgcgtcgggaccattgcccgcgggaaatgacctgtggaacaccttcaaatcccgcttccccaaactgccgtatcaagtcgtccggtgcgtgcgtctcccccgttttcagggtgatcccctggttttgcatgccgtcgggggacggaacctcatcgttcaggctgccttccgttaaaatgatggtttgcccgcccgtgcggctggaagagatgcggtgaaggatattcagacgttccgcggcgagctccgggtcccccatttcctcccccagggccacctctttttccggaatgaagaggaggtggcgcactccccaggtttccagttgggctgcaagggcttcctgagcccgcaaatggggcgcgaccacccaggcccgtgcggtatccggaagggttctgatacacagggccgctacaaacggcaccccgggcagggaagtatggtcgaaaaccgcctgttcctctgtgcccagttttgccagttcccggtgaaagggggcggtacgggctaccctgtccatcagggcggatatggaagcttcttctgccatgcgtgtctgtgaatccctgttgagggaagtgtgccgcctttccctcccgtgtcaacggtttttcagggcacaaaccgcccttcgttttccgtcgggggactgtttccacggcacgccgcggcatagttcaggaagaggaacggaagcggattttaacgccggccttgcgccatttctgttcaatttctttggccagttcttcatagctccgtccgtcaaggaggagtttctgagcttccttttcactggttccggattgaatggctttcatgtaattcttgatgcgccgggcatcgcccttgccgtccatgtggtaaaaatagtaggccatcagggcggccaggccgtagttcaggttggcgttttctcccgtgaactgggaatagggcatgttcatgtaagcttccaggccgggtgcctcaaagtcatccccaagggcccgtccccccgtattttttttgccgtattccgtcacgcgggagacaatgtgggatcggttggctccaaagttgaagcggccaccggcatagggcgtcatgcccatgtattccgcggagccttcacaaaaccagctggcctgcttagcctgcgaagacatgagctggtgcgtcagttcatggatgagtgtggaagcgtccttgtcacggtcaatgacgtatgtgcttcccatggttttgactcccagggaatcgaacggaaccagaattcttccgcggtcccctggccgcgttgtccccaggaagatgcccgccgtgccttcgcgtccgccgttttccagataggtgctgaatttttcatacaggtaggcggggaatttggcggaatcgtcatgggcaggggagtttcctataggaagggttttgttggccaagtgggtggcctcaaagaggaggcccaggcgcttgatcatgccggtgcccagcttggcgtcgcagataaagcggaaatggggtgtttcataaatatattctcccggttcctccttgatggtttccaccttgaaattgtccgggcatttgacgctcctgggccacggcaggtggtaattgtccgccgtattggaggggagtgccccacctttttcctgtttcgcgatgaaatccctgtcttcccgggagagctgggagaggggaatggagacggtttggccgccggaacgtttcagcacggctttctggccgtccagcctgatgaattctgcttccagttttttcccttggaggttggtccaggtgcgcccctgtgcaaggggggtaaggaaaagggcgaacagagttcccgccgccaggcagaggcgtgcgggctttttcatcaggggtaagacgggaggcatgaacataattgcgtttaatgtttgggacgcggcagcatcaggagcagcagcccgcagaacagcatcaggcatcctgccgccgccagggtggtggtcagcggaacgccctgatccttgaaccatcccccaaagaaggagatgagggcgcccacgccggcggatgtgaggttgaggaggccatagccggttgcggaataacgctcgtcgatatgggagcgtagcacaggcatgagggtggcgtccagtgatccctgcgccagcccctgcgtggcgaccagacccagcatgagcacgagcgggacggtgatgtcccagccgaagatgccgggcagcagcgccagaaccaccaatgggccggatatggtgaaggtgatgcccggcaccagggcgcgggcgcgggcgttgcgcctgtaccacatgtccgccaggatggcgcctcccagcacggcgacgtatttggccacggagctccacagggtggcggcggggcccgcttccgcggaggagagctggtatttgtcctgaagcagggtgggataccaggtgagaaggaaccagtttccggctccggcaaaggccactacggccagtagcatccacatggggcgtccgctcagcaggctggaaaggacggctccggtggaaagtttggaagagggttccttgatggcctgttcgtcattgtccacattgagcagcaccgtttttttctccggtacggacggtttttttgcctgggccgtatccgccggggctttggacggatctttcaggaacaggatgaggatgacggcgtacgccacgccgatgaggccgaacagggcgaatgtcatgcgccatcccgtccatgaagccatggtggcaccgaaaccggcgacggccatgcctacatagatgccgctcatgtgcaggcccgtagcgatggagcgcgtgctgccgcggtggtagtccgtaatcagggccagggcggcggggatgtagaatgcctcgctgatgcccattgctccgcgcgcaatgagcagggaagtgtaatcttccgcatggccggtccaccatgtgaccacggaccagacgacgagagagcagaggatcatcagccggcggctgtagcggtccgccagaaagccgcccaccgggctgagcagggcgtaaatcagcaggaaaacggaggtgaccatgccgaactgggcttccgtctgcggaatgtcccgtacgatgggttcatgcagggcggaaaggagctggcggtcaaaatagttcagcatgaccacaaaccacaggacaatgacggctacccaggcccacaggcccggcttggtgttcgggtccgtgacggaggcaacatttttaacgccgttgcgcacggcggagacgatgatgatcgccaggacgatgatggtcagaatgagaacggcgtaatcaaccgtgctcatttcaaagtggtaacctgcggaggcggaggcgtttacgggagtccggacgcccggggccgtttccccgctgatggtcatgatttcagagcccctgacaacggcgggaaccgtggcgatgcccacgggccattccccctggcgcgtccatgtgtttccgatgacgtcatagaccaggatatcccgggactgcgccacaggcctggacgggtccggcgagttgccgcgcttgtctccgccgatcaggagaatggagttttcccgcaccggggcgggacccgcggcggcggctacgggcattcccggtccggcaagctgctgcctgccggaggagccccatttggaagggtccttggacgtcatgtcgtagccgatcatgtcggaaagatacgtcctggaggtttctccggagttatccctggacagggaacagccgcctatgatgaacagggtgctgtcgcagacggcagcggtggagagaatgcgcccctctccgggaaaagggggaagggaaacccatttcattttatccgtgtccggcgtggtgtccagcatgtagatggtattgagtgcggtttccggctgctcccggtctctgccgccgatgacgaacaatttgttcccgtgggcggcgcaggaggcttccgttacggggacgggaaggggaggaagcttttctacggagccgtccgttttaatcagcagggcatctttcaggatgccctgagcattgtggcctccggccacagccagccccttgcccacgctggcaaaggcggcgtaacccagcgggacgggcaatgttcccgccttgctccactggccgttgcgaagcttgaaaatatcctggtagtaggttttggggccgcgttcctccggagttgaggcgcccggcgcagcctgggggaagttggcgccccctgcggcgatgacggactggctgccgtcgtcttccgtgacggttccggcaaccatgccggcgcggcctgccgggtccggaaggtcgggaacagttccggacgtccggacatccacggaaaaggaggcgtcagcggccggagccgcgatgagaagcagggctgccagagcagagccgcaagccttggaaattcgggtaagggtgcgtgtcatgtgcatatgttgagaggtttaattggattccggtcaaatcaggggagggagatgctccatacctcaggagagcgcctgccgggtttgagctctccgttcacggccgcgaaacggtcctgccacgcgcaacacggaaggacagctctgggcgcggcgatggggcctgcgtcgtgccatgtcatgtctgccgtgtctaggcacagggattggttattgaagccgggattagtttggggagtgtatttttttccggagccgtcatcccccccaagcaggtaaatgacgccgtttccggaaaccggggccggggtgggggctgcggcgatggcgtaaggcatgtccggcaggcgcgtccatccgtgttccggagtatagctccaggcttccttcagcagttcccggacctgttggccgtcctgttcccgcaggccgatgccgccgagcacgtacagggctccgtctgttgcggccatctgatgcaggaagcggccgcggcccggcagcggggcctgttccagccatccctgttccgtccggcgtgtgtccagcatgaagacccggttagtgcagtcctgctcgccggggcgttcgcaccctcctgtaagatagactttcccgtccaggacggcagccgccgtatatgccagggagatggggagggaagggaaaggatgcgtggtgacagttccctccgcgaggttcagcaggtaaacgtctttccggtgcccttctttgccgcagccgccgatgcacagcaggccttccctgatgccggcggaggcgccgtatgcataaggcgcgggcaatgtgccggcctctttccattcgttttcccccggagagagcgtaaagatacggtccgtccacgttttggctcccccttcaagcatgggcttttccgggaaattggtacctcctgcacaaatcattatttctccgcaggtccctgcgtacatgccggcgaagccttccggatcgggaagggcgggtaaaggtgtccaggatgaagaatagcggctcataatacgtgtaaatgactcgccatatactagctaaaaaccggcggctgcgccagtattaacctctgatcctatttttttgaataaattcctttccttgcgcctcttaccaacgtagaataggttaatcatatgaaaacaggaacccgtttgttgattttatgcctcctggctcctgccgccctggcggaaaatatgtccctgcggtccggcagggtgctgaaagacgccgttgtagtgtcttccggagatgattttgtcaatatccagtacacggacggggtggccaaggtttcctataaagatttgacggatgcccagcaaagggattacaggatgacgccggatgaagtgaaggccaggctggaccagcgaaggatggaggaagcggcgcgcagaaagaaggcggaagaagccaggaaggcggccgatgaagaagccaggaagatccgggagtccctgtctgaggcggagcggcatccccgctacctggaaggggcggatatttcccgcatgtttttgctgatgggggaacttaccaaggtggaggcggaggttatggctctgcagtggaatgccctggaagcggaccgtgtgggtttgccggaagacgcccgcgttttccgcgcaagggcggcagcctatcaggagcagataagcgccatccgtaaaaaaagggaaaccgcggaacagtattggcaggatttggagaagaaatacctggccttgaaagacggtactcagaagaagattgcggatttgaataagcaggtttcccaattgcagggggaagtgagggaggtggccagccagccgagaacggaacgcatcattgtccctccgattatcaggacgtggaattatccgccgccgcctgtctttatccggccccagccgccccctccccgtcccgtgcctccgcgtccgatgcctttgcccgtaaagccgagtttgtacagaagttaaagatgctccggagcattcccttttctgtccatgggcctgtgccgtttactggaaaaagggacggacggctgggaatacggggaacaggccgcccgtgcggctgccgccatggcctgccggaacattcctttgccgcagagggaaagcatcagattccgggcagggggaacagtttcatgcggcccccctggaaggaggccagatgcctgaaccctgcctgccgggccagttccccggcccgcttgaaatcccgccctacatcctccggcctgtgggcgtctgaactgatggtgaggggaattcccgcctccgccgccattttcaggaattgcccgtccggatattgttccccgcacttgttgtgccaaccggctgtgttaagttccaggcaggctccggtttcccgcatggcttccagcgacggttcataataacggcgcaggtctccagaagggcggaagccgaattttttaatcaggtccgcgtgccccatgatgtggaacattccggaggcggccatgttccggaagcgttcccaatactgttcccatgcgtcctccacatccgtccggtgccagaaatccatcctgtggggattgtcgaattcctccttttccccaagataatggacggaaccgatcaggtaatcccatgcgtgcaggccctgcaggtgctctatccatggttcgatgccgggaaaccagtcgcattccagagcggaacggaccgtcagtccgtgcagcgcggcgcattcacgggcttccgtgagccagtccaggtaggccggcatgtccgcctgcttcatgcgccagtcgtcaaaaggttccccaggcatcggggcatggtctgaaatgccgtattcccggagtccggctcggacggctgcctgcacatattcctgcggagtgccggaggcgtgcaggcacaggggggtatgggtatggtaatcgcagtacatggaggggaatgcccatgctagcatggcggagcggacggttcaacccggagggatgtctttgttcattatttgccgtctttgactttatgagttgattttatggacaggattttttagagttgcgttaaataggacacgtgacatatgagtgactggcaaggcttttccccgctgaatgattttacagggccgctcctggataacctgaagcgccaccccaagcgcattgtttttccggaaggggaggatgtccgcgtgctgcgcgtgtcccagcgctttgtggaagagcaggccggcgcgcctatcctgctggggaggagggaagtcatcacgagaatggcggaaatgaacggaatttccctgaaattcgtccgtatcattgaaccgggaaaaagctcggatcttcagatgttctgcgaccgttatgaacgggcggagcagatgttcggcaacgggttgcctatgaatacccgtgaaattgtttccgaaccggttcattttgccgccatgatggtgctctacggtcaggcggacgccattgtggccgggaacatgaaaagggtggcttccgttttccgcgcagtaaacaagtacaggcaggatcccgttcccaccaagcccctgtttgccatttccattgtgctcgttcccgaattttccaagaaattcggcggccgcggcgtctattttctggcggataccggggtaaaccctgaacccacggtggaaaatatggcctattttgccgtagagacggccaaaatggcccgccacatgctgggtaaaagcgttcgcgtcgccatgctgagcgcgtccacttcgggctccgttccggaactggctgcggaccgcaccagggccgctgcggcgctggcgaagagcatggtgcagaaggattgcctgaacaatgaaatctccatagagggggaaatccagattgatgccgctctgtcgtcagattcctacagcgtgcgcgtgcaccgcaactccatgcttcagccaagtgaggtttgggtcttcccgactctggatgctgcggatatctccaaaaaactgttgtgcatgatgccgtccgtatacaactatggccttattctgggcggtctgctcttcccgattgcccagctgccgcggctgacggatgaagacaggatgttcggtactgcgctggtggtggggaatgaagccattaaattccacctgttgtatccgcagggggttgctccgctttattgaccgggcgcggcgtatccgtgaccagcaggcgcttttccttgcgtacggccagttttccgccgggcagggaagttcgggaagggccgtccgtattcaggatgtccattacccggagtacggcgttttccgtcaggtccggaatatgttgccggcgcaggtaatcatgcacggcgcattgtctcagctccgcaggaagcaggttgattttcggcaggaacaggcgcccctggggatctgtcaggttcatggagtccagtgcctgggaaagcgccgtgcggatttgattttccaggcggcaggcacgtgaaaagggaaggctggtgtccctttggaacagcgcattcaatttgggaataatctcatggcgcagggcgttcctggtatattcggcagactggttgctggaatcttccctccatggaatatggcgatgctccagataggaggtgatatcctcccgggaaaaatccagcatggggcgtacgacggtcaatccgttggcccaggtggagacggggaacatgccgtgaatgccggaggctccgcggcagaggtgaagaagggccgtttcctgctggtcgttccggtggtgggccagagccacgagagcccccggataaccggcggcccatttcagaaacgaggcctgcctggcttccctggccgcttcttcaatggctattccgcgggtatgggccatactgcggacattgacgcgttcccggacacagggaatacccagggaggcggcgtaacggagtacaaacatttcctcttcctccgcttccggacgcagctggtgatttacatggcatgcaaccagattgcatcccggcatgccggacagcagggaaagcaaagccatggagtccctccccccgctgattccggcaaggacggggcggccggagcggaggagttccgcggactggctgtcaaaatggtccggtgtcaacatggtgctgctgcgagtgaatcaggaaaaagagatcaaaggaagcctgcaaataaaaaccccgttttccgggaaggaaacggggctggaaaattgctgaaggcagttcttacttgttgagcttgggcttgcctccgctgcggcggacggtgccgaagcgcttctggaatttgtcgatgcggccttccgtgtccacaaactggttcttgccggtgaagaacgggtgggaatcagaggtgataccgcaggaaaccacgaaatgttcaaccccgtcaataacttccgtcttgggagaacgaacagtggaacgggtgatgaagcggcgtccggtggtgatgtcaacaaaaacgaccggattatactgggggtgaatatctttcttcatggtgatgtattgcgtttccgacgcaaggggaacgcaagtataaatatgtttcattgcatgtcaagcatccccgcgtaaaaataaggaagtttgtggatgacggttcgggagcttgcggaaagaacggttgtggagatgatatgacggaaaaatggagcaggtgttgaagaggcccccctggtgggcgtggttttccctgatgggattggaaatcccttctgccgccattgcctgggcttttgccgtcagccagtcccatctggtggtagtttcctccccctggctgtatcaattcctgtttgtggctgtctggtgcgtcaatatgctggaccgggtgctgaaaatattccggggcggttccgctgtctacacggatgaatgcctgctttttgccaaaaagcattgtttcgttatctccctgctcattatggtggcggccgtgacggggctttggatcatgtttttccaattgggtgtggttatttttcaatttgcctttctgcctggcgtctgcagtctgctctttctctatttctcttccaaccctcatcagaaagggagcctgtcttccggattcgtcatgggggcgttttttgccgccgtttccttcgctacgggtgccggaataccggcctacttttacgggacggtaggcggcggctggggaggccagctttccgaacccacctggtatctggtagcgctggtcatcctctgcatgttcagccgcaaacggtggagtgaagaagaggatgaggacgggcaggattccgccgaccgcgacatggtatccctggtatggatgggggtgatagtcatttacgttgtattctgtctggccgccgccgccagggaatataccggggatgcgtggatttattatgggctggcaatggcgggggcattcatgtttgtgctggacaggctgaagatgaacatgcctcccctcctcctgcacacgctatcctgggcggcactgattttcccattgctgttgagcggtattctggcgcaggcttcctcctgattggctgggcggattcctgctatggagcgcggcaaaatacagggaagttgaaaaaataatattttgtggttgcaatattgggaagaggatgatagattctgccccgcaagcacgttctgcgtgcaggcaagtggctcggtagctcagtcggtagagcaggggattgaaaatccccgtgtcggcggttcgatcccgtcccgagccaccattttttctcccaatttctaatccctcctttttatacgggaagtagctcagcctggtggagcgcctgctttgggagcaggatgtcgcaggttcgaatcctgtcttcccgaccattttaaagcctgtggatcaaatgatttacgggttttgttttttgagctgttccctggtggttgtccgtaaaatagatggagtggaagcggggtatgcctggaaagatgaaaaacacccctgttgcggcggggcggccgaacctgcagccagttaaaaaagccggaaatcttttgtgtccgaaacaacgcggacagaaaggcgatgcaaagttcttgtaacacccgtgtgctgacgaaagcctggtcccggcggcccggattttttctgacggcggggcggatgaataagatttgttaatgtgccgggctgaaaaacggtgtaaagaaaaccgccgcggggtgggaggtgcggcggaatggagaaaatgatagatgatagaaatagttttatttcttttttagtatataatattcggccaggacgccctgattgactgtgccttctttgtctgacagcattactttgcttccatcgagtattttataataagatttttcattggaagaggattgggccagttccatcaggcggccattgatgaaatgataagagccttttgattcgaaaatagcgtctttttctcctatgtattcgcttctcaacacataagtgttatcgttgtttaatgttaacgccgtcctgattccttcacaatcggcagcaggaagaattccttcataagtgccgtaaaaatttaaattctccaactgtttttctgtttttgtttcgccgctctcaattcgagaatgatgatttttgggggaatcacagccggttatggcaattaaacatgcgattcataaaaaatttattttcatgacaagtttttttcagctggtggtttgtgacgtgcgatgcttgatccaatggggcagggaagggagtacgttcgtttcctgtttttccggttttgccgtaatataatgaaagtctatggaaggggcaagatattttcttttcatggagcccgcgagtattgatgaatgccggattaagtaatttatcccgtttttattcaactttgccggaagaagagttttctaaccgggattgagtgttttgtagtccgttttacgaagatgttgttttttttgaggggagccgagtgtctggggaagccccctctttgcagatattgccgagaaggctggattttttgcttgagattaggaagaaggcttgcagagtggcttgatgaggcccgtccgacaaaagacattttccgtttcctggctggcggggttgaggtggtcgtttggcgggtatgtaacgggaacacttctggcggcgggtgcgggggcgctggattttcccttgctggcgcaggtgatgcttttggccgcggcggtttgttttgccgcctctcttgtttgtgcgggagcgtgtttccggggcagcaagattgcccggtggtacttgcttcttgtcctcgtgatgattatggttgcggttctgtttggggatggaggcggttaattagtcatttgtatatcttttgattgaccgcgtgcgcgcgtatgtatactttccggtcatgctccttcgattcttatcgagtctcttttttgcgtccggcattgttttgaccgctcaggcgaatacccagccttatccggattccgattcttctgacggatacgataccggtttttatgcagaggcttattccggcggctacgacagcgctccggctccggcgggggaatccgcctccaagcctgttttccccacgcagtcctattttgaattgcttggccccatggattccagaaacgggcgcggaagcgtggatatccagaattggatgacggatttgaatttgtgcaggatgtccagcggttcctggaatttttcttctacggcggccttgcgtctgagctggtttaatggaaaaggagcggatgagatggatgtggaccggctgtacacgatttggctgaatgtgaacgcctcctatgccatcacggggaagacgcgcctggttttcggtgtgacgccccagatttccacggatttcgatacatggacgagccataatattttcttgggaggccatgttcttctggcaggccccttgaacgaccggttcagctatggaatcggcatcggctgttatccgcagcttggggattatcctttcctgccccttatccagtttaaatgggaagcttcccgcaattggacgcttcagctggaaggggcccgcctttcctatatcaacaaggtgagcgatgggttgaagtggggacccttcgtttccgtggtgtccggcacatggacgattcaccatgaccgccgcgtccgccagtttgcatggatttccggcgtcgccggcataggcgccgatgtggggttgggtcactggggcagcgtgcgccccaggctggtggcggatgtcggtttttccttcgggaattccggcactatcaagacaagcaacggaagccatgatttggaaaaataccattatgaccccggtttttatttgcgtgcggggctgctatttgagttttgaccggccaacaggattagcgaatacatgacaaaggcctccggtgcgttgaatgtgccggaggccttttacatatggggacgtttgaagccgggacggttcccggaggcagtcaggcttcttcaacggagggtctgcccacggagtggtattcaaatcctacggcccggaggtttgccggggagaggatgtttcttccgtcaaagatgatgcggttgcgcatgactccggcgagtttctgcagatccgcattcgcatattcgctccattccgtggcgatgaccagaacttccgcatcccgggcgcattcgtacatgtcttccaccagtttgacccccatagggttcagaatgggggccgccgtgtgcatggctttgggatccgtagcggtgacaatggctccttccccgcagagtttttcacatagtttcagggcgatggattcccggacgtcgtccgtgttctgtttgaaggcaaggccccaaacggctatctttttgtccttgaggacccacaggcggtcccgaattctgtccaggaagtggatatgctgggtatcattgatgtgttccacttcctccaacagggtgaagggaatgcccagcgtgcggctgatgttgatgaaggctttgacgtctttcgggaagcaggacccgccgtagcccagccccgcgttgagaaagtggcgtgagatgcgtttgtccatgccgatgccttccgccaccagttccacgtctgcgcccgttttttcacagaccttggcgacagcgttaatataggaaattttcagagccaggaaggagttggctgcgtgcttgatgagttccgcggagttgacgtccgtttccagaatgggggcatgaatgggctggtaaacgcgcttgatgacgttcatggcctgttccgagttggctccaatgacaatgcggtcagggtgcagcaggtcgtccacggcgcatccttccctcaggaattccggattggagacaatgtcgaactgaacattcggccccgcatagtgcttgatggtctggctgactttttccccggttttgacgggtacggtggatttgtccacaatgaccttgtatcccatttctggttggagcgcctgggcgatttccctggccactttttcaatgtaggtcaggtccacggaaccatccgtattgggcggcgtgggcacggcgatgaagatgacttcgctttccgcgatggaagcggcgatggaagtggaaaattccaaccgccccacggctacgttttttttcacgagctcttccagcttgggctcgtaaatggggatggacccggattggagagtacgtattttttccgtgttattgtccacgcaaatgacgtgatggcccatttcggcaaaacaggtgcctgtggtcagccccacgtaaccactgccgataattgttaaattcatagtgttagcgtaaatattggtaaaaacttaactgtatggaaaagtaagagcagtcaacccctgagcattatgggatagggaattttttctgtcaaaataaaaagttcctgattgagcgcctcctttccttgtggtataaccgtgaccagacaggaaaatatctgtttattttaatttgaacgttatgaaaacacctatcaccgttactgttacaggagccgccggccaaattgcctattcccttctgttccgtattgcctccggcagcatgctggggccggatcagccgatcaacctgcgcctgctggaaattcccccggccatgaatgctctggaaggggtggtgatggagttgcgtgacgccgcgttcccgctggttaatgaaattgtcccgaccagcgatcctgatgaagcgttcgccggcgccaactggtgcctgctggtaggctccgttccccgcaaggccggtatggaacgcaaggacctgctggatatcaacggcaaggtgttcatcggccaggggcaggccattgcccgcagcgccgccaaggatgtgcgcgtgctggtggtcggcaacccctgcaatacgaatgcccttattgccatgcacaatgcgagcggcgttccctccgaccgcttttttgccatgacccgcctggatgaaaaccgtgccaagagccagcttgcggaaaaggccggcgtccatgtgacggaagtgaccaacatggccatctggggcaatcattcctccacccagtaccctgatttcaccaacgccaggattggcggcaagcctgtgacggaagtcatcaaggatacggaatggcttaagggcgatttcattaccaccgtgcagcagcgcggtgccgccattatcaaggcacgcggcgcttcttccgccgcttccgccgcttccgcagccgtggataccgtccgcagcctggctacccagactccggaaggcgactggtattccgtggccgtttgctccgacggttcctacggcattgaaaaaggtcttatctgctccttcccggtccgcaccaccaaggatggcggctgggaaatcgtgcaggggctgccggttgatgcgttctcccgtgaaaaaattgacgctaccgttaatgaactgaaggaagaacgtgacgctgtttcctctttgttgaagcattaatgttgatttgctcttgcgccgggtttcccgttttcgggaagcccggttttttatgtcctgaagattccataaacctcattttctgcgggacagaagttttcttccgtgttaaaaaaaacgatggatgcagcatccgctagtttatggatcaggaccgcatattatacaggggagaggcttttacgctgaccggaaattccttgcgccaggatgccgcgcattgggcggaggtacagccggacggtcaggtgaaaaccatgaaaaacggccgctattccgagtggcgcatctttccggaagccgggaacgccccgcattaccggggaaattttgaagtgcttaatcaggcttacggcctggcgttgcatgaggctggagccctgcttaatgaagaagggacgttccggacgggagccaactggcctactgtgtggagccgggatatttcctattccacccatctgggattggggttgtggaatgtccgtgcctgtatgaacagtctgaatgcacgggtccggaacggggaggtggagcaggataccggcacgggcggttcctggcccatttcttccgaccgtgtggtgtgggggatggccgcgtgggaagtttactgcctgacgggggatgccgactggctgtccctttcctgccgagtgatggaaaagacatgcatgagggatgaacaggtgcttgcggccacgggcggcttgatgaagggggaatcgtccgtgctggactggagggagcagagctaccctgcgtggatgacttctgccgatattggggattcttgcagcctgtccaccatgctcctgcatgcggaggcccgcaagattctggcgcggatattccgggagctggggctggaggagaaggcccgggagtgggaggagaagagcgtttccctggccgcggttattgagcgttttttcaggattccggaacatgtcctgtacgggcagtacctgtacggacgcgggtatcccgtactgtcggagaaggtggattccctgggcaatctgctttgcgtccttctggggcaggctggcggttcccatgccgccgggatggttgcctcccttcctcatggcgtttatggcattccctgcatccatccccagatgcctgatagcgtgcccgcctaccataaccgcgccatgtggcctttcctggagggctattatgcgcaggccgcggcagcggtggagaatgaatctgccctggcgctggcggtcgcctgcatggtgcgtgccgccctgttgtgcggcacgaacaaggaaaatgtccttctggaaacggggctggatgaggggctgctgctcagttcggatagccagctctggagtattgccggcatgctgggctgtttttacaagggattgttcggcatccgtctgtctccggattctctggaattccgtccttgcgttccaaagtcttttgaaggcgttcatgagttgtccgggctggaataccgcggcatgacggtagatgtgtttctgcagggctgcgggcaccggatagcgcggtgcctggtcaacgggcaggaggcccctcccgtccttttgccgggcatgaaggggcgcgtttttgtgaaattggagctggacggcggagaagaggatgaaggggcggtgaatttaacccgcatgggcagcagcctggagtctcctgcgtggaaggcggcgcgccatggtattgcatgggagtctgtggaaggagccgattattaccgtgtttaccggaatggcatccctgtgtctcaaacggagtactgccattatatccccgcacccggccggggggacgtgtctttccaggtgatggcagtcgctctggatgggagggagtcttatcttaatgaacccaatgattatccttctgcggattcccgcatggagacgcgcccctgcggcttgagcggggatgaagtctggttttcccgcgtcacggaatccccggacgctctttgttacaatgtcaatatagataagcccggagtgtaccgggtggacgcctttttcgctaacggcacttatgatgtttcagacgggaatacctgcgccctgcgcagtctgtacctgaacggcaggcgcgcaggcacgctggctttcccccatacgtcccgttccggaaactgggagtattttatttattcaacggcagtggaaacggtgatgacgcccggtccctgccgtgtggaagtggtgtatgattccttttccgaaaatatgaatcgtctggtgaatgatatggtgataaaacaccttcggtttacccgtatatcctgatattagttcatgaatgttatgtcgaaacgtttttttgccttgttgctgatccgggtccgggatatggagtgttcctgccatggggatggatgaggagtcagcttccagggcatctgttcctgcctcctcggacagggagggagcggagtttacccgtctgcccgtcagctggacggttaatcccagggatgccgccaatgcccgtgccgcctggaaaacgctgagcgcctatcatcggggcaaaccgaagtcttccagaaaattgcatgtggtttacgtaacgttcaaggacaggcctgcccttgaaggataccgggaacggtatgatcatattctgaagaatattcaggcatattatgcggatcagatgcaggccaacggtttccctccgctcacattccagctggatttggatgaacggggcaagctggttattcatgatgcctatgtggataaacccatgagcgagatgagcgtgcagagctccggccccgtctcccgggaagccgccaggaaggtgctggcttccaaggggattgatattgagaaggaacatgtgctggtcgtttgccagcttccggacggcgtgggtccttattacggcggcggcttcagccaccagggcacggggtggacctgtgaccaggaagggctggatcccgccagctttctggatacggaaatgatgcagggcggccgtttcaaggtgaccaggggaaagaacgccaccatttacataggcggtacggcccatgaattggggcattccttcggccttccccacacgggcgacggatggaattaccccgacgccggagcttccctgatgggccatggcaattccacctacggcgacgagctgcgccatgaagggaagggtgcctatttggcgccgacggatgctttgaaactggccagtgttcccctgttcaacggggtggagacggaacttcccgcagacgcctccttcgggcgtatgctcggcaagtatgtcccggggtcttttgaacggctggaggccattcccgttaaagacggattgcggctgaaagggagggttcatctgacgcgccccgcgtatggcattgttgcccatttggatccgcccggaggttcggattatgattccaatgccgtgggcgcttctctggatgaaaagggagagtttgatctcaccatctgcaggccgggatataagggtggttttatagaaatgcgggtggccgtattgaattgcgacagcacgcgcagcatgattactctgcccgtgtggatggatgcccggggagccaaggccccttctctggcccagatcgtttatttcggggatgttcagaatctgtggatacggggccgcacggaagaagcccggaaggcgctggcggaagtggaacgcaggcatggttcccgttctgaagtgaaagaatggctccctgtctggaagcgcgctctggggcgccaggagcccgcgctggaagttgttccggcgcagattcctgcggcaaccgccagtatcagcctgaatgactgcaagccttccgtagcccaggtggggtgggccgttccgttgtgggatgtcctgttcccgtcggatttggggcccgtgcctttcttccggacaatcggaaggccggaacgtttcattctggctcatgccccggctgtttttgcctatgacctggatgggcgctggaaagagttccgcgctgatgtggggctgcccttcggctcccgcggcagcgtcaaattcagcgtgtatttggacggcaggaagcttatggaatcccttgtgctcaaggacggggactccattcccgtgaagacggcggtagagggcggcaggaagctggaaatccgcgtggatgacgccggagacggcaatgccgccgattggggcattatagccaacggcatgctgacccggtaaattttctgtccccactggcggagaaatgtgacattaggcttgtcttttgccctttctcatagtgttctgtgggctagccatgattgggacgattgcaaagctatggggtgcggcggcgctggttgccggggcttccctgtttgcagaaacggctgcggagcagccgcccgtcccttcctctgaaaccgggcaggaaaatgccggagggaaaatggcgggcaatctgctttccggcactctcatgccgcagattccctccaatatttccattaccaatgacggcgccatcagggtggaggaatccaggaaggttatttttgaaggaccgcatgtccacatggtgacggataccggggtggaggtatttgcggattatgcccaggcggatatggaccagggcaaggtgtttctgaaagggaacctggccatttaccagagtgacggcaggacaaggaccaacagcctggtacgcgccgacagcgcggagtttgactgggagaacgaagtgcttcttacggatgccatccgtgcgaagatggagggattgattctgcgcagcggaaagtttgaatcccggaaggatgccgccggcaacacttacctggaagcccgcaatgcctccgtcacggcggaagacatcagcgaacctctcacctggatttccgccgacaggatacgagtgtatccggaagacaggttttctttcaagaacctgaccctttattacggtggcgttcccttcttttatttcccctacctcagccattcccttaatccggaagttggctatcttcccatccccggcatgcgctccatctgggggccttacctcctgaatgaatacgggttcctgatggggaaaaaatggtcggacaacggcatgccttccgcggattacctgggaaccctgcatgcagattaccgcacccggcgcggtttcgcctacggattggacatccgcgacgtgctgctggaaaaggattgtccggacatgacggggctgtccttttacaaaacccatgacaagggggtgaaaatcaacgccggtgatgatgagtaccgtgagcatctggatccggaccggtggaggttcgcgctccagcagatgtggagccacagggtgaatctccgcacggactggcggttgaaggccaacatcaacatgttgagcgacgagtacatgctccgcgatttttatccggaaatttatcagcgcaattcttctccggacaacacggtgcttctttcccgtacggacgatacgaatgatttttcactgttgcagcgttttgtccccaataatttctacatagcggaccagcggacggagttcagttatgagcgtatcaagtcccccgtattccgttcccccgtcatgtatgaaagccgcaccagcttcgctttcctcaagcagtacgttcctccgttcatgcggacggaaatccggaacatgctggacgggatggaacccggaacttcttcctatgattactgggcccgaatgctgatgacggacagctacagcaggttccactccttccatgaggtttccgtttccaagaaaatcatgggattcctgaacctgacccccaaagtgggcggaggctatacgggatattacggcgtggaggactacaaaccgctcaaccagggaattttttacgccggaacggatgccgatttcaaattctcccgccgttattcttccgtatatagtgattcctttgggctgaacggcatgaaccatattgttcagccccattttacgctggcgtatgtcaaaaccaaccgcctgagcgagctttatccccagattgacggcgatacccccacgaccaatcccccatccttgagcataggcagatacacggagattgattccctgtccacggggcttgtcttccggtatggattgcgcaacatgctgatgaccagccgggacgctaattcccaccgctggttttcctgggatgtgttcatggatgcctatctgcatgatcccgtcaaccagcgggatttttccaaccttttttcattcatgcgctggaatcccgttccctggatggaataccggtcggaaatgcaggctcccgttttgggtaaggacaagatttccggctgccgtgaatacaacaactccctgcgtttcatgccatggcgttccacggagctcgtcgtggggcaccgttatttgaaccagcattcccttctggaggacagcagccagctggatctgcgtgttttgcagcgcttttcggaagcctgggctttcagcggcaaatggcgtttttccctgttggacggcaagctggacattcaggaatacaatgtgtaccacaatatgggatcctggtatttgggcgtgggcgctttcgttcgcaagaacgggaacaaaaacgaattcgggctgggcatcagctttaccatccagcagaccggggattatatgccggttaaattcctttgatgtccggaaaggacacggttttttgcgaggtttttcccggaagctttttcctttttcagaggattcgcgttttgagaatgggttctgcccggtgcggggtgttgttccggaaagggaaagatatgtagctggtcggcaagaggcggaaagccatgcggttggaagggtggggagcggcctgtttccggcgtgccggacaggaagaagaggcaaggagccgctgccgcgcttgtgccggaaccttggcttgcattccggcagggaaacggggaaaatgccagggcatggagcaagctgcggcggaaaaccgtccggcttcctgcacgaataatcataaggctctgtcacaacaaatggttgattttgacgagaaatagcgtataataatagtaagaaacagtaccaccgaaggaggtaattggatatgcctactatcaaagacgcattagatattatcggtaagttgactgtcgcagagcaggaaagccttaaaacaatgcttttaagtcctgcctttgtaaagtctttgaatattgaagatttcgtagcaaaggaacgctttgcaaatggtcgtgtatgccctctttgtggctgtatccatgtggttcgcaatggtcatcgtaaagatggcacacagcgatatgtatgtaaggattgtggcaagtccttcgtgattgctacgaactccattgtgtctggtacaagaaaagacttgtccgtgtgggagcagtacattgattgtatgatgaatggcttatccattcgtaagactgctgttgcttgtgggattcacagaaacaccgcattcctttggagacacaagattttggatgcacttcagaatatggcagacgatgttacccttgacggcattattgaggctgacgaaacttttttcgccatctcgtacaagggcaatcatagcaagagtaagacatttgctatgccacgcaaggctcataagcgtggtcattctacacatatcagaggcttgtcccaagaaaaggtatgtgttccttgtgcggttaataggaatggcttgtctatctccaagattacgaatactggtagagtttctacaagagatttacatcatatttatgatggtaggattaagaccaattccactcttgttacggacaagatgaactcctatgtgagatttacaaatgccaatggcattgaccttgtgcagttaaagactggcaaagccaagaaaggcatttataatatccaacatatcaatagctaccatagccagctaaagaggtttatgcgtggctttaacggtgtttctaccaagtatctgaacaactatcttgtgtggaataaccttgtaaattacgccaaagaaagcgacatggagaaaaggaacatcttcttaactttcgttttggcaacattgaaaactgctaaatgcagagatttatcaaacagaccagcagttcctctggtcgcctaattagaatttgtggagatgataagatggtcaatataacagatgtaaaacagattcttcaatttgcaatagatgcggagattaaagtctttcttgatggtggctggggtgtagatgctcttcttggatatcagtcaagagcccataatgatattgacatttttgtagaaaagaacgattatcagaactttatagaaataatgaaagctaatggcttttatgagattaagatggaatatacaacattgaaccatactgtatgggaagatttgaaaaacagaattattgatttgcattgttttgaatatacggacgaaggtgaaattctttatgatggggattgttttccggtagaaactttttcgggtaaaggaagaattgaggaaatagaggtttcctgtattgaaccatatagtcaagtaatgttccatctgggatacgagtttgatgaaaatgatgcacatgatgtgaagttattgtgtgagacacttcatatcgaaattccaaatgagtatagataactgcaaataacagtttgtaggggagttctgatactcccctataaaaatggctatttatcaactgtttgttgtgacatagccaatcataaatgaatatgaacgctcaggaattgatcgagacgctggaatggcgttacgccaccaaggtattcaatccggaccgccgtattccggcggaggactgggaagcccttctggaatccctgcatttgagcccttcctccctggggcttcagatgtggaagttccttgatgtccgggatcccgccgtgcgttcccggcttcgggaagtttcatgggggcagccccaggttacggacgcttcccatctggtggttttctgtgcccgcagggatttcaagccggaagacgtgcagcgctatctggaacgtattgtggaagtgcgcggtgttgccatggactccctggaccagtaccgcgcccgcatttttgaactggtgggttccaagtctccggaagtgctgaaagcctggctggaacggcaggtgtacatcgccctcgggttcatgatgagctgcgccgcggatctccgcgtggacacctgcgcgctggaagggatggatccggccgcctatgaccgcattcttcatctggaaaattccccttattacacgctttgcgccctggctttgggttaccggaatgaaaaggcggataagtacgcccgtctggcgaaagtacgttttgaccgggatgaagtcattccggtcatctgacggagttttttactaatccccggtttcaagcagtagccgcatgtcttccggcaggggggcttccgcggtgaaggtttcttcatcaaacggaaattccagccggcaggcatgcagcgcgtggcgcggcagaaccagccgctcctccagttcccggctccatccgtgctggatgtattccagatagcaatgttcggacggaccgtaaattttgtcacccaggatgggatgtcccaggtgcgccagatgcacgcgtatctggtgcatgcgtcccgtttccggaatgcaccgaaccagcgccagggggccccggcgtgtattccatgtccgttctttccggaaaacggtagtgcatgcttttccggctgggtgcacggcctgtttgacccatatgcggctttccgcgacttccccctgtcttaaaatgggggcggtgcatgctgtttccgtccattcaggccattcctgcacgattgccagatattccttgtgtatcaggcgccgctgcatggctcttcccagctccctggccgcccttttgtgtttggcaaccagcgtcagaccgctggtttccctgtccagtctgttgaccagggagagggcggctccgttggctatttcatagcttagcagggcttccacgccttccaggaggcagggttcctttttcccgttggacgggtggacgatgaggggggctcccttgtccaccacaatccagtccccggattccgccgccacctcaaagtgcggaaaacaggcaattggtgcttcggaaatgggaatccacatggcggatgggaggtttacagcgcatccggacggataggcgcccattcccccggtttcaggttcaggctgtccagatgcagggagccgatggaaacacggcacagagataagacgggagcgcctacggcagccagcatgcggcgaacctggtggtattttccttccgtaagcgtcagcagggcgcgtcgcggttcccggatttccagaagggcgggggcgcaggggcgggtttccccgttcagcgtgagggttccggaggcgaacaactccacggcttctgtcggaatgtcctcctccgtgacggcttcgtaaactttggcgacgtgatggcggggggaggtcatgcggtggatgaattttccgtcgtccgtgaggagaagcaggccggaagtttccttgtccagccgtcctacggaagaaaccgcagggttcctgtgccgccactggaagggcagcaggtcgtaaatcaaatccccctccccgtcgtcatggctgcaggtgtacccttcaggtttgtaaagggcggcgtacaggccgtccgggaattccacaggttctccgtccagcaggatgccttccgcctgcaccttgtccgtgggggaggagcatggttttcccttgaatgtaatggagtggcgtttgatccaacccggcgcttccctcctggaacaatatccgtagcgggataaaagggcatccagtctcatgcggcatattttttcctaacgggaacaaaaaacaaggttgaagtatgcctccccggctgatagcattaaactattacatgcggggccgccctggtggggcgctgccgttgttcaccatttacgcttatatagttccatgattgaaacgattacagaagaacagttgactccccagcaggccgaattttgggtgcgcgcccgccaggcggtggacatgaacaattatccctatgccgtcagtctgctcaaggccctggtaaagcagctccccggttttctggaaggccgcaaggcgttgcgcgcctgtgaaatcaaattgaatccggaggccaagagaggggggctgttcagcggcatgaaaatcagcaccagcaagcttacttcttccaaaaaggacgcggctacccagctttccgctttggaagacgaattggaaaatgatccttacagcattccggtaaacgaggccctgtacacggctgccatggaagtaaattttccggatctggccgcttttgctctggagaccgttcgccaggggcatcccggcaacaagaaaatgctccacatgctggcctcccattacgtttcccgggatatgccggcccaggctgcggaagtgtaccatgaccttgtgaagctggatcccacggacagtgtggccgtaaagagcgaaaaggactgcatggcgcgcgccacgatgcagcagcagaagtgggaggaggctaaaagcttccgggacgtgatgaagaactcgtcggaaacgaacaccctggacaagagcgacaagaaagggctcacccgtgcggaactggaagagcgcctggggcttctctccgcccgttacgcccagaaccagcaggatctggccgtcgtgcgcgacattgccggcgtttatgaacaaatggaagattgggccaatgcctattccttctataattacgcgttcagcctcagcaacaatgatatttccctggaaaacaaggcctcggaaatgaatgagcgatgccgcaaggcccaggtggaggaaatccgccgccgcgctgccgcggagccggataataaggaacttcaggaacagcttgcccagttcagcaaggaagctgcggagcagcaggtggccttgtgccgccagcgtgtggaaaacaaccccacggacccgcaaacccgttttgagctgggccaggccctctttgactgcggcaattacacggaagccattccggaactccagcgcgcccgcaacaacccccatatccgcatccgcgccatgctgttgctcggcaagtgctatgacgccaagaacatgcatgatatggccctgcgccagctggaggaagccaataaggaattgatagaaatgaatgacaccaagaaggaaatcctttacatgatcggcttgctttatgaaaagcagggcaagaagggggaatccctggctgcattccagcagatttacgacgccgagtacggctaccgcgacgtagccaggcgcgtggaatcctcttacggcaattagggggttcccgttttgcgcccgtaatgggacgccgtgctcaaagcctttgccggaaacggcaaaggctttgctgtaggaaggttatttttatttctgcggacgggaaccgtaacagctttcatcccggcgtcccggcgggcaacggagaggggcgggcgcccctgtgttttttcttgtccgttccggaaggaactgaaagaatgaagacggaacgagctgatgcaggcattgcttacgattgacgttcaaggtgattattttgcggaatgcactgcatgccgagaatcctgtgagtatgttggcagctggttaagtatggatatcaccaacgaatacgaaaggatgccggatattggctgcatgggaaagattgggggtctttcttatgaaataccagggagggaagtcttatgattcttttgattggcggcagcacgcatacagggaaaacactcgcggcgcagagggtgcttgaaaaatattcctatccctatttatccattgaccatttaaagatggggctgatacgcagcgggatatgccctttctcccctgaaagccccgatgaagagctgactcccttcctctggggcattatcaaagaaatagtaaagaccgcgattgaaaacggccaaaatttagtggtggaaggttgctatattccctttgactggaagaaggattttacgcaagcctgccgggaacggatacggtatgtatgccttattttttcagaaaattatattcaaaggcattatcatgatatcctgaaccatgagaatgcgattgaacggcgcgtagagagttctcccgttacgcgggaagagttgctgcgtgaaaacaggggcaatcttgaaaaatgcaggttctatggctgtgactatctgttgattgacgagtcttataacgtggagatcatgttgtagagaacagaggctttccattgtccggggaaggaaagagaaggttatgccaaattgctttgtttataggcgcaggcggtaagagagaggttcttccacccttcccctgtattttttccagaactgcccgtgtcagagcaccttggaaaaaaactcctgcagcctgggattggcagggcggtcgataacgcggtccggaggcccttcttccacaattttccctttatccatgaacaggacgcgggaagcaacctcccgcgcgaaccctatttcatgggtaaccactaccatcgtcagtcctacctgcgccagctccttcatcagggagagcacttctcccaccatttccgggtccagggctgatgtcggctcgtcaaacaggatgacatccggattcatgaccagggcgcgcacgatggcgatgcgctgcttttggcctccggaaagctggaggggataggagtgcctcttgccgtacagcccaatgcgctggagaagggcttccgcctggtctgctgcctcctttctgctggagcgtcccgttttaaccggggcgatggtgatattttccagaatggtcaggtgcgggaaaaggttgaaatgctggaaaaccatgcctacgtgctggcggaattgattgacgtccgttccgggagaggtaaccagctttcccttgaaacggatttctccggaggtcggttcctccagcaggttcaggcagcgcaggaaggtacttttaccggaaccggacgggcctacgatgaagaccacttcaccccggtcaatgttcgtggtgacatcgttgactgccggcacggagttgaattccttaaccaaatggctgatttggaacatgggagtgtttccgggatgttcattcattgtttttcagttttctttccagtttgccgagcatccagctgaacagcatgaccacggagaggtaaatcagggccacggccgtcagcggcatgaaggcggtataagtctggctccggatgatgtcgccgcccttggtcaggtcctggagggcaatatagccggagacgctggtctccttcaacagtacgataaattcgtttcccagggagggaagtacatttttaaaggcctggggcaggataatgtaaatcatggtttgggcatatcccaggccgaggctgcgcccggcttcaaattgtcctttgtcaatagacatgatgccgcctctgatgatttccgccacataggcgcctgagttgaagccgaaggccaccacggccaccaacactttgctgacatccacggagccgaagatgacaaaatagatcatgagcagttgaacgaccaccggcgtgccgcggatgactgtcaggtacagtttgcagagggcattcaggaaacggagattgcccgttttgtcatgcgtggcgcggatgacggccaccacaaagccaaccagaatgcccagcagaacggaaaagaaagagacctccaccgtcaccagaaagccgttggtcaggtatttccagcggccttcctgcatgaaattgacataaaaggattctttcaggtccagccatatattttccagccagccccctccggaagcgtgttgttcgggatcggcagcggatttaacctgcatggccgcataagcgttccgtatttcctccagctttccggaggctttcaatgctgcaatggtgccgttaatatcctgaaggagagccgtatctcccttgcggacggcaatggcgtaggattcggaagtgaggggctccggcagaatttccagccgatcattgcccgctacgtacattgttgccggatcctggtcaatgacggcggcgtccaccttgcctgccgccacggcggccacagccagcgctccgttagggaagcgttccggctgctggatgttccgtgtgacgtaaatgtctcccgtggccccgtgctgcactccgattcttttaccgcggatatcttcccgcttccggatgggagaacctttgggaacgatgataacctgagcggcttccacatagggaatggagaagtccactttcctcctgcgttccggcgtaaccgtgattccggaggcggctacgtccgcctttccggaaactacagccgtaatcacggaatcaaagctcatgtcttcaatgaccagctccctgccggtgcgccgggctacctcccgcatgatttccgggtcaatgcccaggatggcgtttccgtcccggaattcgtagggagggaaagtcgcttccgtcaccatcaggattctgccgttttccgccgctggtgcgccgcagcataggagaagccagagcgtcagcagggctccgagatgattcagaaaggaaatggatggcatgaaagcaaggggaaaaggtgaagtctgaaccggcggggtatatgatttacctgcctgcaacgcaataaaaaactgtttcctcccggttccggtttgtcctgtcccacggcagggaagcggagtagcgggccggacggagaggaaatggcaacgaatatgaatggcatgaacccggaagatacccaagatttttttgtttattagcaagagggagggaatgtatcttgtgataattttcccgattaatatttccaaagggagggaggatcaaacttcctgctttggtggcggtgtatgtttggttttggaaaattgtcatgcatccggaatgtgatgcatggcaaggtgcatggcggaaccatagggctgggtggaataccgcgcaaagcaaaaaaatttgaggccttgcaggatgaagtattctgcaaggcctcacgaatgggaaattggtcgggttgacaggattcgaacctgcgaccccctgcaccccatgcagattttataattaaggtaaactaaagcattttattatatcattgtaatttcaatgtttttgaaattgtatatacatctaaattatatttgtttagtacttgtggcgtgtggctgacgtgtggcttttcggtggagtttagaaaaagagcgcatccgcgcctatggcaagtccttgtgtctggcgtgattctaccgcttgtgcaggcatggcaacggctccaactgctccaacaaggccattttcataagcttccgcaaatgtcctaaaggcgtccgctgcgtgagaacatctattatgcaggggggtatcccgttcaacaccatgtgctcctgccggggccttctgataattctccagggcatttacgccagacatatattccactccgtcaattttcaggggccgggagcatcgctcatgaaaaatgcaatgattcaggaggcgccgtaccgcaaaaataccattccacacatcggaaatgcgcggcactacggacacattgaaccctgctcgcctcaaatacacgtcaaaggtaatcccgtggggatctctcctccctgcgtcgtggggaaccagatgtttgtaaatgggtccaaacatcacttcccacttcgttcggatgaaattgatataccactccaagggcttttcgttggcctgcaagcaatccatcacgtaaaacttgccgtctcccctcacctgccagagccagagaaccatataatcagccatgccaatatcccaggacacgtaatagggagccaggtcgtccttttcaaattctccgcacaacctccctttggatctcaacatatcaatgtatgagccataaatagacccttccaccaatgactgaaacgcctcttccggtgtagagggatattcctgacagaccaatcctccaaatgtcttgtattgggaggcgtaccaacgcttttgggcatcattcagggaaataccgcaccttaacctcaaatcctcgaaatacttttgcaaatcctccggaaaaccgcctccctgttcaccatcagcctcaaggaaatactccggatttttccaccaggggaagaaaaaaaacttccaatccagggaagaaagatgtttgccgaccatttccatggacgtcttggtcatctcgtaattcaggccaaactttcctccctcatgggtggattcccgaacaatcactccatctttggaaacggcattcatggcccctgtcacaatctcgcgggcccgcagaggggcgtgggccgcgacgtatccaagttccgagacatgcaaaaactgaaatgtgccgccacggagagatgtgccggctgtaattttactcccattggaaaaagacaccgtcgttttggaaggtctggcttgaatctcccctttaatgaggcgtcctaattcggccagggcaacgtcttcttccgtgggagaatccggtacataatccaaactcctgtaagccaactcaattttgccaatcttgccagtcccatccaccaaagtcttatcaatgatgccgcaatggaaattggatcggaacaggcacatgtccagcatcagcatggccacatacgtggaaattcccagctggcgcgctttcagaatatcattcctgtaccataactgctcatgaagccgccgctgggcccaattcaactggaacctttgcatcttgccctctttattgataatccagtaaaggtgatttaacctccacacgcgttcggaaagtcgttcttttagaatctctatattattatccattatgcctgaatagctaataaattgaaatcgcggttgccggaaacgcggatgcccaccatggaatcgtaattccagcatccatcagaaactagagaatgccatccccttgttaaaaacgaagacggggaacgatccagtacatcccagcgggttccgtcgatgcttacctcaacaccatccaccagtgcatcagagccaaagaaaaacatcactccgccgctatgctggcggcgtccagcagcttcaagagaaatcagggcgttagtctctaacacagacacaaaatccctacctcctggatcctgaaactcattacccggcgccagcacctcaataaaccgtccatcctcccgctccaccagggcaaacagcaaatccgcctgatccccattgggcaaaacggctaccccctcgaacactccttctgtcgtgtaccggtgccaggcatgcacctggtgcatgctattataagtcatcagcgccagtgccccgtcccggcgtacaaacaccgcccgcggctccggcttgcgcacaaaagcaacaccccggcacccaccgccgtcggccagcacatgatcggcaaacaccgtcaaatcgcgggacacaaacccgtcgctctcgtaatcatacccgtactgatacacccgtccgccgcccctctccacatacagcaccttatcggtcgccatcagggccggtacatcggaagaacccacaaacccgtgattatccgcccgcgcattggcgtaagtcatcaccccctggccgccggacaccgcccactccgcgtccgccgttcccagcagcagccgggaactctgcgccatcagccagcaaatcctgttctgcgttgtggtgctcaacgtcaaagccagcgcggaatcatcctgcttccccacctcgaaactgttgaggtcatccgtcttgctcaaccacaccgtctgcggctgggcctgcgtagcggccagcaccaggcgctgctgaaacacatccaccagggaaggaaacccgtacaccccccggaacgccgcgaaactccacatcaacgactccccggacggaggcaccccctccggaaccgcggacacattatcccaaagggaatactccgcggaagtcgtcacctcggccacctctgcctccatccacgccgtacagggcggcacctccagctgcgctctggcccgttgactgacggaacctccgatccaggtctccatcctcaccacataaaccccgtcctccagcaccgtaaaagacgccttctccatcgtggaaaacacaggcatcaacgaataagaaccgccattaccctcgcaaaaagaacacacattcaacgtcgaattcagccgaatcgtctgtccggcataaacgcagacaaacccctgcatcgacacgactgtacccgctggcagaaaaaatcgatacctctcaatcgacccctccgcaaaccggtccaaattcacctctgcctgctcccattccaggcgcaccatgctcccggtgccgacatcatccgtcgtcaacccatcgggcttcaccgtcagcgtccgtccctccctggacacctcaaacccgccgtccaccttggccccatcaaccaacaatgcggaaaaaaacggcagccccttcttctcgaaaaaatcgcaaaaatcactccccaaaggcagcgtcaacttgcgcacgtcgctggtagacagggaatgcagccgcagcaccacatccttcttataagcatccaccaccagcttattcccgcaggaatcagccggaaacccctggctgggatcggaaccgttggaaagctgggactcatacaacatcaggcgtaaataacactcatcccccgcctcgtccccggtcagctgcaaattggaagcggcccccaccggggaattggacgtaccaagcagctgccaatcctcattcggaaaacgccgctccacggcatacgtgccgtaccattccttataacaataaaacgtccaggtccccttgcaggtaatcgtattggaatggcaaatcacacccttatgaaaatgctccggataatccgccggagacgtcaggccgtccacaaaatccgtcgccccgttaaaatccctgtcgcacgtccaccaggaccagtaactcccctcattgaggcagagctttttcccagccgtgaaagtgctggctgccgtaaacgccttggcaatcacccaaccctggcgaaccacggcccccgtgctgaacccggtctgctggggcaccgtcacctggacgcgcatcacatccccctcgttaaccgccgcatccggatcggacgcatgatccccgaaagacaccctgtaacacccctcatccaacgtcaggcgcaccggaaaatcccggaactcctcataccgccaggggcgggccttaaactcatagggagtcagggaaaacgcgccctcgtcatcccgtttcagcaccatcagctcatgcgtggggcaggccagaaacaacatgctgttcacctgtttgtggcgcaaagaggaaacatcgtcctggctccaaacggaaggcagggaggcaaccacatccccctcggcggacaacacgcgcaacagggaaggggacacctccacaagaaaacggtcattggtggaataaacataaggcaaaatcacggaaccctccaaagcggcagccacgcgccggaacccgcggcgccgggaaacgccgcccatctggcccaggtccagattctcaatcctggaagccccacggtgaaaattatctaaatccgcccggacggcggaagtaggagaaagctcgcctccgttgaaagcgcatcgaatcatgtaccatcattacaacaaaaagctgaaggatgaatacaaccgtaacttgactaaatctgcatggttagattagtgaaatactttgacaatcgggatatgaagggattacattttcctctatggcagatcaagaatcttctccgaaaaagaaacgttcaaagcggaattgtatgtatggcttgctcatcattgtctccgtacttttcattgcatggcctttcatcacatggataagccttggtatagcggacaggttgtttgaaggaatcaattttccagaaacctctcgtttcggaatcagtggtgatatgtacggaggtttaaatgctttgttttccggattcgctttcatttgtttcatttatgcgctttatcagcagcgtttagaacttcaacttcaaagaagagaattgagtttgcaacgcagggaattgaaggctcaatgcagggagcaggaaagacaggctaatgaatttgcacttcaaaataagttgatgaaaattcaacagtttgagagttttttctacaaccagattcctattatcaaaagacttcaagatgaaatccaaatttacggagatagcggaagagatgcaattaatatgctatatgttaatttaagtagggtggaattacagataaattcggttatttctgatattaaaaggaaaaaaggtggggaattctgtgtgtatccactggatatgtcgcgtgacgtatatgcagttattaaaaataatgatgaaatttggaattttgatgttcttatcttgcaagttaatatgataagaccttgggttgattctttatataatcttttattatttataattaaaaacaaaaatttaaatattgaacaaaaaacgaaatacttggaaatattgaaatacagttttctatgtgaagattggcaaacgttacactctttaggtagattgttaaattacaataaaatagtagaatatcttttagataaagaattatttgaaaaggacgagtcaattgaaaaaatctcagaagaaaaaattcaatttcttcagaacgaaatgaagttgaaaagcaacctaagtttggaatcttgtgaaatagacctttaaaccaacggttcatccttcacgccgcccagtaaccctgggcggtgttctttttcttccggtgcggcatctatcccgtcaaactcaatcggggcggctttaccattatcaggatgtacaagatgctcctgttgcgttccggcaagcaccgcggcaatctgcgacaggccgggaacatctaccggttccggctcattgtaaccggccagcttggaaagctccctcaccgcctcaatcttgccgggcatcttcttgcgcatccctgaatctgtgtaggcaacctcctggcataaaggagaatcttctcctacttctccaatcggtgtacgcaacacagcagtaagaaactcaaggcattcctgcttggtggcaatcgctgatctgtccaactgggcattcaattcatcaatcattcgcaaaatttcgccatctttggacaaacgagaagccgccttactggccgcgtcattactcatgtccttgcgcttgtaagctttacggtatgagtccgctttggacaattttgactcaaccaagagcctggcaaattccttcttcttctctgtggcaatagatgttttatctctcttaggcatgatctttcatcgttcgtgtgatcgcgtcttccaatcgtttacgcccttgtgccgtgaggaaataaccttttttgaatctgccgccatattgggaagtagaaacgtctcctgcaccgcaaagggtattcaagtgaaagcacagacggctggaagatacggaaacgcggttggcaatttctccgaaccgaatgccgggattaagaccgatacaggaaagaatggctatctgaaccggagacattttcagccgtgaaaaagcagcagacatgatagacatcaattttaactccgactgcttcatgcctcacctcccaatcctaattcttttctccattctcgcagttctttcgccgccgtgtcggtatccacaacgggcccttccggctgccgtggttcttcgagtttcggtttcttgcgggcggagacgggcttccaacgcgtctccttagcccacctgtcggcatgcgtcaaaacgtcgccgaagcactcccaaaactttttacggctgtccggacgccaaaaagctttcttcttgcagtcctccgtcagtcctgacgcgtaataatccctcaacatctccatatcccgcggcgtcacccggccctgtgcggactggtacgcctcaagcgcggctgcctgctcaatggcggttggcattgtccgggatatgaagggttgatttccaaacaggcagccatgaacctggcggcgccgggagaagcccccatatccgcgtgattgtcggcgcagcgcatcccccggacgtcgttcaggcgttcccggttcgggaaagactgggcaggcagcacaggagcagcgggcggctcgctacaaaccaccgtggtatttccctctgcattgttttcttgtttatccgtatacgtctccgtcttcgacttcgtctccgtataagcggtggaattccgtggttcacggtgaatcaccgtggtttcccgtgaactaccgcgaattactgtattgcacggtgaatcaccgtcacccggaggaagcgggaacctgggcttactctgtctgcgctgcccgaaattgatgatctgcacataatccttgcccccaacacagtatacccttacaagcccggctccctccgtctcgtggaggcagtcttgaatgtcctggttactgactttgtcaaggtgcaggggaaataagcgagtcctcaataccatggggcgagcatcaaacaatccgtaatcatccgctaccagtaggagccgatgaaaaaagcactcggtgcgccacgacaaagccgctaccttttccgagtcgagaaacccttctcgtatcatgcgtgatgttgccataatcaaaaaagcgtcagttgggggttgtagatttcatgcgagcctcctttctaagatgtctgcttgctcgtcagtaaggtactgccaagactgcggcgggcgggtcagtccgatgtcatccagcagcacggcatggggaagacgcacggggtcatgaacgccccaggctttacagggtaaatagctctgcaaatattcttccgttacgcaagcttttgagggcagccaaataggaacgcgggaaatcacgggaaaaagatactttaactggcacttgccgataatagctcgttccccgtccttgccggattcgtagagccatagcgttacggagtcgccttttttgaggcgtggcgcatttttacgcagctcccatgtcttttctccagacaggattttcccggaccaaggccgcctgacggataagaggatgttaatcattgctccctcctttcaaacacgatttccacctgtccggcgcggcccaagtcatgaatccggtcaatcccggcgcagtccagcgtccggtcgtctatgcccagagccttgcaggccccatccagatacgccttgcagcgggccagacagttatccgcatccggcttgttgcccttgtaaaaccagatcacccggtaatgcgtcggcagcatcctgcgtccattcaaggcttcacaagtccggccccaggctatattccgggcgcggctcttggcagccgtcttcttataaccggccacaatggcccccctctgcgtgaggggagtcttggcgttaggcgagagttcccgaggcgtgtggggcaaggtaatggtcaatgtggtcatcatgccgcacctccttccacttccttcacggaacccttcgtggttttcgattcgccatacttcgccagcaactgccgcagccattcgcggctggccttcgtggtcgccttcggatccgccgctttacggaccgcgtgcaccagtctgtccagttccgtgatgccgactttgcagcatccggcaaacgcttccgccgtcacctcgtccgggaacacggcattcaacgcggaaaacgccccggaaggatccgttaccgtgaaactggggcgtccgggcgccatctcaaaaccgggaatcaggccggcggccacatcctgttcaaaccggtaatccacagcagccgcccatttctttgccgtcttcgccaggcggtaagccttcaccttctcggcaggggaaaacaactcccacttatccctctccgtagtaatcaaagacgcctgctccaccagggccgctgcctcatggcacacagccttggcccggcaataccggcaagcttcctcgctgcaatagcgcggggcgtccggatacatcgccatgcgggcgatgtctaaagaccgctccgcagcccattcgatgctttcatcgtcataatacgttacggaagcaggccccgccacccgcggttggatgacagccgcgtaaatgccactgtggctgatcccctcttcacgggctttttgagccgccagtggaaccagggcttcaagctggcggttcgcctcggcaggctccaccgccacccggccgaacttccaatccagcaccagaagaaacccgtcgcatcccgcgctcactcggatcagcgcgtcccactgtccggaatactcgcccccttcaatccagtcggacaaaaaacggcgttcctcggtggatataagagaaaaaaaaagcatcgggacaatccttcaaaatcttctctttcactttatccagcagccttagcgcacgttcacaaagctccacctgctcatcattcagctcggcaacctcatactcccggctattcagaaactcatgccaggaaaaccccattccttcttcggctgcatcatccttcaaaagaagatactccatatagcggtgcaacaacgtgccttctgcggccgcctcggaactctcgtcgggacaggacttctccatcgtaaacgagccggggcacaaagccagccgcccaaacgcggaggcggagggtaatcctttacgtacatcttcaacagtatcagtcattgtctcgtctccttcctatccgataaggggtttcagcctgtcagggttagccgccagcttttcctgctgactggcgttcagttcaaaaaatgaatgaaacttgcctttgctggccttttcaacagcggcattcaactcctcttccgtgcaagacagggcttccatcaaccggatatgaggagggggaatctccgcgtcgcttttgccggggatcttcgcggcaactgggagacgcggggagtcagcaaccttctcggcatccacaacgtcacctccggaatccctggacttgaacaggggcggcttaatatccggctggctcttgccggcaatatcttccgcctctccctccacgctcaatcccagcaacgcttccgggcaattcgtccgggcgaaaaacgccgcggcacggtacttgtacatctgttctggcatcgtctgccacttcttcccccatccttcggccttcaccatctccggggtaatccaggttccgtaaacattctgtcccgttttcagctgggcacacattctcacacccttctgaaaatcctcctcattacggtactcgaaccaagtcgccgagaacttcgggcagatattcacaagagcaatagcaaactgtccggaccaggacgggcgattctgaaccacgtaaagattctgcatgatcatcaaagggtccatccgtagccgcagggcagtattcagggcgatgaagcaagatccggggttattctggtaggtaacaggcaccatgctggaggatgcaagcatttcggcggcctgcttcgccatctggaactgttcactattagcaaacgctcccagaacggacagttgctgtccttgctcttgtaaagtcagggattctgttgtagtggtattcacgttattagtattctattggttagctattgataacaggctggggttcggttgccgccgtccccggccaactcattgtttcctcataccgtgagggcgggacggtttggaaaaaccgtcaaaagctttcatgggggagggagactccgggcaaaacccggaatgcggactcttgccggcctgcagctcggcgttatccagctccaccgccagccataacaggcttacagcggaaaaaccaaaggagcaggctcccagaaatttgaaaaaactcttcatgccgcagccccctttcgtcttctgcgcgggggaagaatattcatatccactccattcacttgaggcttctgcgcatgatcctgctggtggatatagcgccatacagacagggcagggaactcataggggcatccggcgcttcctgttccgggcaatgcctgaatgctgccgtcctggacaagggcaagaatacgctctcttccccagcccgtcatgaacctcacgtcatccagagtgacaactaccttgccgcggaaggcggtaatcgcctgcgcctcgtcggaatcaggcaataatcccacgctcgccgcctccggggaggaaggaacaggagaagaagcagcctccttaagaaccctggctatggtttccagggcatccgccagactcttcaacgttttttcattcgtgctcatgttcggttaattaaaatggccgcccggacgggatttaacgctgccccgcgcctgccagaccgtattactcttttccgtttcgatttgtgttttggtttcaggccccacctgggccgggcgattagttaaagctcgtgccagccgagcagcttcaattcttcgataagggcttcttccatggttcagtcgatatggccgtcagggttgtcgcactgcgcggcgtgatccacttcccactggtcaatcgccagcgtcaaatcgtccatgaggccctccgcttcccggatggcgacgtattctccattcacccggatgcaccgatcctcgttgtcgtattcgataatcatcattgttaggtttgaaataattagggttatcgggtaaaatcccgtctatggaaatcgccacgcttggcccactcgcggagctccttaaaacgctcgccatcaaacacacggactgcgtacttgcttgtgccagcgggatttacctcatcaccccagagaaacttctgataccacttggcatctccgagtggacaaaccagcacaaccacgtcgcatatatcatcttcctgcttagtgtttccattatcctggtgcgcatcatggggaagctcggcggcaatcttctccagctttcttccaaccgtgccgcagagaaaaggaacgaacgtatcttccaaagtctccccaaagacgagaagaaaaggcttctctcctttgttcaatcccagagcgccgagcttgaactcgaccctgcggacaaaagcgtccgctgtctcgtaaacaaaggattcctggtcgatgttggtaccatccgcattcaccccaatacatggcgtatctttagactctccccgtttgctattaagaaactctatccggacgactaaatcttctgttttcatgccgccggcttcttggggttcttcttctgaagaaggttgctaaaatcctctttctcttcttccctgcttttcagcgcgtaactcataagaattcctgtaacaatgatggatttttccaaacccgttgttttttctgttttgttaagccagtctctcaaattctgggaggcttttttgaggttcgttttcattcgtgttctcctttcgcgttcgcttcttgcgtgcggttgatggtcacataataccaattttgcgtattccgtcaacccataaaatacctggagatgttattttttgttcccaagttatcttgacacgtacggaatatgcgtatacattccgcctatgctcaatgaagaagaaataaaaaaatggctcaaagatacggggaaaaatcgtcaatggcttgctgaaaaaacgctctccaaaaaacgaacagttgacggctggctatctgatggaaacccaatcccccccgcaaaacttgctgttattgaacgcctcatgaacggtgaagatgaaatccagtttgagcttccggaaaactttgaggctatcatccgtgaaaaagccaaggctgccaaaaagagcattgatgatctagtgatcgaaattcttgaaatgactgtccagaagcagaaaaaaaagcaacagacaaacggtacgtctcaagaggtagttgaaaagctacacccagccttggataacaacgatgacgaaccggaagaagtcaacaacgtcattctttgccctgtcaagctgccggaaatcatggttgttggaaacgtcgctgcaggggaaatcacgtggagcgaatttgacgagccatacccagtatttgacaagggtattacggccttacgtgtagagggaacatcaatggaaccggaaattaagaatggtcagattgttctggtgcggcctgttccggaaaatgatgatcttgaaaaatacgttggggaaatcatcgtctaccaaggaacaaatgacgtgtccggcatcacccttaaaaggcttattgaggacgccgggcgcttcctgcttgctcctatcaacccggctttccggaaacgcattcctatcacaggccaaatcaaagcttgcatggttggtaagattgatctgaccaagtaaccctagatagatcggagaaagcttaatacttcacgaagaaaaaatatgaaaagaaaaaagtttggagatctatttaccaaatgtagatttctagaatggattatcaaaaataataaatctaaaaattactccttagcttccgaattcttattttccgaagaaaaacgatatgcagacatagttaaaataacaaaatttagtacaactgcatatgaaataaaaagtgaaaaagataatacctatagactatatgaacaattaaattgttattcaaaaacatttgattatacgtatgtagtatgtcatattaaacatttagaagcagtatataaaattgcgaatcttggtatcggaataatcgcggaaacatcgcctcgcagatttaaaattattagaaaagcaactaaaaacctatccctttcccccttatcgcttttaacactctttagcagagttgaattacaagaattttgtaataaaaaattagataaaacaataccacttgaaatgcttcgcaaacaattatctcccgaaataaatttagcaaatttgaaaaaatactttcgaaatactctttttaatcgctataaaatacttacagaacgattcttaagagaaatagaaaaagataatatacatcctgatgatcttttaactctatctaggtctgccaatataggacaatctatttggtagggcaaaatagaataatccatcaactactacacattcagtcttcaaaaaaatttagaataatttatttgtgcgacaatagtagatatatgaatattagctcgaacggcaacccaaaatcttggaatggcttgctccacttttccccatgcagcgtcattaattttatcttttccccaacactccggtatacctgagaaccatttttttgaaataattctataggcaacatcttgataagttgctttataatccctattttttctgcggcgacgaataaaatgcataatatcgccacaagaaacatcaatccttggaatccatcctcgcgcatacgtttcagccgtattctttacagggtgaatcaaagcgtaatctccatagaggggcattacccccccaaaataattactattgatacattgatacattggaactgtctctgagttaagagtaccttcatactcaactgccttttgatcctctacaaagtctgacagggcaagaggaaaagaagttcccgttacgataacatgttgtatacaaagatcactaatagcattcaaaattttaacaactttatctgccgcttgaacatgcttattagggaataaatatccgacatccagaataagaatcaatttagtaggagcctttccgtctgcaagaagcactccttcaagagtttcacgtatatatccagcaaaatcattagcatcatcattcgaagaaaaaatttcttctcgataaccgatataatcaaaatctcccaacaaagcttctatttgtaacctcttattctccccatcagaagtatctgctgcatcattaatttgaataagcgggataatataaggaaaatcctttttttctctcttacaaattgcacccaattgcaatatccatctgagggcaacattaaattcattatttgggcattttgacgcaccgcctcgcttgataaatctaggaaaaaaggagatgaaacaccaaatacatttttccatttctcaatatttttatcaatatcaccatcaatcttatcaggatttctttccaaataagctctactattggatctggcctttgttaaaataacaaaaggtagaattctttccttaacgtcttccgacagttcttgaacggccttaaactcagcctcctgagtcttcaaaaaaggaacatagtaatatttattccaattcataatccatgtcctttataaccaagttcctttgctctaacacgcaccgcgtacgtggaaacagcgaaacgtcgggctagttcgtctatatttgttatcccctgatctacagcttttttaaattcatctcttggcattaataattcaccagcaaatcggtttgcttctttttccatccaatcggaagactcgttctaaaaaaaacatcatcttcaaaattatcacgatttccacgatgaagacaaaaatgtgccaattcatgtgcaatcgtaaatcttgagcggacataagattgaccttcattatataaaacagtccacactccagcaggatcttttttcaaaacacctgaaactgtttcgtccaatttagctcccataattttaatctgaagaagagaagctaatttcgccagatctataggaaggcatgtaatacttttttctctagccaattgatagagatcttcaactgaattaattgaagaaccatcactattattgcttttaggttttctaagtactgccatagatttaattatctaaactttgattattttcctctttctcagacatccattctcgtttggaaattctctctattttattatctagaacacgcgttatactattttgattttgtatcaaatcttcttttatcttttgcacatcttcttcaatgttttgaatattagcgtacaacatcgaaaaataattacctttcctgaggatattttccacaatgtcttttgtagcacgttcattcaatcttttttctaagagcgagggaatctctttatcccatatagccataacctgatttttatacgaaccattagccgtataatccgataacattttttctgcttccaaactcgtttttttactataatacatagtagctgctatttgtatcaatgtcaccatagctaataatacaataattattgtggagtagaacgtagacatctgtgcataaaaagtatctaactttaattgtccctcctcttctaaatacacttgtgccgaagatatagaacaaatatgcccagtaaatagagttggcaaaaaatgacacaaacacagccaaatagccaagaggacgatagcagcaattaatggcaagactaaataccaataccaccatctcggtatatgctggatattattattaacattcatatttcaatatgactctagctgcctatatcacagttacaacaaatgtgcaatcgtatttcttgtattctcgataccacttatgcgaatacgagatctaatcagacggttatgagatgccggatttgcccacgcaaggactaacggtggtcatcgtatctacgaataccgtgatgcaaccgaccatcatcttattgcggaagccaccattgctggccacgatccagaaaaagcacctccttacctgatcagggaagtacgggatgctgttgaagttgcaggtggaacctgggaagattaacagcccctgactccactcaggagctgcctctatcggggcagctcctttttgttgggcacagcccctcaataacaatttcagtatacatttttatatgatgatactgaaacaatgatttaggaattgcttgttctgagaaaagaggctattatttggcctctttacgttagaatgcttcgccccttggtctccggaccagggggcttttattttcttttgatatacgtcttattcccgttcttgttaatgtaataccttcctccacgcggtcccgtgtaaataatgcgtcctttggaatctgtactcgtgcttggagaaaacacatgatgataaatagaattatgcctgggactcgaatatgatcttcgaggggaagaagatgtctttactggcccaagaaaaggatcataagtcagttcagacttcctgactttcaccttgggcatcttccagcacaggccgcaataatctgccgttccaagattattaaatgctcccatccccacaccataataccgacatccgggaaggtgcgtttttcccgttgagctgatccaataagtaactatctttttattatcctgggaaggctccttacccctctctccttttctccattcccaagggggaatcgcattctcctctgcccataatcctttctgctccttcttcgctgaagcttccaacctctcaagctcccggctatcgaaatattttttgtcgtaccatgcccacccctctttgaccatttcataattcacgaacgtgcccccatacaataccagccccaaaataattccgttcttgtcacgccccgaatattgaaccgtgaccatttcaccccatatcaacttctccaaaaaatatttagccccactgtagccatactgccctttttcaggagcatcaactcccttcaaacgaactctgtaagcttgtttttgttctggcgtcttctccaaaacagtaattgtatcgccattaatcacattgatgacaaagcccctaaagctttcaccataagaaatgcaaatgctggccaaaaagaaaaacagcaacctcacggaaaaggcgataccacggccccctctaacaaacaacgataaactacaggtaaaaaatgtaaataaatgttggaaataatcctttcacaatgcttttgaaagagttaagcaaattgtttacaactctctttatttcatggtattatgaatttgtatgaaactattctctctcattttagctgttatttccctcacttcattctcggaagcgcaccctggcggcttggacgccaacggcggtcactacaaccgcaaaacaggggaataccactaccaccggaaaccggcagccaaaccggcagcggaagaaaaagcgtactggatcagctcaacgggcaaaacccataacaaaaactgccggtactaccgggcttgcaaagggcgagccagcgatacacccagcggcgtgaattgtaaaatttgtggaggatcaaacaaatagttagaaaaagtatgaaaaaggtggtgctatttatttgcttattgagcattgtttcttgtgtatctcctcaacaaagacaagctgaattaaatattcagttggaagaagcggttagatcttccgatgtcgggaaagcaaaagatttgattgaaaaaggagcagctataaatagtgttcgccaacatagatacgattttaacccattattagaagcagcaaataatggtgatgttgctatggtgaaattgttattagatgagggggctaatattgagacaagatacaacacaggagagacagcattatatttttcaatatcatcaaataaaaaaaatgaacaacattttatagaaacaacaaagttactaatatcaagaggggctgatgtaaatgccttatgtggagattctactcctcttatagctgcttctggaggcaatcatttggaagttgctaagattcttttggaaaatggagcgaatatacatcaaggaacaaagagtgtataccctccaatatggcaagcagtgttatctaataactcagaaatgcttcaattgctgattaactatggagcagatgttaatactaagaatattaaaggatggacacctttattttatttaagagtgcatggacataggcaatctgatattgtgaatttactgattaaaaacggagcccatttatagccagcgctatgcccagaggcaataactgtaaaatctgtggaggagtaaataaatggaatttactattttaagagaagatgtaagctttatattaagtataatagcaactatagttagtgtatttgtagcatatcgtcaatattcccgtgataaattaaaagttgaagcaaattttagatttgctataggatgttgggggccatacacaaagcattatataagtatagaaattattaataaaggaagagatgctgtttacattcaaaatgtatattttccattgcataataaacaaaattacttttctgcgaaagccagaatttctaatggagggacgtttcctattaaattagaaccattttctaacgtttctgtatattatccacaagaggattacgagagaatgaaaaaaatgggagcaaaatttgcagaaataaaattgggaacagggaaaagtataaaaacaaattctttcccaactgattaattactaatattatagcaataaatagaatgcatgatatcttttcccaatactctttccatatgaattatttgggaaatatcactcccacgattattttcaacaggcaagtttttgtatctacttcccaacccacttatcccagtccgcaccgttctcctgaacgctgcggactgttttaagggcaaactccgtcacattcagcagaagcgccatcgtcagggcggctcctacagcagcggcgccccccttggttgtccgtggagaaaaagccaccgtccccgctgctgcggtgcgtaaaagctcgtggaaagaaagggcgtcatcctcccagggccgttctttgccgtcaaacaacttccaggcgttggaaaacgccttcccgatatccgccgcattagaaaacggcaccagcaaattattccccggcataaaagcatgatacccgcacagcttcgcaagctgcctcacgccctcaccagccagcccgcttactacaggaatccccatcacgggccccatcaccacatcaaacagggcgtgccaccactcccgcttccggcggcgcttctcgtcatcggtcatgaaattaagcaggccattcagaagggccagcaccaccccgtgagaaacccacatcaacccggccttcccccattgcccgctgcgggccagggaaaacacattgcccatcgtattgattgactcgccgcccaggaacaacatgcccgcctgcatccaggtccggtgctgcgcggccagggacttctgcagctgcgtcatcggctgacccttgcgggacagggagcgccgcacctccgccatggcggccgcgtcaagctcggcctccgcagcgtccggcgtctcacgcttcatcttccggtaaaccgcatcgtacaaaatagccgcggaaatcgcattccccttcatatccacccgctccagcaaatccatcccctcccggttccagcgttccaggcgggacgcccggcgcccggcctcgtcggcccccatggcagccagcgtagcgctgaaccgcgtcttgtcgcggctgtccagctccggcagagcctctatctcgcgcacaggcttcaccagcttcccggcgtgataccggcggacggcccccagccactcgacaaggccaatctcgtcggaagcatacatcgcgttaatcaccgtcgtcacctgcttggtcagcgtccccacgcgcccggccagcagcacccgcgccgccgcgccggaaagccggttcatcaggcggttcatatccaggtgcccccggatactctctgccccggcgcggtcaaacgcatctgcccaggccatcagcttgcccacggcatcccgccccaacagcacctccaggctccggcccgcctcgccatcctcacccttaaaattcagcagggcccgcaaatcacggctgatctcggaaccgtacaggtaaagatcctgctcggtcatggccgccataaacgctgtgcaaacatccatctccaaatccaggtgagcctgatgcttccggcgggcgtgaatcaacccaaacttcccgcctgtggccgcttccccgtaagacgccgcatcagcaatcgacttatcaatcgcctccatcgtcacatcgaaaaacgcccggaaatatttctccgtcagcggaaacggcgtgccgtagcgcctttcggtcatctcctgcacctgtccgctccgttcattcaatttctctctcaaggcgtaagcaaaccgcatcacctcatccccggcaaacccgcgcagccgatccatcacctccgcgtcaaacccgcgttccgccagggcctcggtataatccgcctgctcggacaacagcaccaaatacgccgcctccatccgggacaggccatccagccggaaactcttcggctgatacccctccttggcgtacttcgtcctggagcgcagcatctccgcccgctccctcgcaaaaaccttctgatctccgtaccgctcccactccttctgcgtaaacacgcgctccatgtgctccaatgccttcttcgcctgcttggcggaaatctccttgcggcggtgcccgaacagggcgtccacctccttcttcaaaccctcggaaagcttgaactccctcaaataaagctgcaccgcttccagcccgtgggacttcaccttccggcgcagcaaatgaagaaggcgttcccggtacagggcgtttgccttcctgttccaatccggttcccgctccacaacggaaatccccgtatcctgcttcatgcgcccctcataaatccactcggcaatatcataccggtccgcggaccccgcaatctccgctacggtatgatgcacaaaacgcagcatctccttctcgctcgcctgccgctgcacattaaaccgcgccgcccgttcctcaaactggcgggcaaccccggcaaacggctccacggaagaaagcgcctgcatatactgattaaaattcatcaggtaatcaaacagggaaaggggattcttcggcaaagcccgcagcctcgccttccggcggaacatcgccatcctgctatcatccaactccccggtggcctgcagcagtggggcggccatggctgcaacctccagcttcttcttctccgctgcgttctcccaggcatggcgggacgtggcaatcaattctccaagggccgcgccgcacttctccgcggtattcacgtccatccgttcataacaggcgtaaacctcaaactcccgctgcgttacggccacctcttccagcctcccttcctcgtcgggcagcgtcaccatcaccagcgcatccggtgccagatcctcccatctcttcccctcctcggcatcctccggaaaattcttctggaaaaactcatcgtactggctctcggtcatctccagcaggcgcaggcacctctccagcctccggtaactctccgcgtccatcttcccgcgcatcggcttcccctgcggattcgtccgcggagccacggaagccgccacgcggcggatgcgccccagcgtccggtccttccggaagcggtcaatctgctccaccacgcgctccataaacttccccacaagccggaacaccttctgctccccgtactcctccagaaactcggccccgtgctcctcaaacaaccggcgccacacctcctgttccacccccttgcgggccgccagggcggccctgttatccgcgtccggagcagaatccagctcgtaatcggcctgccgttcggcaatctccctccgggcctcctccaccacatcctccagctccggcctcttctccgcccaattgacaaaactcttgccaatgctcccctccataatctccggccacctcttcatcggaatcgcttccaacgcgctggccaccgcatcgcccggcgccatcttcccgctattcccgtaaagcagggaaaacacattcagccaaatcttgtaaggttccagcccgaacccgtaagaatcaggcaaataccgctccaccgtggaaatcagctcctgcgcctccgccagcagctcaaggccgcgctcccgatccccggtctcaaacaggcgcagcttactaacggaccgctgcgtggcggcccgcatcctgaacaccatctcatcgtaaagccaatccccgttcggagccagaaccctgccggccatccgtccaaacctcccggccccgaacgtaatgccgccaagctccgtaatatcccccgtcagcggaatcgaaaactgcggagcgtccagcagccggaacccgttcagcccgctcatcaagaccccctcgctattcttctcaaacgtcccggcaagccgcgcctcctgctccccgtgggaaaaaacatacacaaacgccggctgcaacgtcccagcctccagctcccgcttcatccgcgccaggcggggcagggccgccttcgcccagtcgtcgccccggcccgccagctggctcatgctcccgcccagataagcaagcgcctgctcccggctcatgctcccggccccctgggcaaacccctcatacccctgaatcacatgctgcacctcgtgtaaaatcgtatccagcaccatgccgggagccgcgttcttcccgccccgtgccacattcacggcaatataatgctcctgcggatcggtaaaccctcccgtgccgctcccgctgtcccggtaaaaatccacccgcagcctccgcagctccgggtaggcccggaacaactccggaaaatccagggccgcggccagggaaacattcacatgccccccctcgctcacgctgacgtgctccttcctcaaccgcaccccgcgggaatcaataatcgccttccgcttcccgtccgccggatccgtgtaggaaaggccgttattgtggtactcctggaaggattcagccttctccccaataatggaaaacgtaatatccggactatctgaatcaaacgtcccgcggttatcgacagcgctcttcacctgccgggaatccgtagccatcccccacacctccggactcccgtcataagcattcctgcccttcaaaacaacaccgtcataacccgcgccatgagcattcccctcatcaaaccctctcctcaactcgtgaggaaacaaataccacaccatcggggaacccttcacattctccggcacaccctccccggaaaacgggcgctgtgaagcatcgccaagatccagcataaacggacgcctcaacctcataaaacacgcatacagccgcgcactctccaacccggtccccggaaaacgtccctctaaatcatgaagcacatcttccgccgtctccggcagggaagaaaaaaacaacaaccctccatcctcccggctccggttaaaattctctccggaacgctccacgtcaaacacggtaaaaacatgcggggaaccatgatacaccaccagcggctcaccattctcgtccactaccttggaagcgttctccgggtcatgctcccaatcgccaaaccaactcttaaacgcctccgtgcgcacggaaagccactggtcttccgtcaggttcgtatccttcccattcggagccttcatgaacgtcccgtcagactccgccttcttcctgacagccgccttttccttctcgacaaaagaacggtaagaagataaattacgggtagaaaccccgtccttgaagggtgtaggtaggcggccttcccggctagcagctcccctagtggcggggttttctatggtcaattccagcgtgtaaagaacgttaccttcctgttccttaacgtatttgattgctgtaacattaacatcaaacgctcctatcccttcaatatctactgtattgaaaaaatgataggctccggcttttgaggcatcttgtttatacgcctcttcaaaaaatccatcctccgcattctcaaacaactcatgaatgcgggtggccgccgtataatgaaccctccgggcctcctccgcggaaaacccaagcgtcttcaaattcgccacggacatttgtgaagccccggccttgcccaccgtcttgccggaaacgcgcgcctcaatcacggcctggatccccgtattcttattgacgaacaccttgccctgcaacggtttcaacctcgcccgcatcccggcggcggaactcaccacatccctagaagaaatggacaccagggaaaaattcgctgcgggagcctcatcttccgcaggggcggcccccctcgtcagcgccgcatccagcatccggctcacatcctgggaaagctgcaacatccccgtatcggcggaaccctcctcctgttccggcgcctccaaaggaagcacgccattctcccggtccacctcctcccgcgtcttcacccccagctccaccatcacggcatcattggcctccttaatcaactcctcatgcaggccgaaattctgccatcgggccctctgcgccttcaaatccttcaccaccgcctccagcgcgttggcatccctcacatccacgccatacttcctggccgtctccgggcgtctgctcgccccgctaatggaagaaatctccctcgtcagctcgctcacgcgggcggcggcgtactgggccagccttgaaaaatactcctccgcgtgggaattgccgaacaaatccgtctcaaacgtcatcccggccgcctccgccagcccgcggatgcggtccatattcgcggccacctgcatcacggccaaagcggcctgccagctcttcccctccatcagggctcgcagcccggcccgctgcacctcgttctgattgcggaacgccatcgccacgcgccaggcatcatccggagaaacaagctcattccccagcgcgtccagcaaatcggaacagccgtacaggcccagttccaccccgcggcgggactgccccttgcggaaaatccccctctccaccgcctcctccttcgtcaaacgcttccggctcacataacgggcaatctcaaacagggaagcctgcccgtcccggatattattctccacatcatgcgtctgcgcccaatccaaatcaaacccggccgcctcatcatacaccgtgcaattaatatcctcatccgtgcaggcgttaaaacggtgccggccgctgatcacctgcagggcgccatccttccgcctccacacggaaatcggcgcggcattgcgctgccacgcccccacaatcggattcaccaccccggtctgttcatccgccccctgcttaaactggggcacatccgggcaaagcgtcagccgggacttctcaataaacccctggcgcaccccctcctgaacctcaataaacgccccgttaaacacccctgacccatccggctcgcccagcgcctccacgcgggcctgctcccgctcgcgccgcgcctcctgtgcctccgggggaattctccggcgcccgcgcctcatcctcggcctcctgccggcgctcctcatcctgcgccttgctctccgccagctcatcctccagcgtccgggcctccgtcgccacgcccgcgccaaacattgcgtccagccccgcctgcgctctggcccgctccatggacaactccatcaaatccccctgctggtcccggtacagggcattccccgcatccagcatcaccgccagggcctgacgcaccggcagggaaaacacgccctgttcctccgcctggcgcaccatctcgcccaactccacgcgcgccttaaaataccccaggaacctcaccaggtgattcagcaaattccgcagccaggagggcagggacgtactccgcaccgcgtccgccagccagcgggaacgcccgattttggaaaacgcctcaatcgcgtcatgacccgtcaccggcttcccggcgtccaggtgaataaactgcatctcctccccccgcgcctccggaaacaactcaatcatcaccctctgcgcctcctggagcatcgcgccgaactcgtcccaggacaaaccctgctccgcctgccaggaaataaccgcctgttccatcgtctcctccatcaaatcctccaccgtcgcgctcccgcgggcatacctcaacacccggcggaacgtatctccccggcgcaccttcgtcacataagcgttggaaaacggggcatccatggcaggagccttaaactccggattccgggcctgttccgtcctgatgcgttcctgggcttcctcccatgtcttcacaagggtccccagcggaatatgttcgctcaacgcagcatccatgcgggcggcggcctcctcataactcaccccctccgcctccagggcgcggatagcggccattgccatatccgcgcgggccttcatctgccccagcgtctccggggcaatcaccacccgttcggctccggtcttctcatccttcaccgtacgcgtaatcacctccgccgcgtcaaaacgcccctgggccagggcctggcccacggtcacatccccggccagcaaatgctggccctgacaatggcatattccatatcggcatccacaaacgcctgcaaataagccgtcatctgctcgccgtccatcagcgtgtaggaaggggcgccctcttcctgcccctctccggaaacggaagcatcctcccgcggcgcttccgtgccgcgcgccggagcatacacccggaacatcccctcctgttccgccggctccaccctgggcaccatgccggcatcctcggcggcccgccacgcgtccagctcccgcaaagactcaatgcgttccccggaaaggcgttctccggcagccgcgctcgcccgctccatggaagcctgcggatcctccatccaggaatcatgcaaatgggaaagagccttattcaaaaaaccttcggcggtcttttcctccctggcttccagatacccctggaccgtgcctcccagttccttgtaatgttgcaaagaaaggccaaactcttgggccgcctttttgatttgaggataattaaagccggacatcccaaacgtaaatgccagcagggcaagaccctgttctccgtgcatcatctgccccatatcgtccaaatactgacggaaagtctgttttccgcgttcgtccgtcaggttcatgctctgtacagtacgcatcaaatatccggctgtaggctcaagaatggcctcttccgcagcgccggaaagcccttgaatagcgtactgggacttcggactcgccatccattgagcccgccacggggccagcttcccggcggccttcccaccgccaagcgccttcttcaaccacttatatccgggcgtcaaccgcccgatgggggaaaaagcaatcatctcttccagagcatctgcctggccgaacatcatggccctcttctccgtttcctccatcgttaacccaatgcttaccccctcatccctgcgggattgcatggcggaggaagctccgatagcaggaccaatggcaggaatgaaccagggagccgtatctccgataatggaaccaagctgcgaaccaatgcggccaaccaaatgacggtcctccccttccagatattccttttccccggcttccatagtttcaaccagatcggcagcccagcggcgtcgtatctcaagaaaagtggcatccttctcaatctgagcgcgtgcttcatccacatccattccggaagcaatcaactccggcagacgcttagctgcattcgtaacggcatccacctctcccattacctgtaaattccgccaggccttctgacctgtccgccatcccttcacgcccccggtgcgtaccatccccgttaccccctgggctgccttatctatccagtcaatcccggtccactcgtcaccgtgcttatccttggcgtgcttcctggcgtcattataaaacatattcagcacaatgcgccgtgccagctcatcatctcccacctgttccgccagattattgatgatcctgtcgtcgtacagggtgccctgcgcatcatattcccggacaagttgcatccctctgcgggctcgtctgacactctcccaggaaatgcccgcctcctgcatcatcattacctgttcaggggagggaacaacagtgtctccgcgcacgtaccggtcaatgaagggatcaatcgtagcagccaatgcctcccgtgcctgttgctgtcgctcctgctctgcctgataagcacgggcttttttctggaaatccttccagacggcagcctgtgcgtccgccacggtggcaaattcaggcatctcttttccctgtgccagccaatacatggagggattatctccatggttggaaccaaacaaaccgcgcaaggtctcaaaaccggcatatgccgggtcatccatataggggctctgcgccgcttccgttggctctgacaatgcctctttctggagttctttcaataaatccatatcttgggacagccccaacctctcaaaaacatcctgtgcaaacatatattcttgtgctaaaactattgataaagaggaagaagggcggagtcgccaatatcgttcacctgcgtgtaagtatcgtctccacccggcaaaggaggcagcaaccctgatccgtatccatcttccggcgcttccggttcatccttcccgtcgtaaatgctgacattcccgctggcctgttcaccgggaaaccttaacgccatgcgttcataaagcggtcctgaaacctcaactccccgcggggttccttcatagaccccgacgacgggaacccttaggaaagctccattgcgtcccagagaaatgcgggcaaaaggtctattcccaaacttagccttgatagcctcataagcctgcttggaaacatacgctccggatgtagcatgccggacaaaagaaacagggtggttctcaagagggggaggcaaataaggtctttggcccttaatatattgtgccgccttcttttgctgggcctccctctcttctggagacacgttcaactcttcctgttgctcaaaagaatacaaaggcatggactccagcgccttcttcatgcggctctcgtcagatcttttcttatcttcttcaataataggacgataggcaaacctgttcccggcatgaaaagcggtaaattgatggatctgcgcaagatcttgggcaagtgtggcattgggatgagcctgtctccactccgtcatggaaagttccgtcttatacaaaatatctgcctccacctcatcccgcgtactctctgccttcttaatctgctcctggtcgccactcttgtaagcattagctacctggtaagaaaaataaggaatatacacatgatctggcatggccttcaaaacggcctctatattattccggttcgtattgggtctccccatggtgtcaatccggtcttctacaaacaggcgcagcttcctttcatctccaagaacctgtccatactgcccccacttcttcaacatgtcattgacgtacctcgttctctcttcgccggaattggcgggaggcagattccgtaaatcctcccggaaggcaaacttaatggaaggggcgtatttcccgtaactgccggtccggttataatgctccacccagtcgtattcctgctccgtggctccgtaacggagggaagctttcggccaaagagaaccctttctgtaaccgggcgctccatcttcaccttcggagcggttcgcggaacgtaaaaaccttctggtcttctccttccgctttaaaacctctcctgcgcccagagcatcaaaatagccgtccccaagcttcgtaaaagcaacactggggttaatcagcatatcctgctcgtattcgtccaaaaggccgttccgtatatcttccagaataccgtcgttcattccattctcagaaataatgccggcctcgtaagcctgaatgcgcctacgggtggctccctggtaatccctccgcagcaaatcccccttcaacccttcctcaaaagcctgcctggactcctgaatctgccccttaagcatcaactcggaagcccgcccctggagtcggcgcatcacatcctgctgtctggctccgaacctggaagcctcctcctgggaaacaaaactccccttcaacccgcggaacttcccttcgtaattccgcacaaacgtattcagggcgctctctttcagcctcccgtcacgatcgtaaaaagacagctcatgaccgcgggcaaaccccaatctccgtgttatctcctgctcaaactcgctggccaaatcattcatctggccttccagccgcgtctgctcgccgaaatccttcatgcgctggtactggtgggcaacatcagacacaaactcctgggcattctgcagcgccctctgaacgggcttggaagaaacatccggcatctggactggggaaggggtggaggaagccgcattcatccgggttcctccgtacatgggttgctgtaaatcactcatcttcgttcatcttgaaacggttaaaacttaaaaaccttgggatggaaatctccttccagtcctcgcgtccgcggatgcagcgctgccaccttgcccggtcaaaacgcccctgcaccagacaagccagctccctgacggcctccatgcggccgtgggcaaaaagaataatcaacgtcctgggggactccggatctggcacccccgcaaaaaacaacgaagggcagcaccacacgaccccgcctcccgcatccgccagggaaacggtctcccggaaccagccggggcgctgggcttccatcagtaaaaaagcctgctgcatgggagaaacgctcatctctttccaaaacccatgaaattagccagcagggaatccctcaacctgttggaagactgcatgctccccggcaccatcccccccagggaaccggaaagggaataagcattcatcatcccggaaaaagccccctgggatccccctaccttggctccccactcctcccctctctcggtaacaccccccagcaatcctccaccggacattcctgccgcccccatgactccccccgccaccgtcagggccgtctggatcatggcagaaccaagggcattctgtgaaagcatcttatactggtccgcctcgctgtgtgccgccatcatggccagatcaccctggtatcgggcggactccgcggcaaaccgcttattggcatcggaaaccgcgttggaaagggccgcatccccaatggcgctctcccacacatccgctaccgccacctccgcctggcttccggaaccctcggaagtaaaaccggatccgcctcgctgtgcccgtgcagaacccatggcggaattctgattctggcgcatccgcttcatattgcgggcggccaggtgggaatcggaaaccgcctctgcctccagggcgcgggccttcttctcataagccgcctgcgtggcgcgcccgttgctcaaagccgcctgcccctgatacttatactgctgggaaaccccgaaatcggaactcataacatcagaaaatggaactgtttaaaatctctgttaacggatcctggtcattggaagcatgctggcaggtgtcccaataaagggccttgcttaaaaacgcctcaccctgtgcctccaaagcggccgcaagctggggagaagaagccagcttcaaagcgcacctgccagccagaagaaacacaacgcccttgatgaaaaacggactatgatccggcagcacttcggagcgggccacctcgtcggaaagataatccaccaccagcttatcggtcccggcggcgcgtttcccgtaacgctcaaccaccaaatcacgcccctcaatgcggaacaaatccgcccccacatacaacacgcgcaggcaatcatccggaatcggatgcctcatgacagagcgctccatctcaacccgtttggttgcccagatccatgccccgaacaacagcgcttcctgcaacacggtaggccaccacaaatcaacggcgcgaccggctggggaacccttcacatactcccggtcccccaactgggccaaagcctggttaaaaacggtcaccttatccatttgaggcatcatgccacatccccaggcctgatgaatacaaccgtaacttgaacaaatgaaaaaaagaaagggcgccccgcacagcaggacacccctccgaaccaatagtcaacgcaaaaaaactaaccggaaatccccaccagcttattataataatcggtagcctcccgccactgtggatgtgaaggatcggcgattgccttataataacggtgattggggtcggacaaaatagcttgagcctcgtcggcagggtccgtcttcgccggaatctgaccgccgcccttcaagcctccctcgcctatcatccgggaaatggcgtgtagaacgcggaacccgtccggactcgcaaacacagccatcttctccataggaacgccggactccacggaaagcttccgggcaaaagccttggaggcagaaacattcgtctcatactccgctccccattcgtctttcaacgcttcgtcagcctccttaaaagccgcctcatcgtccgcgcggatgctggcagccacctcggaaagaaacttcccggcggcatcggccggcagccctgccgccctggcatgtcccttcaacatatcccgcagggcatcattctccacaaacccctccccaaaatcaatctcatactcggtctcctcctgcggaggaagcgggggaggactgccgggagccggatcgggctcttccgtaccccctgaaaaatcgtagggattggacgggacaggaggatccgcgggaggcggatctcccgcgggattcgcaggaggggcgtcattcgtgggagacggagcgccattgcctccagaaccaccttccggaatggcctcttcgtataagaacctgttatggaatagtttactatagatcatgtaaatcagggttatattgttcaatctcgtatcttacccacaggagaacctcccgctgggcgtctcggcgcattgcgtcaaggggatcgtaggaaccagccttcccttgaaagcagggcaaattcgtctggaactccttctctaaaatatccagcacctccggagtaaaagcctccttcagcgcggctcgtctccggttgagcctcttgagaaactcaacctgttccggtgtcggcttatcttcaaacatattcatcatcattccgtattaaactgtgcggacgccgcggcactatccctgccggccctggccaattgttccgcaagggcggcctgacgcatctgatcctcctgcgccctctcctcctcaaccatcttgctattctcggacgcggacacaatgcacttggacggggcgccggaactgtcccacataaaccgcaacacctcccatgccttcatgcgcttggcaatgcgggtatcacccgaaacctggatatacttcgccaacccattcagcaccccctcaaggccgtacctctgcaaacggtcaaatgcctgggcaatcttgcccagatagcgggtgcggggagtccgcaactcaaacttctccccatcggcggaacggacaaaaaactcatcaggcgcgtcgcccggaagcacggccccctgcatattgcggaacatcaggcagacaatgcgattcatcatcgtctggaaatcctgcgaaaactgaatgaaagaagaaaaaaagcaaataatgcgttccgactcgcgggcattcacctccgtagccgtcatctcgcggtccacgcttgaaaccacctggagaatatcattgaaaaacgcctccctgatcaacttctccttcttatcttgccgctccagcataaacctcacatcccccacgttcgcccattccctcggaaactgtgaaccaataagctcatccggaacaaccgtcttgcctccggcccgcaaatcaacctcctttgccatcttagccgacacaataacgctgggaattgccgcccggctgccggccacatccatcacccgatccatcagcagggtagccttaatctccggcagcacagccttgcccggagcctcgccgtaagaagaaacgccacccttcaaaaagcgcgtcaccaaaaaaggaaactcgtaaaagccgccatggaaaacaatcttctccgcctccctggcaatatacacgtccaaccacttgcggcggccaggacttaccatgtcggaaccgaactgcgcccggctgttgggcagtacaaggtgaacaaactcgaacatctcggtgtaccgcctctccgcatccttatacgcctcctgaatcttgacaggcagattgcgcagcttaaacatctccacggcctgctgggcagtaaacttcaacgtccgcaccagcgtattcacctccccgtgggctccctcggcaatcgcataagtcccggtagggacgtgtttaaacaccagggacccgtcacgggaaacatctgcaaacatgcagcctgtccctgtcaggcaacggtccaggtaaacctcgtgggccgccgcatagaaattggaatccgccagcgcgcggtagacggcctccgtcgctttgctgtaccaatcgtcctcatcggtgtaatcatccctttcctcctgcggccgcagggaaaaccacttttgatccatgggagtaataaaaagaagatgagcggacgccaaattcaaaagggacttatgcgccaccggagaaaaaatggacgcagccgtcatctcattagcctgttcctgctggcgggccttcccctccatccgcggcataatgcgccggcgcaattcatcccaatccccggaattcttattcatctccgtgaacagggcgtctgccgtcctcaataaatctttaacattttccatggatctcctgtgtaaaaatcaacccagcgtcttcctcaggccagccagggaagaaagaggattactccggttcgtcgtattactaagcttcaagcggcggcgggcagacgaattcaccgcattctccgcttgggaaacatccttggtttccgtagtaataaccttctgctccggggcattcgccatggcatcggccatagcgttggcggcgcttgcctgcttcttggccgccttattggctccatatcccccgaacgtggcgatatttgccagggcccctccgacagcttttaatggatttgaactcataacaactaatggtaaacaactaaacaagctcctgcgccacgctgaacgcatcgtcgcagcggttcagccatcctttgccgaacacgggaaactgcctgcacgagcggtaaaacgcctgacgcttctcctgcagagcgataaggaacaccgcttcacccgtagcggccagctggtcctgcaactcctgccgggtcttggggccgacaatcccgtccaccacaagcccagcgccgtggacattcagcgcgcgctgcaaaatcttcccggtattcctgctcccggaattgaaaaaatgatccctcaacataaactccgtggccggaaaagcgtcagaccccagccaggaacgcacggctgcggtattatccaggacgtactggagacaaccctcccaggcctcttcacgccttccggcatccagcagggccttcaacctgttaaacacggccggttcaatgccgtcgcaaataccgcaaatctcccacttgccgcccttatcggcggcaggaaggcgggaaacgcgcagggaatccggcccggtgacgcggctgtcttcaaaccggaggatagccgcggccatctttctttcaatggtgttcatgagttataagtcgtttttgatagaactagttagaacttgtaagaaaaactttacggttggtcagtgttcatacatccgaaggaacacaagggacgcaatggggaagcagaacgcggcaatgcccgccgtcgtatcgccgcacgcggcaaaaacgccggccatcacgcaccccatcagcggcagaagaacggaagggttcagcagcttattcaccgctgcggcctcctcgctgatgttccagggcggaaagcctcccgtccatggtccgcaagatctccgctgttttggcagccgtctccgcctgtgtggcggcaagggctcggaaatcgcaatacacgaacacgcacgccgcgatgccgataaacatcacaatcgtatccttatattcccgcacaacggccaaatattctttaaggggtttgcacatggtcttactttttcagaggctgcacgacgggcggaacgtccgtttccggctgtgcttgactataggagatatgccccggttccagcaccaggcaggagccgtccttgcatacttcggtgcggttcggggtgacatccacggaatgaccgcagccgggttgcgtcagaatccccgcggcaaccagggccccgatcacagctccggcaatgacttttgcccaactctctttaataccccaaccggtcaggagaccagtcagccaactcactttttctttattcgtgctcatattatttagtagtgaaatgcttaaaaaacgccacggcggcgggatccttgattgtgaactcctggtattgggccggggtgaaaaattcggcgtcccccttgctcattaaccgcctcaacagtcaatgatatggcctccgccattttaaatggcccatcctccgaaataggccaactggcaagaaaatgatccagccgcgcccatacctgaaccgcctgccaatcctcacccaatcccaccaacgcggcaacgacggcctgcatggccggagactgctccgctggtatctcgtcctgcgtatagcggtctatgcgggtatatccatccgaatcccggtaaatggccgtcagggtgaattcctgccagttaccaggctgcgggaactgaatctgtatctctgcattattcatgattatagaggtatgttaatatcttcaaaatcagcggttgactccgactctatcgcattgacagccattgcttccaatgcggcgtacattggattgatcaatccattggcataaaggtagcgattgcctgctcccgtgcgaaccggggatgtccaggaattgggattttctacatccgccaccaacgtgctgaaccccatgccgtcttcgaatcctgaaacgcctctgagggcggctattttgaacaaggtgtttgtctggcctccccccagctcaatataaagtgacgctttcccctcgtatgacgacatgcttgaaagcccctcctgcatgaaaatgagcctgttgaggcaggcgggaaatgggtggttttgagttgcgggaataaaactttccgtagttttcacctgccatgaatcaccggaagagacgtaataaatctcccgcactctaagcacgtaacctccccggacagaatcacgaaccgctgtggttgtgatgtcgataatctctccgtaattgacggccagattattgcccggaatcatggaaaatgaatccatcgtcaggccgcctcttaccgtttttgatccacggcctaatccaaaggtaaatttggacgctgttgaaccggacagcggtatcgaaaatcccgcgaaagaactgtaattatgctggccctgcggcccttcaaaggtaaacgtggtcgtactgtgtgcaggagaaccggaagctgccgacgttgaactggttgcataaagtccggcatattgaacagaggtgctgccgctccccactacgggcatggaactggttttgaggtacagaggctgaatcaacgcctgcacggctcctgccagccccatagccaaaaaacgattaaccgccgccgtgtccattggcgcccccacggcaagcgggatgttgatgcctccgttggcgttgacggcccccgccgccgtcagacctccggccagcgtcatgttgccggaggcatccacctgcggcatggccgccagagcctgctgggcagccgtggctgaattggccgcattggtggccgctgtcgtggcattagtcgccgccgtattgatacgccgctctgcctgatcaatgtcatctttggcggtttcggcgcgttgaacaaggggcgtgaccgctcccaccgcttccgtctgcgctgtctggacggcttgaacagcggtactttgcgcactggctatattctgctgcgcggtctgtgaggcacgacctacggcaagcacagaagccgcttgcttgtcctgaatggcagtaacagcctcattcctggcttcaacaatcttcttctccccgtcgctgaccgtttccggccaggtggcagccagcgattctacagccgttttcgcgtcattggcgctcttggcatcacgggacgcgttagctgcggatgtgccggcagcggtcgcagaatcggcggcagcccttttggaggtccaggcagaccctgcatagccttccgcctcttcggcccgtcctgcagcggtggctgccgcgtctgttgccgtcttggctgcctggctcgccgtttccgcatccgcatgagcatccttggaagactggagcgcatgataggcaaaagcctgtgcagcagtagtagccatccactccatacggagacgcattgtcgcttccccgggcatagcgacaagcagagtccggttcttcattggcgtaccgcctgccaactgtgcgacacgagaaacaccgagtacggaaatatacccggaaaacaaaattctttgggaaccatcatctgcctgaaccaggacattgtaagaccatcttccttcaggcagggcggggaatgaaaaaatcacctcattagaaggctcccccttctcaatggaaatctctaccacctcctgattggcggacacaatgctccctgaaaaaatcacgccgtccagagaaacggcttcccctgccatatcccgaaacagggcagggaaggaaaacggagtattctccatgcaggaaaaatgttccgtaacgcccaggaaatctaacatgcctccctcttagcacacatttttgccgcacgaatacaaccgtaacttgaacaagcaaaaaaatccgctccctgtttcggcaggaagcggaccaaacaacaacgaataccctggaaagataattaagaaccagccgttgccttctccttacaaagaatctgcacgaaagacttttcgtctttcctggaagccccgtacatgcaagcggcatctgctcgaacaacagaaaggttctgatacttgtccggtcgcacgatagaaaacttcatctgatcccacggagacagaacaaggcggctcttgacccacatcggacaaatacgattgccgtcctcatcaaacggaagcatattcgtgaccaggaagcggacattcagcatgggattcaccttgccgtgttccagcacggaaaaaccgtaattcttattcttctgctcctcccacatgatcatctgcgccttcatcgttgaggaaatcgccagacaaagaatgtcgccggaagcctcgtcccatgcgtaattctcttccagcatgcgcttggcttcaacaatctgatccagcaggaacccggcaggattcttcgtcccatccatcttgaaatcagccggaacaaccagatttggatcaagatcggtcagcgtggcgcctgaattgcccgtgtaattaggtgcaagcattcccccgcaaacactatccgaagttgtacggatgcggaactttccgggattatccgtatcgggaaccaccccaagcaaaacctgatcaagcagcctcttgccggccttcttcatttccgcgataaaatcgctgatactgagttcaaggtcgttcaaaaggatattgtcaacatcatccttgtgaagagaatccgcataacggagaggtttaattacacgcttccccatggaaagctcgtgagggctggcctctacgaatctgttgccgatctccttgaactccgtcttgcccacatagggaatctccatatctttcccgcgaccggggagaacggaacaatacggctcaagaatagacgtcacctgttgaatctcacgctcgaaaatactcgaatacttcgtgcggagcatatctgcaatagaaagattaaactccatgcccctctcatcgcacggaacgtgaccggaaacatacaactgcgacttgaacaaaaacacccacgacttgaacaaaacaatcaaaagcgcagcctggaagcctgttccttgctgtgctcgtcgcgcaaatgaccatacacccgcatggcgagagctcccccgtcctggtgccccagccacttggccacggtcggaatatctactccctgctcgatacacgtcgtagcgaaaaaatggcgcagatcatgcacccggacatggggcaaccccaggcggacacaggcatttgtaagagctttccttggattttcgataacgaacacaggagatgttgcggtcaatttattgtttgtttttttcatccgctcaatcacatcccgtagagctgggttaatatacaatatccgtcttttgactgcatgtttaattgccgggacggatatggagtcttttccaatatcgccccataccaagcgtcgggcttcttcaatccgcagaccagagtaggccaaaaaagccaccatatctgctgcaggggaatcaaggctcttttcccggtactttcgcagtaaaggagcacgcctgatttcttctacaatacgaacaaattcttcttttcccgggatgaaaaattccgtcggtttcagactcaatctctccagttttgcggtagggtctgaaactacgtacccggaatccctgagcatagcaaatatttttcgaactgcaccaagagctccattggccgttcttggcgaacaactctgtgcttttttggtgcaccataaccggcacatattgcccgtgatggcttccgctgccacatcttgttcaaccagcttgcgagcatgctccgcgaaaagcagagcagattcaagggccctaggtttaagattgggcctcatcttttgctgggcaatgtaggtatctaccgctacataccaagagatgtttccgatagtcggggtatttgtccccatctcctgcaaaaaggcagccattttggcaatagcctcatttatatcctttgttttaagtgaacgtcttatcgtttttcggccaccttgtctggaatccacacgagcatagtaaatgccagaattcttttcccggtacaagtgggcgtaatcggtaggctcgaagtattgacgcatacccatctcttgccattcctgtgacctcaacacaacattttttcattttgacgtgtggcctgacgtgtggctgttctaacaacagggggaaacaaaaaccgctgtaagcgttttagcttacagcggttaaaattggtcgggttgacaggattcgaacctgcgaccccctgcaccccatgcaggtgcgctaccagactgcgctacaacccgatgaactcggactgaccagggccgtgtcttgtgacggcgaggtgtatataggaaaactttagtgttggcaagagtcttttttcatagcataccttttttgtcatgaagcaagttcaagttgcagtcgtcggggccagtggctacaccgggcaggaattgttgcgcatcctgctgaaccatcgcggggtgaagctggtgtgcgctacttcccgccagtatgccgggcagccgttgtgggaggtttttccccgtttccgtcaggttccgggttccggcctgaagtttacggattccgatgtggaggcgattgccgccactggggcggaggtcgcttttctggccctgccccatggcgtggctgcttcctatgcccgcggcctggtggacaggggcgtgcgcgtgattgacctgagcgcggattttcgcctggacagcccggaggtgtacgaagagtattacgggaacccccacccggatacggccctgatgcaggaagccgtgtacggcttgccggagtggcgccgggaggagattgcccgggcgcgcattgtggcttcccccggctgctatcccaccagcattcttctgcctctcattcccttgttcagggcgggcatgctggagctggaggacgtggtggtctgttccggcagcggcgtgagcggagcagggcgcaaggcatccattccgctgctgttctgcgagtgcaatgagagttttcatgcctacggagtaccgaaacaccgccatttgagcgaaattgagcaggagctttcccatgccgccggggaaacggtggtgatgtccttcaccccccatttgattcccgttaatacgggtatttgctccacgattacggccaaagtgaaaaaaggggcggactccgagtccgtcggccgcctgctggaagaagcctatgccgcggccccgttcgtccgccttctggggcgtaaccagcctgcggataccaagaatgtaacacggacgaactgcgtggatattggctgggcttatgatccccgcacgaaccgcgtgattctgatgagcgcagaggataatgtggtgaagggcgcgggtgggcaggccgttcagtccttcaatatcatgtgcggatttgatgaaacggaaggcttgtgggttctgtagctttttgatacgctgaaaggcactttcaagacgatgaatgattcatcctatattccggttgacgggggcgtttgcgcgccccagggctttttggggagcgccgtaagctgcggcatcaagaagcctacggccacgcgtctggacctggccctgatttattccacggaaccctgcgtttccgcaggaacgtttacgaccaaccgcgtgcaggccgcctgcgtgaaggtgagccgggagcatctccggaaaggaaatatccgcgccatcgtggcgaacagcgggaacgcgaacgcctgcaccggaacccggggggtggaggacgccaggggtgaatgccgcagcgttgctgagcttctggggctggagcctgcagaagtggccgtatgttccaccggcgtgattggcctgccaatgcctatgatgcgcatttacccgaagtttccggaattggcggaggggctttcccgcgacaaggggcatgaggtggcccaggccgtgatgaccagtgatacgaaggagaaaattattgccattgagtttgtagtgcagggcaaacccgtgcgcatcggcgcctgctgcaagggggcgggcatgatcaatccctgcatggcgaccatgctgtgctttatcacgacggatgcgggcgtttcccgcgatgtgctggagctgtgcgtgcagtccggagtgaagagttcttttaactgcatcaccattgacggagacatgagcacgaatgacacggttctggtgatggcgaatggggcatccggcgtgaagctggaaactccggaagatatttacgcattccagcaggctttggcccatgtgatgctggaactggccaagcacatcgtgcaggacggagagcgggtgaccaagttcgtcaccgtgcatgtgacgggaggccgcacggaggatgaagcgaaaaaagcggcggaagccgtagccaagtcttccctggtaaagagttcctggaacgggaatgatcccaactgggggcgcattattcatgccgtgggctactgcggagcaaaagtggacgaagagaagatagacattgacatcgctggtctggccgcctgccgcggcggcgtgcaggcggatactccgtccgacgatttgcggcaagccgtgcaggttcccgcgttccaggtggatatcaatttgaatcggggcgagttttcccatacggtgtataccacggatttgtctccggaatatgtggatttcaaccgttccgagtatgcatactggaaccaggcgaaagcggacggcctgacctgttaaccgtttctgtcatggcgcgtggcaaatgccgccagggaaaggcggggggaatggcccccgccgccgggatgctgatggaggtgcggcgccttctggatgaaggcgccttccgcgcttcccgtgcccagcgtttctgtaccggtgcggcggattgctgccggttccgcctgaccggggagacgccgcatgtaacgctgggtgaggcatgggtggcctggaaggcgtggcgtgcttccggacgcacccggttggagctgcctccggacgggagctgccctttcttgagcggtcagggaagatgcatgatttatgaaggcaggccgttggcgtgccgcactcatttctgcgtaccggccgggggcgccttgccccgccgggaggttattgacctgatccatgcgctggaagatattgacgcagcgctgggcggcgatggcgcagcccggctgccggaggccgtggaacggctgtcccgaaaaggcccggcggatggaaggaagaggcggcgatgatgatccgggggtgacggcagtcaggcgtctatttccaagcggaagcacattttttcaggccatgggaacatgttttcccttcgtgtgtccatggctggacctggttagaggatagaagtaagcaggagaatgcctgttcaggcctccgagtccgtttgtttctctttttcctgtttggaggccagatggcgcagggcgctggcggcctttttgttgccgtgccggacggctttctgataccattcttccgcctgtttatcgtcctgctcaatgccgtagccgtgggcgtagcagttgcccacattgaacatggctgtggcgttgccctgttccgccgccttaaggtaccatttcagggcttcttcccggttgacgggcgttccttttccgttcagatggcaccaccccaggttgagctgggctgttgtatgcccctgttctgcggctttggtgtaccagtggacggctttggccatgtccacttccatgccccggccgttgccgtagcaccatcccagcgtgtattgggccgtaatctggccctgaagggctgatttgtgataccataccagcgctttgtccagatccggctccacgccgaaaccgttttcatagcaccatcccagattgtactgggccgtagcatggttctgcatggcggcttcttcgtaccagtaagcggctttccgcgggtttttgggggttccgcttccgttgccatagcaccaggccaggttatactgggcgcgggggtctccctgttccgcggcctgcttgtaccagtatacggcctgttcccagtttttccggctggggctgttggcataaatccagccgaggttgagctgggctaccgcgtggccctgttccgccgcttttttgtaccagccgatggcctggtgttcgtctttttccactcccaggccattgacatagcagaacccaaggtcaaattgcgcggtggggtgcccctgttcggcggctttccggtaccagtaaaaggccttgtcgttgtcctgaggggcgccgatgccgttggaataagcccatcccaggttgagctgggctgtaacgtggcccagttccgccgcctgctggtagcagtagaaggcttcctgctggttttccgccaccccgcgaccctgttcgtagttgattgccagctggaacagcgcctgggcgtctcctttcagagctatttgctgaagggtttctacgtcgacggaataggtggagacggtgttttcctgctcgccgtggttgtgggaagcgtcattcatttcacaggtaaccgcactggggaacactgggacaatttttgctctcctgaacttgtgcgctcgccgattctgcacatttcccccataagaatcaagacccgtttttattgggaccggagttcggaaagctttaccgtccagcgtgcctgcggcgggacagggcgaggaatgaaccgccaaggaataggattccggcgccgggttccgggattctcagatctcccagcggagcggtgaagctctgtatttcccccaggcggatgcccgtcagtcccgcttcttcgtaattataactgtacacgtcgttttctccatccatgctggtcagataaatgtcgcagtgggaaaggccgtattcatctgtatagtcgttcacgactactttctggcggaacattcccaccgcatagtcgtccgagtccgtcaggtagatgaccagattgtcgtcttcgtccgtgtcgtagccccacatggtgatggcgtggcctctcccttcttcgccgacggtcagagtggttccccagttgttgttgatgctgtttgtcagcttctggtaaacgccgcttctggtgtctccgtcccagaagctgtatgcggaaaataaggggttgtcaacagctcctccgcttgaagactgcgggactgtcagtcccagctctttccagtatcctccggaagccgtcgtcgtagaaaggctcggataggcggtggtatccagcattccgccgttgatccaccagttgtaggcttgttccacggagcctccgctgtttgtccagctcgtggagatggtctggtaaatagccagctgggcgacctgcggcatgacatcgtaagtggcggatttcccgttgggcgtggcggatttcaggtcgcttctggtatcctgccaccattggagaacgttggaggccgccgccgcccagcagatattctgatcataaggaaggtacagccattcattgggccgtgcggaaaccggaggatttagcggattggtggggtggggcttggtcccccatgtccatttggtttttttattgcaatcataccatccgccggattcggagacgttttcaaggaatacgggcgcggcatgaagcgctccgggaaagagcagtgccgccagagccggagagagggagcggagagtcataggaaaaaaggaatatgtgtaattccttttttgttaaaaaaagcccgggagggtcgtcaagataataaataggggaaggaggcgaataaaccccggagaggcagatttttttccgaagacgccgggaacgggatgtccgggggacaggacagatgaatgattttcaggggctaccgttgttaacgggggacgagccagggagaagtgggcgcttccggattggacgctacatctgcgggggagccctcggccacgatattgccgccgtgcctgccggctccggggcccatgtccaccaggtagtccgcggcattgagcaggtccttgtggtgttccacgcagaggatggtgtgtccggcatccctcaggcggaaaagggctgccaggagaagggccacttcattgaagtggaggccgctggtgggttcgtccagaatgaacagggcccgtttcccgtcttcctccagtttccaggccggggctttggccagttccgcagctatttttatgcgctgggattctccgccggaaagggtgtccgccctgcggttgagactgaggtatcccagccctacgtcctgcatgcttttcaggatggcggcggctctgggcagggaggaaaagaattccgccgcttcgtccacggtcagggccagcgcctgggcaatggatttccctttccaggtgacttccagcgtttccctgttgtagcactgcccctggcaggcgtcgcagggcattgccacgtttcccagaaagttcatgtctacttcaatcatgcccgttccctggcaacgttcacagcggcctccgcgaatgttgggggaaaagcgcgccgccgtatatcccctctgcttggaaagggggagctgtgcgtaaagggggcgcagcacctggagcaggccggtagcagtggccggtgtggagcgcggcgttttgccgatgggcgactggtcgatgacgacgaggcggttgaagtgttccgttccctgcacgcggcgcggaataccctttttcccggagaggtcttgcctgactgcggggatgaggcagtcccggacaagggtggattttcctgaaccggaagggccggagatgcaggtcagtgtgccgaccgggatattcagagtgacgttgttgaggttgtgcttgtccgcaccggtcagtaccagacgccccgcaggagccgtcttgcgtccggagtcgggcatgtttcgcttgcctgaaagccattcccctgtggggcttcctgaatttcccagtatctcagcaagggagccctgcgccagaatacggcctccgttggttccggagccggggcccatgtccaccaggtgatccgccgcggttagaatttgttcatcatgctctacgaccagtactgtgttgccctggttccggagcgtccggagagcgcggagcaggcggtccgtatcggcggggtgcagtccggccgtgggttcgtccaggatgtaaaggactccggaaaggccgcctcccagctgggaagccaggcgcgccctctgcagttcgcctccggagagggtgtttgcctggcggtccagggacaggtaggagagtcccagctcattcaggaagcgcacgcgtttgttgatttcctccatgagcggggtcaatgccgccgccaggaaggagggcgttttcagtcgttccagttctcctgccatatcttccagaggaagagccgtcagttccgcgagattgtaggcccggtccggcgcaggcatggtgacggctagggccagaggggaaagacgctggcctccgcaggcgcggcacggaccgttttcctgttcattcaggccggttccccggcaggaggggcatgcccccagcggggagttgaaggaaaaatggcggggcgtaagctggggcagaaggaagcctgtttccggattgcggtagcgggtgtggaaggcccggattgaggcttcctctcccggtatggtgatgatggcccgcacctcgtccggattgatacggagagccgtttgcagggaatccgcaatgcgcgaggccgtattttcccctctgacgatgaggcggtcaatgaccagggccgcgtccggaggcggggggacgggggaacttatttcttcaatatcccgcatttctccgttccagtaaacccggaggaaaccctgccgctggaagtcgcccagcgtcgctgcgggatcctgggccagcaggttttccgccggagcggccagaatcaggcgcgtgtgttccggcagggaaacgagttcttccgtaatccggtccgggctcttgcgttccagttcttttcctgtttccgggtcatggggcgtgccggcagccgcgtaaaggatgcgcaggtagtccagaatttccgtgatgctccccagcagggtgcgggaactctgctgcctggcggattgctccaggcacagggccgggggcagcccggtaatgctgtccacttccggtttttccggttgatccatgccctgcctggagcgtgccgacaggcagtccagaaaacgcctgcgggattcggaaaaaagcgtatcaaacgccagggaagattttccggagccggaagggccgcagaatacgatgagcttgttggacggaagatccagatccaggttccggaggttgtgctggcgcgcgccgcggatggagatgggaagattcatgtcacgtaaggcgggtaaaggctccctggtgcgtgccgccttcctcaatgatgaggcggcgcgccgtgatatctcccaggaatttggcgtgccggtggatggtgacggtttcatccgccgtaagcgttccttccagagaaccctgtatccagatgttttccacgcggatggttcctgtgaccagcaccgtcgtctttttttccaccaccatcctgcgggcgcagatggagccggagatgtgctggtccgttttgattttgcagacgccgcggcacaggaagtcgccggaagccctgccgtataagaccaggtcacggcattcgatgttcagccccttcaggtctgcattggcctgcacggtaacgcttccgcaggtctgcaccttgatccggtgcgttctgctgtgtaaaatgacgtcgtccagtttgatatacgcggagcaatggccgcacctggcggaaactgccgtggcggggacggaggtgcttttgcggcaggagaagcattccacctcccgggcaggcgccgggctgttttccgtagttggcgggagtgtccagggcggtgccggggaggggtggctgattttcccggagggcgcggtgctgatccgggggatgggatggaaggtggggttcatggaacaaagagggcggcaaaagaacggttcgttcttttgccgcccctgaaagtagcaggcggagagttttttattccgcgtcaatatccagcgtgctctggctggccggagcatggggttccggctccggagcgaaggcatggacggaagccgccttcttggcggcggaagcccctgtggttcctaccgtgggggcgcctacggtagaatggccgatgaagattgctccgccttcaatagccagggaggcggcctggatgtcacctacgagttccgccgtgcttttcagttccacgcggtccgtgactgttacattgccgatgaccttgccgtggatgatgacggatttggtgttgatttccgcccggatgacggcgttctggcctacggaaagcaccccttcggaggaaatgtcgccttccacggtgccgtcaatcagcaggtcatcggaaaaacgcagggaaccgattacctccacatcggagttcagcacattgcgggtcagctgctggacacgggtggtgggagcgtaggaaggcgcggcttccgcaaccggttcggggatgtcctggctcttggctacatccatccagctgggggtggattcaggatttttattgcccttgggggcgggaacggtagtgaatgatccaaacatggcgttaaaaagagggggtgaaaggtaagatgggagctcttgaaactcgtccggtttaatgtacatcacccgcatgtggatgtgaaacaattttctccggcagggataaaaaaatgtgtctgttttttatcgttgcgctgccttgggcgttccggtagtgtgtgaccgtctttccgcgattgttttctgtggatattttcgttttgaaatgagtgatttatttgaaaaaaagctgttcctttccccggccgcgcgcaggcacggcggaaaagcgggctttgcgctgggccgcattctttccgtcatctttttcgtgatcgcgctgggaatgtttttcggcggtcttttcttctggctccagaagcgccaggcatccctggattccggagcggccgcgcggatttgcgccacgccggagatgttgtccggagaattgaaagccgctctgaaagacagggtggactatagtttctggcctccttatcacatttctccgatggaaaagcaggacctgctgcgcaactgcctggcggaggcacagaaatatctgagcgccgcggatgtggttcaaaaatcctcttttgtgtggaagtccctgcaatcgcttcctttaatggtcaggcattacgccatgtctccgcctgaggcgattgtcagcaggcctaaggggcctaaaagctttgccgtgtttgaggtggaggggcatccctgcgcccagctcctggttggttttgaaaagactcccgatatggaattctgttttttcaaggatgaacaggatggttcctggaagctggactggcagcagtttgcccgctttcagccgatgaactgggaggattttgtacggggaaaaggggaggatattgcggaattccgcgtatggatggttcgggagcgcatgtcggaaaataaggatgactatgcatttaagctgattgctcccgggatgaacggttccgaagagcgcagcattgcccgtcccatggtgtatgtccccagaaaatcggaaatgggcaagcgtttgttcatgttgtttaagattaatgaggagatggaacattccccataccgggtgttgaacgccaatgacgaggctgacatgctccgcgcgcgggttcttctttcccgcagcaaagagcccaaccgcaagggggaatattcctttacgctggtcaggctgctgggggaaggctggtacggcctttctttcccagaataaaaaggaaggattgggccggcctcttgctttgcgggggatggggatgcgttttaccggcgatggaaacggggagggggcccttcatgtgggcgcctggggcggtggggccggaaagggggcgggcatggcgtaaggcgtgcggcatgatgtccgcggcagacgcccgccggccagaaagggccgtggtaatgcggcctggggttccatgcaggaacatggcagccgcggtagatgtccctgatgacgtaaatgggtgcgcctgcaggggtataggcgtaaatgggccgtccgcatggggaatattcccagatggggaatccggaggggtcatacaggaaaacggcctgccctgccgcaggtacgcggatttcgccatgcaggtgaatcccggcttccgcagcgggggaggaaaaggccaggagggcagatatggcgcttccggcgcagcaggcaagaagatggtttccggcagggttgttgttcatcggttttttgaatggtggttgacggcagttatccgatagagcggagtccccgtcccgttttgtgtaattttccatgcccgtcattcagggagggggtaaggggaataccgtcttgacctggaggggagccccgggcaaagtgaccgcgtgacgagattcagaccatgcattgatttacacggcgggcgcgtgaagcagattgtgggcggcaccctgacgcaggatggcgtttcattgcgcaccaatttcgtctccgaccgcggcgcggcatggtatgcggatttgtaccgcagggacggtctgagcggagggcatgtgatcaagctgggcccagggaacgaccatgcggcgcgggaggccctggcggcatggccgggaggccttcaggtgggcggcggcatgacgccggaaaacgcggaggaatggatttccgccggggccagccatgtgattgttacctcctgcctgtttgatgcggagggaacgctgcggatggacaggctgaaggatcttgtttccgcagtgggcgcggaacggctggtgctggatttgagctgccgcagggttcagggaggctgggccgtagctatgaaccggtggcagactttgacggaactccgggtaacggcggagacgctggatgttctggcggaacattgcgcggagtttcttattcatgcggcggatgtggaagggctctgttccggcattgaccgggaactggtggaaatgctgggaaactggcgccgtctgcccatgacatatgccggaggcatcagccgcattcaggatattgacgaaatagacgctttgagcggcggaaccatggatgccacggtggggagcgctttggatttgtttggcggcggtttaatcaggtacggggatctggtggccaggcagcgcgggaagtccggcatggaaacggtatgaaactggctctgaaagttattcccaatgcgaagaagagcgaggccgtgggatgggaggaagatccccgtgccggccgcgcgctgaagctgcgcattgccgcgcctcccgtggagggaaaggcgaacaaggccgtcgtccttttcctgtccgcttggctggatattccccgttcctccatcagctttctgcgcggggaatcctcccggctgaaagtggtggaattgccggacggatgcgagggaaaacttgcccggctgctttctgcggaggatgtttccggcgcttaggaaagccgggcggaaggcaggcattttctttatgcgtagaagggttgcatcaggcgcggtccattacgcgtcaaacgtcatccatgtcttagcaggccgttgacgcatccggtaaaagaatttacattgcccgcatgagcgacgaagagaaagagaaaaacgcggaagcggaagagctggaggctcaggaacaggtgcaggatgctcctgccgaggagaaggtggcggaaccttccctggaagaggaattgcttaaatggcgggatgccgccatgcgcactgctgcggaatatgataactaccgcaagcgcatggtgaaggaaaaggaggaatgcgccaagttcgccaatcagcgcctgctggaagaacttctacccgtcattgataattttgaaatgggcatggccgccgctagcgcagatgcctcctccatgatttacatcggcatgagcatggtgaagaagcagctggacgaatttctcgccggcaatggcgtgagcgccgtggagcctgtggtgggaagcatgtttgaccacgccacggaggaagctcttcagcgggaaccctccgaccagccggaaggcaccgttctgcgcgttatccgcaaggggtatatgctgaaagacaggcttctgcgcccggcgaacgtggttgtcgcccatactccggaccccgaaccgcaagtctgaccgtttttttaacattcacgccacatggctaaaaaagattattacgaaatcctcggcgtttccaaggacgctactgacgatgagattaagaaggcctatcgcaagctggccttaaagtaccatccggaccgcaacccggacgacccgtccgcagaagaaaagttcaaggagctgggagaggcctatgaggtgctttccgatgcggacaagagggctgcctacgaccgcttcggccatgccgcctttgaacagggcggccccgctgcgggcggcggttatgccgggggagggttccaggatccgatggatattttcgcccagatgttttccggaatgggcggttttgcggatatgttcggaggcgccggccgcggcggccagaaaaggtccaccaagagacccggttccgatttgcgctatgatttggacatcacgctggaagaggctgcgaagggatgcgccaagaagcttgagattgagcgtctggtgacttgcaagacctgccacggcaccggggccagggatggaaaggaagcgttcaagtcctgtcctacctgccaggggcgcggcatcattacccagcagagcggctttttcgtccagcagtccacctgccccacctgccacggcaccggggaaatcatctcggacccatgccccgtctgccgcggggaagggcgcgtcagggaggattcccacatcaccatccgtattcctgcgggcgttgccacgggcagccagctccgcatcgccggggaaggggatgccggggtgcatggcggccctaccggggatctgcacgtgtttattgacgtcaaaccgcacgatattttccagagggagggcaacgacctgagctgcacggttccggttccgctttccctggctgtttccggcggcaggctgaaagtgcccacgctggaaggcgcggccaccatcaagctgccggaaggaacgcagaacggcatgatcttccgtctgcgcggcaagggggtaaaggcccttcgcagttcggacgtgggggatatgctggtggaggtggaggtggaaatcccctcccggcttaccaaggagcagatggataagctgaacgcgtttgcctctgccctggatgaaaatcggaaccagccggcttgcgtggagtttgccgacaaggcggcgcgttacctgaagggcaaataaggtccgtttccctttttcagacatggcccgctttttcctcccgccttccgaatgggctgctcccgcctgggagctgcgaggggatgaagcgcaccatgccgccaaggttctgcgcctgaagcagggtgactcctgcatcgtgtttgacggttgcggccgtgcggcccacgctgtggtggcggaacctccgcgtagctccggcgtgctgctggttccgggggaggaatgtcctccttctccccccgtggcccatttgacgctgtgccaggctgttcccaagggtgccaacatggatctcattatccaaaagtctgtggaactgggtgtttctgccattgttccgctcgtaacggaccgcacgatcgtgcgcctgaatgcccgggaggctgaggccaaaaggcagaaatggcagcgcatcgccttggaggcctgcaagcagtgcggccagaacacgctgccggaagtggcgcttcccgttccctttgcggaatggctgcgcggaggaattccggaaggactgaatattatcgcctctctggcgcccggagtgcgaccggtcagggaagtgctggagaccgcccgttcccgttccgtccgtcacgcttctctgctggtggggccggagggggattttacgggccgggagacggccatggcgttggaagcggggtttgttcccgtcacgcttggccctatcgttctccgggtggagacggccgcctttttcggcctggccgccatgcggtacgccctggactgagttttttcatacgcattcccatgttcaaaaatatcattttcgactggtccggcaccctggtggacgacctggccctgacgctggacgcctccaactacgtcttttcccaatacgggaaaccctgcatgaacagggatgaatttcgcgcggaattccagcttccctatccggactattatgcccgggtgctgccccacgcggatctggatgaactggaagaccatttccggtacgccttccgcgtttccaatgctccggtggaagtgctgccgaatgcccgggatttcctggagttctgccgcgcgcgcggcgtgcgctgctttattcttaccagcgtggacgccaaggagtttgatacccaatgcagggagctgggcatgatggaatattttgaagccattcatgcgggcatccgccataaggatgcccacattcataccctgctggcccagcacgggctgcatgcccatgaaaccgcgtttatcggggacatgcagcatgatgtggaaacggcccaccacgcgggcatcacatccattgccgttttgaccggctacaatgacgcagcgcagctttccaaggcccggccggacatgatcgtcccggacctgcttgttctgcgcacgctgatgcgccgttacgcgctcccttccgatacgcaggattccatcaatatcaatggtcttgaactggataccttcattggcgttccggacgaggagcgctcttccatgcagaccctgaaagcggacatctctttttatccggaggaggctttgtccggcctgaacgatgatttttccagaaccgtctgttatgattccattgcccgtgcgctccgggcggaggccatggcgcgtccacgcaagctggtggaaacgctggcggaggatatgggaaaggtttgcctgaaggaattcggcgcgcggcacgtggttgttaccctgcgcaagtttattctgccgcggacggacagcgtttccgtaacggtgcatgtttcccggcaccggtaagaaagaggttttctaccggatgtccaccgccttttcctcagggattttcttcccgtctttggtgaaagtgtttttctccgccttgacgtcaccggtatggcgaatgcggatggcggttccgttcttgaggtcaaacgtgtttccggtaatggtgatgtttcggtgaacgtccccttccggccgtggagcgtgcggcacgatctggatgacggcttctccgcattggataaaggtattgcgggaaatggtcatgttcctgaccacgccggattcataccagccggaggcgtcatcttccaccaggatggcgggcatgcccgttttttcaaaccggcaccgttcaaccagcactggcttcctggtggtgagcaggaagcccctggtgggaatgtggcggcataccgtattgctgatgtggacagacggcgtccatgtgacgttttccacaacatcgtcaggctggatgttcccgggattgggatgttgcaatgtaagttctatttccttttcattgagttgtttgacgccggaaacggtattggatgcataaggcaccagcgtgttgcaggaaacataatcgatccggtctcctgcggcaaaggcgtcaaagccgaaggtctggggatgcatgaaccggacggtgattttgttgggggccggcctgtctataatgcgcaagtgggttccatgaacattaacggcgtcgtcatgggaggctcccagcacgcaatccttgacgatgatttttccccggcatccggaaaagtgcagattatccgcccaggaggaattggtgcggagggaacgggggcgcggggctattttcaagtggctgaacatgatgttctcgcagaactgggaaacgacgcccatgccgtgcatatagtaaatatggcagttattccagaggatgtttttgcttctgtattgaaagaagccgcagcagtccctccgggtattgcggttttggtaggattggcccggtttcatggttggtgagccttccttgaacgtaatgctgatttttccgggagacaattctctgatgactgttttcccggggtcgaaacggccctggaaagtgccggaggcggaatcgaaaattttggaataccctcccatgcggaattcccagccgggtccgtgccaggtcaggtttccatccttcactgtgtacaggattccgtccggaatagttgctttcatggtatccccttcaacttccgtgaccagaaattcccccatggtcggatgcagataatcaaaacccaggccgttcagggaaacgttttccgcatgttccatgcagacaaagatggcttttccttccagcaggatgtcggtggctcccggctttccctccaggcgtatgtttttggcttccatcaggcggatagccatggccttgggctcgttgggcgcatcgttggtgttggaaatctgcggttttccggtcatcagggcaccgtgtttgaagatatgcctgccgggcatgaaccggatggtgaccggggcctgtttggaaccttcccccatcagcgccagggagacggcatgttcccccggatggatgacgagcgtatctccccgcgccatgatgagacggttggccggcgccatgcttttccacgccgtggatggggtcgttcccggattgccgtcatttcccttgtccgggtctatatgccagacatggtttcctgcggattgcgtgcgctccgtccgttccggataatccgctgccgggcatggccctgtcaacattgcgagaataaaaagcagggaggccacggggttttgcatgctgcaactcctacaggaacacggttttcgggacaaggataattcttgcagggccgggagaaaaagccgcagcttttccatggctcacctgggaggcccctgtttttcatcctttctgccggggcgggaaagaaagcctaccagcttgtcataatacgctttggatttgtcgtagtaggattgagggtcaatatccagtttggtgcggaacaggagccagagcttgtggaaggtgttgacgcggtagcggatgtcgaaaatacggaagccgctcgccttcattttgtccagaatggtatggtaaatgagtgccatggcctgtgccggaataagggcggctttgtcttccgggctgagaaggttgtattccctctccgcttccgcaaagaaagtttccgccagatccgcttcatatttcagcagctcctgaagccggggggaatacaccctgcagcgcaggtcttccagggtgtatccaaagcggtccatatcctccttgggcaaataaatgcggttggacttgccgcagtcttccgccacgtcccggatgatgttcaccatttgaagtgcatgccccagggcaatggcgtacggataggaggcttctcccgcccccatgatgcgggcggaggtgaggcccacgcagcaggctacgcagtaggtgtagtccagcagttcatcgcggctgcggggctgctgctggcagatgtccgaacggcagccttcaatcaggtgcagcatgggagtggtgtccagctccaaatcctggatgagggctatgatgtcctcctccagttccgtcagttccaggccttctccgccgttgatgacctccacccagcggttcaatgcgtcgtggcgttcgcggggagtcatgcccggttcgtccacgatatcgtccaccgtgcggcagaaagcgtaaaattccgccatatggcggcgttcttcttcaggaagatcaatgagggcaaaggccaggttggacttggccttgctggtgatggtttgggcttgagtcatgtcttgacggaaaaaacgtgcctgcgaaaaggataaaaatcatggaataaggccccagtgggaagtaaagggccacaggcagaagctggcggggcctacgatgttgtactggcggacggggccccagtaccgggaatcaaaggaattttcgcgggtggaattgtcccccagcgccacgtattcacgcagataggggcgtttgctgtcgttggacagatgaacggttcccccttccgtgatgtaagctctgccgtccagcaggctcaggggggcgggaagggccacgtagccgcagggctggtaggggggcttgccggaagcgaccctctggatagtccattccgtggctggtttcccattgacgattagctgggagtcctgaatggagagggtatctcccggaatgccgcagaggcgtttgacgtagtgggttcctccttcctggccggtgctgcttcccttattggcgatgccttcgatgccgcgtgtatcaaagacgaagacttcccctcgttccggcttgcggaagtggtaggccattttattcaccacgattaggtccccggcgtcaaaacgggcattgacgattgtgtctccgggcaggtagcttctgaacggggtgtgccgttcggcttcaaagcgcggttcctgattgaggaagtagcggcgcgtttccgcttccgctgctggaatttccagcttggagccgtcatcgaaaatcacgttggtcaccgtgagcagaaggtacttggtggcaggttcgaaacggacgattttcttttccttggaggccgtttcgtgcacataggagccgccgtacaggatcatgtccccgattttctgcatcagggtgggatccccttcctggggaagggcgcggattccgttcagggagggctgcatggaaccggtcgggatgcggaagggctggactacataacagcgcaaacccaggaaaatggccagaatcacgaacagaacttccacgttttccgccaaggcggaaggaaccgctccggggatggattccagcgtggattccagtttggcggtaatggtttccgcctgctgcctgtcaccccggtaaagggccgttttcagcaggtcgcggctttcttcaaactccgccaggcgttcgggaggcagaagatcgcgattgtagttgatgtagcggcgcactgctttcagggccatacgtcctttccggcgccatttgggcgtgaaccaggccagaggatgatccagaagaaacaccagaacggcgtttgcagccggaaagcaatcgtaaagggcagctaggatggacttgtgcgggctattcatgaagtacggcattcatgatgccccgtccggaggcgtcatggaagtttattttacgttacggaagccccatttttccaggattcagcaaattttttgggtccagggcggatttgaccagttcgtgcaggtggtaggcgccttcccccacggctttccggaaccatttggccttcgccaggccgatgccgtgttccccggtaatggcgcctccgtgtgccagcacccagtggaacagcctgtccacacaggcgtccgccagggctttcttctctggattcgcataatcgtccaccatgatgttggtatggatgttgccgtccccggaatggccgaaacacgcgatgtccagccctgtttcccggttcagggcctcgcagaattccaccagggccaccaggcgcgacctggggatgacgatgtcttcgttgagcttggtcattccggttgctttcaggctgtaggaaaattcccggcggagttgccagatggcttccgcctccgcttccgtgtctgcgcgcagaattccggtcgcgccgcattcttccagcagggtgcatagggaatccagttcctcacgcacggcgggccgtctgccgtccacttccacaatcaggtggccgcggcagccggaaggcagggcgctgtcccccagatagttccgggcggcgcggagagtgaaactgtccgttatttccagggcggagggaagatgcccgctgttcaggatgcgctgcacggcggcagcggccagcgggaattgcgggaagccggcgctgagcgcgccgaatgcttccgggtgggggatgagcctcaaaacggcccgggtgatgatgcccagcattccttccgagccgataaagaggtccccgatatcgaaccccgtcttgtttttatgggtgcgtccgccgcattccactacctctccgctggcaagcaccacggtcagccccagcacgtaagctctggtgactccatatttcaggcatctggggccgcctgcgttcgtggcgatgtttcctccgatgctgcattcctttctggaggccgggtccggcgggtagaaccatcccagagcacgggcttcccgctggagatccgctgtgataactccgggttccaccacggcaacgccgtcttccggggatatctccaggatacggttcatccgttccagggaaaggctgatgcctccgcgcacgggaacgcaccctcctacgtatcccaccccgccgccgcgggccgtgacggggatgttcatggaggatgcgtagcgcagcaacagggagacgtcctccgtactttccgggaaaacgactgcctccggcagcacggaggcgtaccatttgtccccggcgtgcgccgccagcacatccggggctccggaaactttttcaggccccagaatgcgggaaatgtcttctttcaaagacatggattatttgagaatgggggtgcagaagcagtccgggcggtggaaatccggattgccggaaaggtcgtccgccgtagtcaggaaaatctggtccggagtgtccaggatgaacgtggctgccagcttgcagtcgcggatgtccacgccgcgcagttcgtttagcggaatccgggccatggcgcaccatccctcgtccgtcagaatgcacttggtatccacggccagcggagcggggatgtcttcattggcgcggcgggtatcggaaaaggcgcaggcccaccatgcgccgttgggcgcaaggttgaattcccagtaattggtgccgtctcccgcggccatgaaccattccgccaggtcgtaccgccatagctccggctggaactggccgggccgggcttccggatggatggtggctgccttgctgcgggaagccagaaaccagaggaattctccgtccgtggcgaaggcgaattccgcacttggctccacatcatagccgaaccagtcgttgacgagttcctggcggggcagggaggcgagctggtcgaagcttccgttgaaggcccattggtgaatgattacttgcataccaccacatttggacagttttcaggttttatcaagccagaacgtcttacaggcttggatattgacgtgatttctccatcatgggggccgtcatgcattttcaaaggacgctgaatcggttttcccgcgaaaacgttcccgggtatctggctgtgttcatcggcggtttcggggacatgtttgcgggttgtttgagccgtgtggagaaaggatttcccggttttttgccgggtgtggcgtacgcaacggcttattaccactgggacggaggcggctgcggcgtgttttttgacaggtgcggaaaaatagcggtggagctggaagagctgagacggagatatcccgggctgcctgtcgtgttgataggacacagctacggaggctcctgcgcggtggaagtagccaggcgccagtcggttcaggctgctcctctttgcctcctgacggtagatgccgtggcgcgcaggcaaaagagcgtgcgtccggcctgtgtggaatggtgggggaacgcttacctgcaggatggcggcggcttcatggacgcggtgcccagaataggcggacgctggggacattgcgccggggctgatgccaatcttgctttttccggctacagtcgtgaccgggagggccgcctttattctcaccggcgtcctgcgcccatgctttatgagccgcctggggaagaagcatgcagcctttttcaagccgctgcctcctggctggaaagaaatcttccggactgaactgccggagccgtgctaccggttcagttcatcccacttcaccagttgggaaagaagttggctgataaggcgttccgtctgttccctggctttctcttccggcactctgatcttgtccccgtacgtggtggaaatctggaaatagcaccagcgttgatccatgccgtgcagaaccctgtctttcatatccatcagggtgcggatcaaatggtcttccgtcatgtggcggtggccgataaatacgtaataatgcatactgtccagaatgacaggttgcggatgatccggagcgatgttctgctgggatttcagcttggtcattctgatggttccgcggccttccacgggaacatccaccgtggtccccgtcaggttaaaatggccctgggccgggaggcagcgttccggacggtggatggagttgtttaaatcatggccggatttcacgatggaaacgcggcacagaacgggtacggtttccgtcgcatccaggctgatggggagttcctgcacgtaatccgctttggaaaattccgtatccggggccaggatgccccgttcctgttcggattcctgccggcgcgtgccgtgccagccgtacggattcatgcctgtggggagatccatgctgatggaggagtcctgcacttcccccctgcgcggcatcaggtaagtgccgccgagcatgacggccagcagaaaagggatgatgataattttgagcgttttaatattcatggcggcggaaacgcttaatgggacttgttcattttaacaaccagcttcttgcgctgtgacggcttccagatgagctccccggccagcagggagtggacggctgccaggccgaaaaggctgatggggaaaaaaaacagcaggccggaccagtcatgccaggtttttgacgcaaactcgggatttccgtattccgccatcaccacgatgctggtgatgcggacaccgttgccgatgacggccaggggaatcgcgctgaggaagagcacgcattttttccagaatttcaagtcggacaggtaggcccaggctgcggacagcatgagcagtgccatcagggaacgcatgccgctgcaccctcctgcaatattgaaggcatcccagtgtccgccggtagagcggatattggtgccctgcagataggtatccaccccgaagatgcttgccccccaatgccccagttccgtcgcgatgatttgaagtcccaccgtagcctgctggaaggagggcagggggatgcacagccagaaaaagagcagcgggaaggcgcacagcctggcggtctgcggtccggccaggtaccaggccccgcccagtaaaatcaggggaagagcgcctacggccacgcgaggctgccccacgcggaaggaaagcatcagaagcatgatcgccgggatgaaaagaatcaggccgcgccagtccatgcgtctgggtgcctgggcaattttctttctggcatggtacagcatgaagacgatgatgggaaccaccagccagccgtgttcataatccgtttgcttgttccaggaggaaatgagccactggatgctgttttcatttccgaatgaaccgaattccgggaatgccagatagttcagcgccagcagcagcgtgctcacggccagggcggcgatcatgggggcggtcagaaatctctctttgccatcaggagcgggggaatccatcatggagaaaaatcaaattgtgagaattaagtattgcgattatgcgggcctgtgttcagaatgcgtccgcttttcagtttccggtatgaagattatcagcggtacagcacacagagaacttgcggagcgcattgcgcaaagcgtaggcattcagttgacgaacgtcacggtgaatactttccccgatggggaaagttttgtaaagataaatgaaaacatccggggcaaggatgttttcctcattcagcccacctgccctcccacgaaccataatatcatggaattgtgcgtgatggtggacgccgcccgccgcgccagtgccggacgcatcacggctgttgttcctttcttcgggtatgcccgccaggaccgcaaggaccagccccgcgttcccattaccgccaagctggtggccaatctgctgacggccgccggagtggaccgcgtgctgactatggatctccatgccgcccagatccagggattctttgatattccggtggatcacctgtacgccgcccccgttttaatccgtcacctgcgcgaacattatgttaaagacctcaagaaactggtcgtcgtctccccggacgtgggcggcgtgaaaatggctcgcgcgtattccgatgcgctgggtgcggaattggccattgttgccaagcaccgcgtcaacgccacccatgtggaagccatgaatgtcattggtgacgtggaagggcgcgatgccgttctgattgacgacatgacggaaaccgccggcaccctgtgtgctgccgccaatatcctgaaggaacggggagcccagcgcgtgttcgcctgcgtttctcacggcgtgctgggggacatggcccgcgaacggatttccggttcctgcattgaacgcgttcttacctccgacaccgttcccatggcctatggccccaaagtggactgtgtcagcgtgggagacctgctgggccatgccgtgcagcgcatacatgacggagaatccgtatcatcattatttgacatttagacaattttagtgcagagtcctgcgccctgacctgagtaccggtttacgcgggttcggaaatcccggcggggcctctgcctgaacccgattaggaaacatcatcaatcaacactcaatattgcctctataaaacatggctacatcccattccctcaaggccgaaacgagagcctgcggctccggtaatctgaagcaactccgcagccagggcctggttcccggcgtggtttacggtcccggttttgacaacgtcaatatccaggttgacgcccgtgaatttgcccgcatgctggcttccgccgtttccgaacacatcctcgtggccctggatatcaacggcaagatcgtgaaggttctccttaaggaagtgcagcacaaccccatcaccaacgcctgcctgcatgtggactttcaggctgtgaccgataccacggtcatccattccattgttcccgtcattctggaaggcgattctgccggcgtgtccttgggcggcgttctggaccagaccattcacgaactggcgattatctgccaggtgaaggatctgccggaagccattaccgctgacatctccggtttgaaactgggtgaaagcctgcgcattgccgatctcaaactcccctccggcgtaaccacggaactggccggcgatgtgattgtggctattgtggaagctccccgtgtttccggcgaggaagcggctccggctaccgaagaagctgttgccgagaaataagtttgatacgcctgtttcttcttttaccgggtccggagccgtttttgcggctccgggcttttttttgtcgccaacagggcatcttttggtaaagtgcaggatacgtatttgcctgatcaatctggaaaaagccttagatttatgaacaagtccctcatattggtgttgaccgcattcgttccgcttgcagctgcagatgaagtaaaactcaaggatggaaccgtttacaaaaattgcacggtagaagtggaaacgccggaaagcgtcagcctcctggttcccgtgtccggaggtatcaaggattccgtaaccgtgaagagggatttgattgaatccatcaggaaggcgactccggatgaactggaggctgcccgaatcagcaaaatgtatgccaaaccggaaaccatgaatgccggggatttggaaaaagccttggcggacctggacaagaccattaagaaaaatccccagggccttgctcatgacgccgccgtcaaggcaagagccagagtagtggttttgctggaggaaaggaaattgacggaggaagcccaggccgcccagaatgccagggaggaggcggaagtgaccgtgcgcaccaaatacgaccatgaggccaataagctgctgaagcgtttcaaggcgcttgccgtgcgcaatccataccaggccatggccgtgtatgaccgcttgcgcgacggttatcccggttccgccgccttggcggatgcctatccggatgccgccagaatcgccggacagctcaaccgtaagctggaggtcatgatcgccgccaaggaaaagtccttggagaaggaacgtgaagccctgagaaaggaggaagagaagcgccggggaaatcccaaactgaccaaggaacagcgccaggtgttgatggatgctttccagaaaaggcagactgccatccgggaacgtgaaaaccagctcacggaagtgtaccgggctttgcgcaagaaggtcaaggaacgcggggaccgatggtttgaacctacggcaggttctttggaagccatgagagaccttaagctggtagccgctacggatgcggaacgcttaaaaaaacaggagccggaaaacggagccggttccgctgcgctggaaaaggcctggaatctgtgtgacgagaaaaaatttgacgaagctatggaggttctgacggagctccggaccgcccaggttcccagggaatactatgaggaactgacggaaacggtgcgcgtggggttgcgggaacagcgcgcccgtgaacgcgccgaacgtgcggaagcggcgcgcaaagcccgtgaagaccgggataagaagcgccaggaggaaagagaggcggccgccaaggccaaaaagaaataattctgccgttttccggagaaaactctccggagagatatggcggaaatggcgtttacggatggggtggatcaagtatgtgttgattccatcctgcccgtcaggctttccggccgttgatttcgcgcaattcgttgtcagagattcctgaggtttttctgtcggagcggggccggaggcgtgttcctttgacggtctgcatgtttttgcggggagaagagggcaaatctttccccatgcgatatttcctgctttcttccgccgcgtcttcagtatagaagtgttgcatgaggaacgcttcttgcaaacgggtcacgggtgaaacggacatcagcatggaactgaacctggacggcacgggatgcgccgccgtcgcaacggggcatgcgttttttgaccatatgctggatttactggcccgccattccctgatggacctgacccttcaggcccgcggagacctggaagtagacgcccaccacacggtagaggatgtgggaatcgttctgggggaatgcattaaaaatgcactgggggacaaaaagggcattgttcgctacggctgttcctacctgcccatggatgaaactcttacgcgcgtggtgatggatttgagcaaccgtccgtatgtagctttccgtattccggaaggcggtttgccggatgcccccaactttccgctgaccctttgcgaggaattctgccgtgcgctggccaataacctgcgttgcaacctgcatgtggaagtgctttacggcagggatggtcaccacattgcggaatctgtcttcaagggcatcgcccacgcgttgcggcaggctgcggcgattgatccccgagccgccgggacgctgccttcaaccaagggaatgctgtaaaatacatgaaacttggcgtgattgattacggtgcgggcaatctccgcagtgtgctgaacacctttgaggccgccggcgtgaccggtcatctggtgcgtactccggaagatgcggcgggcgtaacccatttggttcttcccggcgtgggcgccttcggcgactgtgcagaaaagctgcgccgccagaatctggtgcccctgatccgggtatggatagagcgggacaggccttttctgggcatctgcgtgggctatcaggttctttttgaaagcggggaagaaagcgggcaggttcccggactgggtatcctcaaggggcgcgtggttcggttttcagaatcggaactcaaggtgcctcacatggggtggaacagcgtggctctcactgatcccgccgatcccatctggaaaggcatggggaaggaaccgtacttttatttcgtgcattcctattatccccagccggaggatgaatccctgattgccgctttctgcacctacggcgtgcgttttgctgccgctgtcaggcacggcaatctggtcgccacccagttccacccggaaaaaagccagaaactgggcgtgaaactgctgaaaaactttatttccctgtgagccggaaattgccggctcacagactgccgctcttcttcctgacagcaaggggcaaggaggagcggcgaatcaaatgaaacgtcattctcgaaaagcagccttattaaaaagacgccgggattaatttcattgaaacccttcggacggcacctccgtagaccttcatggctcagtttttccctgtatggaaaatagccagggcaagaggagtggcaaatttatttcttactgccggttctggtcaatattgcttagggggcggggaatatttgttgagcggggggcagagggggggaagggatggtaatctataaaaaaagaaccgccccttcacggagacggttctttttgataagaaagcaaggagcggatatttcgtccgcatgggccggattttagccgagcaccttgtaatactgaaggtgaatctggggattcaggcgaaggcgttcgcggatgggcctgatggcggaaggttccgcagagaacgtgtaggtcacatactgcccggcggaaaggtggttggattcgtaggcgaattcgcggcggccggcgttttccgtggcggtgatgtcggcgccttcttccttcatcgcggcggctacggtgctgatcaactcctcgacgggagtttccgtacccttcatgttgaatacgataagagcttcgtaatttctcatggtcttgtgataattagaaatgtgtcgtgcgaacggtgcgcaccttgcgggcaagtaaggtgcaatgattgccttcagaaagcaagcctattttttaccttgtttccgggaacatgccgtttcctgcgttttactctccccacggcgcggaagaattgttctgcatggcgtttcctgccgttgtccttagcggaggagggcgggatttccggtgaggaatccggaaaagcggcagatagaggcggcggagagtttttccgggctttctgtcctgccgcctgaacaatggtgccggttccaaaaaaggatcatgacaaggaggccttggaactttacgccgcagatgaattaacgatgcgttattttttggaatcaggaagaaggagaaagggcttctccctgatggggtgatattccggtactgggattcacccccggaacgggatggtgcaggtatggcgggaaaaattccggaaagaagaaaaacgttaacgcctccgcgccatctgtacggccagctggaaggcgtggatggtgctggacggattggcttttccggttcccgccaggttgaaggcggtaccatgatccgggctcagccgggggcggggaaggcccagggtgacgttgacggcggtatggaagtccaccagcttcagcggaatcaacccctggtcatggtaaggggccagcacggcgtcatagtttccttccacggcatcccggtacacgcagtccgggacggaaggcccgtcaaatgcagcatccggatggatcgccctcagccgttccacggccggggcaatgatgttcccgtcctcatcgccgaaagcgccgtgttccccggcgtgggggttcagggctgccagggcgatacgcgggcgcatgattcctttgcggatgcagaagtctttcagcagggttccgatgcggaccagttcctctgtttccagcagggaaggcacgctttggagggaagtatgaatggttgccagccccaccgtcaaccgtttcccggtcaggcacatggcgtaattgtccgttttcaggcgttctgcaaagaattccgtctgccccggccagcggaaacctgcctcatgcagggtttccttgcagacgggggcggtgacaacagcgtcaaccgttccttcccgcagggcatgggccgcctgttccagatggtcgaaggcgtgtttggcggattccgcattaggccttcccgggggaagctccactctcttgccgatgaggaggtactctgcgtcttccgggagttctccggaggcaagcgcggcggagatgacttccgggcctatgcccgactggtcgcccagcgtgtatccaatgaccggtttcatagtgcggcaacaggagggattacaattccgcgggttccggcattccggcaggggaagcgggaatttcttccgcgggggaaacaggagttttttctgccggaacagcctgcagggctgccgcccgtttttccatgttgatgacctgtgtcgttttttccggttcgtcggggttgcggagttcgaattccaggtgggagttggtggaccaatggtaataaatggtggcgccgagggctgccagcaccagaatcaggagaatggaaccgaagaaggagcgcatgcctctactgtgtcccggaggaggggggaattcaagaaattatcaagaccgcctgcgtgggcgggcaaacgccgttaactgccgtgtatcttcatttcctggaagaggaaagaagggtaagtaaaaagaggcagcccggcatgagaagatccgggacagttcaggacaggattttcatcgcgaggaacaggagcatgagcaggatggcaaagccgatgattctgcccgccatgctgccgtctttcccgtcctggatgcacatggggcagttttccgggccgttcatgccgctgcatcccatgccgcacgcgccgcagggaaaatccgcctcccgctcctgtactcggtcttggagaaggagttccagctcgcgcacggaaggctccacgccgtagacgacgatttccccgtcaatggcgagtgcgggaagcggcgtcccaatttgttccggaacggtctcttcagcctgcacctccggattgacgcccagatgggccaatgcctggagggtattggcacgcagggcgtttcccgggtaggcccggctgtaaaaaagctgaatcctggtcatggaactgggtgtgtcaggaacgcttccgtttgggaagactcttcttccaacaaataggacggggctccaaaggtcaatgcgtttttccgtgtcatgacatataagtgttgtacggaaaacattttagacttttcaaatgaggagggaacgggcactatcccgccggtcccgccatgaaaaagctatctctattccttttgaccctggcctgtgtattccagttttccgcccaggcacaggaacggcccagttacattgccattgaggccaattccggcaagcttcttttcagttccaacgcagaagaaaaaaggcccgtggccagtctttcccaggtagccaccgccatggtggctttggactgggtggcccgcacgcggttgccgctggacactttcattgccgtgccccaggaagcgttcggcctccgtgcgggcaatcccatggatctccagccgggagaccgcctgacgctccgggacgctttgtattccaccctgctgggttcggacaatgtttccgccctgactgttgcctcctttgtggggcgtgacctggtgtcccgccggggcggcggcgcccccattgccgcttttgtggcggaaatgaacaatttggcccgttccctgaggatggccaaaacgcgctttaccgctccccacgggctggacgccggcaactccgtttccacttcctgcgcgctggatatggccttgttgggcgtttacagcatgcaaaatccggctttttgctacattgtttcccaggcgagccggcgcattgaagtgcagtcccagaccaagggcaggacgatgtacgatatttccaacaacaacaggctcatgagcgcttccggcgtggacggcatcaaggcgggcacttcccgcgccgccggcccctgcctgctgctcagcgtgacgcgcaacgctatttcccgccggagcccccagacggggacggaggtgatttatccgcagcgcatgattattgcggtgcttggttctgcgagccgctattccctcgccagggagatgatgaacaccggctggcgcgtttgggaaaactggcaggcttccggcatggacatgaaggaccccaaggaatttgtccagcttcctgtgaaatctgctccacaaaggagataggaagtagacggggaaggatttttctgctataagaaacgccgaatatgaacatcggtgttttgaatagcgggggtgactcccccgggttgaatgcagttattgaaggtgttgtgggcgcggcttcccgtcgcggctggaacgttgtgggtttttacgacggttttgaagggcttttgtccgaggaaggggacgaacggtttgaatggctgacccctgccgcctgccgcggattgcgagccaaggggggcaccattctgggaaccgtgaataaaggaaacttcgccatcaaagtaggcgtggaccaaaagggggcgattgaacccgcggtgctggaaaaaacgaaggttactgtccgccggctggggctggatgccctgatcgttgtgggcggagacggctcccagtccacggctcttttgctttccgagatagggctccccgtagttggcgtgccaaaaaccattgataatgacctgggcgcgaccgatgtcacttttggcttctacagcgccgtttccattgtttccgagtctttggatcgtctggaaaccaccgcgaacgcgcaccagcgcatgatggtggtggaagtgatgggacggcatgcgggatggattgccttggaaggcggcatcgcagggagtgctgatgttattcttctgccggaaattcctttttcccttgaaaacgtggtggaatgcatcaaggcgcgcaaggctgccgggcagcgggaaatcctggtggtggtatctgaaggggcccgtctggcggacgaactggtattgctggatgaaaagacccagggggaagttcgcctgggaggcatcggcaaggtgattgccaagaaactggaagaagccactggggttgaaacccgctcctgcgtgctgggccatatccagcgtggcggttctccctgttcctatgaccggattctgggaacgcggttcggcagttatgccgtggaactggtggaaaagcgccagttcagctgcatggttgctctccgtgggacgcagatgactgccgtacccattgaggaagctgtgaaaaccttgaagctggtggatcccgattgccagctggtgcgcacggcccgcgatttgggcgtatgcttcggggactgacgtcctccgtctgcgtcaggggaaattgattgtacccgatagggttttgattgcctttcaaccgtatcctggaatcaggatacggttattttttgcggaagcacgccgtattcattggggcctggcgagcttttaagaagcatcatggacaggaagaggatggaaagcagatccatcaggctggacaccattcccaggtagtccagatagggggccatatcctccgggaccaggcgcagcaggaaaatcagcaggaaagtgacgatgaaaataagaatgggaatcaggatgaattttccgctcagattgctgtcatgcaggcggcggacggcgaccggcagattgaagaggatattgagccctgccacggctgccagaagctccagggaaagcatgctcagctctccggattggtagaaaaagtaaaaggtgggattgaagcaggagtgagccagcaggatcagagcatcttgcggatgggcggcatataacaggatttggagggaaggagagacataaaaacccgccggctggctgtcaacgtctatcatgctgtagcccagcggaaggaacaggaggacggaaaggaggaaaaaggaccagaattccgtccgggacgcgcggcctgccaccgtattcaatttccgcaggctgatgagccagtaaaggtaaaacggagtcaatggctgctctttcagttctccggcagggggatcagccggttggggctccggacggcggctgtatttgttgccgtccgccttgctttctcccagcgtcagataaaaaaagatcagatgccccagcccgaagggaatgaaaagggaaaaaagccagaggccgctcctgcctgtatcatgcaggcgtctgaacgcggctgatatgcttgggatgaataacaccgcccacaggaggatggttaaggcgtctccgtagatgctcagtcttgtatcagggatgtgcagccagtccgtcaggatataccccgccagggctggaatcagcgccaggaggggaagagccatgaaccaccagaattccgcacgggaagcgcagccccgaaagtccgcataatgaagaaaaccttttttccagcaggagaggggggaaaggagggaagatgcctgcgtggaggttggaggaacggaggaaacagcaggagaagcaggagaagcaggagaagcaggagattccggcatggatgaaaagggggtttccgtttagactccctgatgccggggaatgctcaatgcgtctgtgcccaggacatggaaagttccctcctgcagccggttcagatcaggacaatcgccatcagcagcattccggcgatgatgcccatgatggaaatgtgatggtgtccccagcgttccgccatgggcagcagctcgtcaaaggagatgaagaccatgattcccgcgacggaggcaaagagaaccgcaagtacggtaggtgtgaggaagtggaacaggaagaacatggcgatggccgcgcccaccggttccgccagaccggagagaaaggaataaaagagggcctttttacggctgcccgtaccgtagtaaagaggtaccgccacggcgattccttccggaatgttatggacggctacggccagggcgatggaggtgcccaaagtcagggagtccaatccggcggcaaaggtggcgattccttccgggaaattgtggatgccgatggccagggcgaacagaatgccggaccttttaattcgggatgaggaaaattcaccgctggcctgtccatggatgtcttccgggccgcgcgcttcgtgcgggttttcgtcttccggaaccaggtaatcaatcagagccgccacggcaattcccccgaagaaggaagcaatggcgatccaggaacctgccgtatggccttcgaactctatcaacctgtgctgggcttctcccagcagttccaccagggagatatacaccatgactccgccggataatcccagggcaaaagtaagtgcctttgtatccgtccttttcatgaagaaggcgatgaagcctcctatgccggtagcaagaccagccagcgtggtgagcaggaagacaacgaggatgtgatcggcggaaaggtccatgcgtgcacctgccgggcagggatgaccccggcagtaaagaaaggggtgtattattttgcgggagccgtgggaacgatcatcttcgtggcccggatggcgccggggggaagggggggctcttcccccggcttcaggaggccccgttccttcttgatttcaggcagcttgtccagaagtttgctgaacgcttttccttcaaaactttttgggaggagcgcaacgccttctttgagaggctgttccaattcattgaccctgttttgctgcatgagcaggtacactttttgcatgagaacagcttgtttgacttccggaagaagcccgttctttttcaagtagctgtccatgatggaaagcgcttcatcaggattttgatccgccagaatgtggatgtttttcttccggaacgtatcggcccattccaatttctgggcatggagcagatcgtccctgtgcagtttggcgagaatcccggaagcgtcctgcgggtccagtttttccagttctgccagagccggcttatagaaagtgcggatgctggattggggaaccgttttcagcaattgaaccagcgtgtcccgccgctgctggtcagtgagcttttccgccagcttgtttgtcagggactgctgcgtgttgagtgcttccgccgctttttttgtatcctgcatgacctgggcaggattggcgtaacctacgacggtgtggacgggccgcccctgggcatccgcaaacaccagcgtggggaatccggtgatgccgtaggattttttataggtttccagagaagtttttgtctgcgcgtcctgctgctttttacgtgggtagtccagttccacgggaataaaggaacgggaaatggctgtctggatttcaggaagggaaagagcctgctttttctgcatgatgcaggctccgcaccagtcggaaccggtgaattccagcattactcccttattctgtgcggcggcttgctgcatggcttccgcagggctggtactccatgtttcggaggcgccggcactccaggcgaggagtatggctgcgaggggatgtatgattgttttcatggcaggaatgtcattattgcatggggggaagcggagaatgggcggggggaacccacatgtttccggaagaggagctgccggaatctccggtatgggtaggtgtttcaattttcggttttccggcgggcgggtccagattttccaccaccactttctttttggcgggctggggcacgggggcggcagccggggccggtgagggcgccctgcggataacgggggatttgagggaagcatccgtctggttcatggccgtaatattcagcgggtcgccgtaggccagcatttcccggatgtcgtcaggaagatctccggcaggaatggaggtgcttccctgttcgtgcatgatacgcacgaattcattttccacgcgggtgatttccacattcaaataagttttgcctgaatgggatgtcttcagaatgtcgaacttgcggccgcgtgccttggctctggcgtgttggcggtagcgttcgaagtaggagcggatttctccccggatgccggctacgcgcattttctctttctcaatggatttttgcgtctcttccaggtcggaggccgtatgttcaaagatatccaaaaggctgagcagctgttccttgggagcggtcctgttccgtatttccctgagctgttcctgcttcttcagcagctgggcatgattgtcctccaaagcttcccgagcatctttgacagggtctggaagctgggaaaatttttcataaacaatatagccggcactgatgacgataagggcgaacagccccaggcagaggttccagaaaagagcgtctcccctggctttccgttcggaatcctcctgccgggcggattcttcttccgcagcgtgttccgagacgacgtccagggaggttttcagacgttttttggctgcgggggcggagttttcatccttatgttctcctccattctccttcggagcaaagcgggtttcgtcttccgcaggggggagagtttcgccggacggctgtctgggagcgggggcgtcggtcatgggatgcgcgggaatggaggttagtctaccgggtgggtttgtttgaattcagccagtttggccgcatacgcgttatattgatattgcagggcatggaattcctgcttgcgctgcgccagcgttttgcgcatgtcttcaatgtcaaagcacaggtgctcaaagtcgcggcgtttggaaggcaggacatctatatccttcaccgtgaagggcgtcgtgattcttcccgggttggaaagccttttctgaagattgtaattaacgcgggcatcgtgggattccgcctggcttatttcctgttccgtctgggccagtgcgtttttcatttgctggagctgggcctggagctgctggtgttcctgggatgaattccccgtcaggaaggaggtcagggcttcattcgtactgctgtcacacgaagtaagggccagcgtgagggccaatgccggacaggtacgcctggtgaatctcacgatgttgaacatgccggggattatgaaccttaacggaggggaaagtcaaactgttcatgcgccctccggaacaatgatttttctcgcataaaacgcgtatgcggctacaatgcccgcggcatgatgcaattatcggagatcggaggacatctgacggccagaacgggtattgatgatttgatggaggatttgttcaaggccctccattcgggagacgccggcctgtgccagttgaacggcgggagccccgccgttattcctgaagtgacggaactttggcggcgcagcatggaggaactggtgcgaaatggcaaatttgacgtgctggtgggccattatgcccatccgggcggggatcctgcctttatccgtgccctggtgcgttttctcaatgaacgttgcggatggaacctgacgccggaaaatgtggcgattacccagggcggtcagatggcctgctttacactgttcaacatgctggcgggcccgtgcccggacggtgctgtgcgtgaaatcctttttcccctgtgcccggattatgtgggataccagtcccaatccctgtgcggcggcgtcatgtttcggggcatccggcccggcatccgcatgctggacgggcacacgttcaagtacgtgattgattttgaccgtctggacatacgtccggaaacggccgccgtctgcatgtcccggcctacgaatcccaccgggaacgtggtgacggatgaggaattggggcttctgcgggaaatgacttcccgcgccggggttcccctgatgattgacaatgcttacgggcctccgttgcccaatatttgttttgtgcccgtaaccccggcctgggatgagaacatgatcctgaccatgagcctgtccaagatcgggttgcccggaacgcgcaccggcattgtcattgcgcgcccggatatcattcgtgccgtcgtgagcatggtgaccacgtcatccctgtgcccgaacaatctgggccaggctctggtgacgccctatctggaagacggcactctggagagagtctgccgtgaaaccctcacgccgttttaccgtggccgggcggaattcgccctgtccctgctgccggaacttttcggagaatccatcccctggcgcgttcataagagtgagggcgccatgttcctgtggctgtggtttgagggattgcccatcacgtgccaggagctttacgaacggtgcaagtcacggggctgttttgtaaatcccggccatcactttttcttcgcccttccggaggagggggaaccctggccgcaccgtcatgaatgcatccgcatcagcttcacccagacggaggaactcctgcgcaaggggctttccatcgtggcggatgaagtgcgcaaggcctactcccgttcttaatccaaacctgacccgtatccatgaacagcatgaccggtttcggcagagacgccgcccagacagaccgttataatatccttgttgaaatatcaggcgtaaaccgcaaacaaacggaaatcgccgtcaatgtgccgcgcggctatgcggaatgggacgcctccgtgcgttccatcgtgcagggggctgtttcccgcggccgtgtaggcgtctccatttctgtggagcgtctggaggaagcggatggctccctccagcttgatgagcagaaactggcctccttggcggagctgctgaaccgtgcgtctgacctgacaggtcaaccgttgcccctccaggcgtccgacctgctgaggctggatatcgttacttccgcagcggaagcatccctttctccggaagaagcgtggccgatggtggaaaaggcgctcaaagccgccttgaaggattttatttccatgcgtgcggcggaaggtgccaacctgaaagcggacgttcttggcaagctggatgtcttggagcaattccgcctccgtatcgcggaacatgccccttccgtgcctgtcaggcttcgggaggccatgctcaagcgcttggctgatgccgacttgtccgtttccgcggacgatgaacgcatcatccgggaagtggccctgtttgcggacaagtgcgacatttccgaggaaattacccgtctctcttcccattttgaccagttccgcaccttgtgcggttcctccgctcccgcgggcaggcctctggatttcctttgccaggaaatcttccgggaattcaacaccatcggctccaaggcgaacgattccacgctggcccatctggttgtggctgccaagacggagctggagaaaatcagggaacaggttcagaacatcgaatgacagccatgaaacagccattgggaacattgctggtggtatccgggccttccggttccgggaagacgacgttgtgccgccgcgcgacggaaaacggtctgtgtgtgtacagcatttcctgcacgacgcgccagcccagacccggggaagtcaatggagtagattaccatttcctgactcccgccgaatttgacgccagggtggagcggggagactttctggaatatgcggaggtgcacggcaaccgctacggtacgctgaaagcggatattttgactcttctggaacaggggaaaaacgtggtgatggatattgacgtgcagggggctgggcaagtccgttcctgccgggagggcattctacccctctgctatgtggacgtttacatttatgtgccgcaggcggagcttaaaaaccgcctttgcggacggcagacggatggcgctgaaaccattgccctgcgtcttcgcaatgcggaacaggaagacgcctgcctgccgcagtaccagtactgcctggtttcctccgaccgcgagacggattatgcttccttttgcgccctgctcaaatgccagtccatgcgggtgggactgatgcggtgataaggtcttgcctgtttatcgagagactgcgttctctcgtttcgtcccccgtcacatggcatccgggatggcggctccggttccgagacatttggaattggttttcttcccgtgcctatatggtatgtgattccctttcctctgatccggcctgcgtgaaaaaacgcgggttgaaattcttgacgggcaggatactcataggctctttgaataattcaatgttgaaattatcctccaggcaaaggtgtcccggtaggtcagatactgccccgtttccttgtatccgttaattgcctttttgactaaaatgtttgactgtcagttgaacgtggatggatgaaactactgtttcccgttgttctcttcttaaggagaaggataatgtaaaataggagccctgcttttagacgaaacagggatattgttttttgttcccgtgggaatgatggcgcctttgaccgggtgcttggtttcctttccgttgaccgggccttccaaagctattatcgctctacttgagcggatacaaccagccgatggcgcaggtaaaaatgacccagaggagcaggttgagggggagtcccactttgacgaagtccttaaatttgtaaccgcccgcattgtacacgtaagtgttggtctggtagccgatgggggtggagaagctggcgctggcgccgaacatgacagccagaatgaagggaatggggttggcgtcgaattgcagggccatttcataagccagaggccccatgacggccgctacggcattgttggagatcatctccgtcaggatagagcagatcaggtacaggccggagatggcgaccaggcaccccaacgggcctatattatccactacgccgaaagcaatggctttggcaagcccggttttgctcatggcttctcccacgcacagcattcccagaatcagaaaaataatgccccagtccaccgcctggtaggcttccttcggcttgatgcagccggagatgatgacgatgagagctccgatgtaggcgagatagaagggattgaagcgcgcgaagaatttgaagaattccccgtattgctcaaaggagcccagcaggccgataaaaatgaacagccccatggccaggatggcccagccctgtttgctgcggttgtgcgcttccgcaggacgctggctcagggggatgatgcgctgcttggtcaggatgcggttcattccttcctgcggtccttccagaagaagcgtgtcccctgccgccagcttggtgttcggccccatgtccgtgatgtttttgccctgcctgtggatggcgagcacgaagatgttgaatctctggcgcagcttgagttcggacagggacagcccggcgaattcggaattgttggcgatcatgccttccacgatttgcacatcgcgctgctccagcgtttccagcccgcggctgtcatcccagcccaggtccacgcctttggcttccctcacctggttgacttttctggcgttgcacaggaaaagaatgcggtctccttcttccaggttgatgtgctgcagctcttcctgcatggagaatcccctgcggcgaacttccacgattttggtgcccagcaactcggtttgcatcaggttgatgggagtggtgccgatgtggggggaatccgcgggaattctgacctggagcaggaaatcgcgctggatgccgcccggaagcatggtggacaaagtggggcgggatggaagccatttgcggcctaatgtccagaggtagagcaggcccgccgccgcataaatcaggcccatgggcgttaccgtgaacatctggatgccgtcataacccagtttctgcacctggccgagcacaactacgttggtggatgttccgaccacggagcaggtgcctcccagaatggtggcgtaggagagggggatgagcagcttggaggccgcgatgttatgatccctgcagaaggccagcacgatgggcatcaggatgacgaccaccggggtgttgttgacgaagggggaaaccatgaacgctcccagtgtaatgaccagcagggcggtcagttccctccccttggctaccttgttgaacagtttggaaaggtctcctattaatcccgttctttccagggaagcactcagaatgaacatgcacaccactgtcagcggtccgctgttggcaaagctggacagcacatcacgcgtgctcagaattcccgtgagcatgaggacggcggtgcctgtcagggctgtgatttccacgggcatccattccttgatgaagctgatgaataacaggaccagcagaatgcctacaatccattgctgggcggccgctgattccagccagcctatgacggaggcggagttgatgttgagaagaggaagcatggtttgaaagttgaaggtgtggggaaagggttcaactctcctactttcccggcttctatctgtcaagccgcaataattttccggaaagggtttgaaaaggttcctgcgcttttttattgttggtgcgccgcatggattcccccataataacaaggtttgctcccagccctacaggcaatctccatctggggcacgccctggctgcgtgggaagcccgttccctggcgaaccgtttttccgggaagtgcgtgctgaggatggaagatatcgaccagacgcggtgccgtccggagtttgttcagggcatattgaaagatctggagtggctgggcatccgctttgacggtcccatgatggttcagtcttcacgcttcagcgcttatgaacacgctcttcagacgctgaaggaccggggcgtgctgtacccctgtttctgtacgcgccgggagattgcggaggaggtggccgccatgggtggggcgccgcaggggggctgcgtggacgtatatccgggaacttgccggctgcttgacaaggggcgcaggaaagagcttctcaaatccggcaaacctttttcctggcggctggattgccgtgctgcggcgcggattaccggtcccctgctatggagggacatgcggttcggagatcaggtttgccgtccagaagaactgggggatgtgattctgggccgcaaggactgcgccgccagctaccatattgccgtggttgtggacgacgctgcccagggagttacccatgtaagccgtggtgaggatttattccctgtgacgggcatccaccggacgctccaggccctgttggggcttcctgttccgcagtggtatcatcaccggctggtgaaggatgcttccggcaagcggcttgccaagagggacaggagcctgagccttcaggaaatgcgtgccgccgggatgcggccggaagacgtgttccgactgatgcgggagagctgagggattttcattcccttataggcgggggggcgttgttccgccgggaaaggcaggggtcaggctgtggcttgcgtttttccagcagccggtcggatggttttctttccgatgcagagcaggcatgcataagccgccgccagggtcagcaggagaagggagctcaggatggccagcagattcagatgccccagcgggatgagccatgcgtgcggcatggctgccgttcctgccagtatctggggaagccagatgaaagccgcctgggaaaacaggctgacggctgtgaaggccagccccgcggccagggtgagccataccgccggaagtaccggcaggaatgtttcatggatgttttttttcatggcccgtgccgttcctgcgaatatggaaacgagaaacaggggggccagcaatgcggcggcagggagggtgtcccaaaggagccatgtgcagaggggggaaacggccgtcaggaggcccgtgctcttaatcaggaggccccggggcggcggggctggtgccgcggcgtggttcatatatccgttaatcgggccagacattgccgggcgtgcttccctgggtaatgacgacttcctggcctattttcagggtgaagtttggcgttacttcctgctgtacttccacaagttcgttcgtatccttgagcttgacgcgcacgcggatcattttgacggcttccaccctgccgtccacgatggagcctgtggcggaagccagttttgaggtccccatgccgatgatgccgggagtcatggcctccgccgccgttccggccatgttggcaaaggtgccgtcgtccgtggaggtaaggacgttgatttccttgatgcggaccacgttgcccagcttgatggtcgtcactttgccggtggcgatttccagattgcttttttgggtgcaggagaaaaggacagggagaataagaaaagcgggaatgaatggaagcggattcatgatgaacgtagttaactacgctggcggggttaagcgtttttcagcgtgtgggaagaattgtgtaggtagccagatacaggagcaaatggagggaggagagtgccagtaccctgttcatgcggctgtccgcgggcgttttgcggattaggagcatcagatacccgccgaagaggatggagggtatccacatccaccacgtatgggacaggttcaggtgaagggcccggctggatgtgggcagcgtgatgtaggcagccaggatgaaagactgggccatggcgcgcgcctttccttcccccagccgcacggccagcgtgtgcttgcccgtagtgaggtcttcctttctgtcgcggatattgttgacggatatcatgacggcgcacaggaggccgcattgaatgcctgttacgatgccggcattgtacaccgcaagcgattccaccagcgtgccgggcacgacgggtgccgtgcctatctgcaccagaatggttcccagtacggcaaccagtccgaagaagaggatgacgaatatttcccccaggcccttgtaggccagcggccacggccctcccgtatagccataggtgaaatagagggacgggatgccgatggcgaggatgggccagccgcgcagttcgataaggggaaaggccagaaggcacgctcccagcaggaagaagaggccgatgagcatgactgttctgtgggagagggctccgctggccgtcatgcgcacgggcccgatccgccgttccgtatcggcgtgcttggcatggtcaatggcgtcattgaaaaaattgcaggcaatctggaggcacaggcaggaagtcagtgtcaggagggccagggacgcattccagctgccggtcagtttctgcaccaccatgcagcctgcccataccggaatcagggaggcggtgagcgtcttggggcgtgccgccagaaaggcggaagtaataatattcatgtgagggaaggctccgtaatcagcggaggatggggccgaggcggcggagggtttccttaatgagtgagacgtgccattgcccgggggccgtttcctcttctcccaggtagccatataccaggcaggaacccagttgagagtaaagcaggcgggagacgggtcccatgggccccattcccatgacggcgatcggccccttgggcttggtgaaaagctgtactcctgtctggatgtccgaggccaggcagggcgtgaatgcaaatttgacgatatccgccttgtaggagcgcgcctttttttcctgttcgcgcaggtaatccacacccggagtgatttggaaatcatgggtggagccgatgatgatgacgtcccgctcccgcgcttccataaccagttccctggcgtggcgcatggccttgatttcaatgtccatggcggcggcatatggcatataggcccggagcagggcaaagcgctcttcttccgggatgcggcgcagccctccttcctcatggcagcgcacggtgaccagcaggggcatctccggccggaactccataacctgttcagtcgtgagttccgggggaagggcatccaggcgcagttctactagatcgcactggtctgttaaatcttttcctttcagcgttttccatagctcccacgaggtaacggacgcaacgattttcggcggataggcctgatgttcacgtacaatctgctgcatacatcctactatcccagcaaaggaaggaaggtcaatcttctattgatgagttccacttcattttggggccgagtatgtcagtttgcctgccttttccccttttggaactgtgtttttcttcctgtgccagccctgttgaccggtttcccggcagacggattgacggatgttggcgccggctgccgttcaagatgccggcagggctgtttcgtatgatccgtttccttgttgtggcggagggcgttattttcctgcctctgcacgttaaaaacatgttgagaatggaggtccggcttgaaaagggagttcggatggagctaggtgaaggccatgaatatgctttggtcaaggttattgcggatggggcggaatcccttttgggcggctttggatgccgtgctggtggtaaggacggaaaaagattcgtccggacatccggaatggccctggaaggcgtatgtcccgcatggcgttccggtttatgaattgcctccggtgcccgttcctcttccggaaggggattgggataaggagcggtttcgtaaggaaagacggaaagctgcccgggtgttgggtcaccaggccgctttaacgctggcttcttccttccatttctcccgtttcatgattgtggaggaagagtgccgtttcaggctgccggtaataggttccacggcgcggatgcttgggcagctgctgaaaggctgccgggaaagaactgctctgtttttaagtgagccgcgtttgtctccccatacggcctgctccgtggcgaaaggagaaaaatccatcctgctgcgcgtaacggatatggcggcatcagctgcgtatgtgatgaatctttccttatgtgaacgcattcttttatctcttccgtcagatcagagggtctggccatggctgaggtattatggttctctggaggaatggtttgcccggtatctgggacgttatggtgatttgtatgctctttcccctgcgttcgtttcctgcggagagggcgctcccatgcccgccctttgcaaatccctgggccatttcaataatgcacgcaccaaatatacggatctgtcttatctggtgaatccggcggtcaattcatggcgctggctgaaaaacgtgaacattttttctggcagaaaaaggcttgggtgagaaccccgggatgcgttttgctccggcttcgccggattaccgtttgcgggggatgaacgtctgcatggctggggctgccgccttacggcagagcttgaaatagggtgttccgtgcgcccgtcatctcaaaagcaaaaccccggaccgcaggcggtccggggcggctccctttttccggagggaggatgccgtgatattagaggggttagctggctccttcgtcgcacaggatcttgacaaagccttcctcctggaggcgggtggcgccgcaggcgaacttggcccggatttgtagggcttcctccatatcgtcgcgcacggaaagcttcactttgaaatcattccatatgccaaactgggccttgctctttacccaggccaggcaggaacggactccctcttctgttttgggaagcctctgggtgcggataaatttgaatcccatgaaggtgtctattttcccttccaccagggcttttacattgttgaagtcataactgctgacctccgtttccctcagcagattcatgatctgggaactggttaccgcaatgacgagctggtctccgaactgcggggcatcctggttccaggcttcgttttcctcaaaaagctggagggctgcgcgcagcttggtcacggtaaggttgctggcggatttggtgccgctgtccacgtgatccacggctatttgctggctttccttgaatggaacggcggtcatgccgtcttctcccacgtagttcgtatccaggaagccggagatcatcacgtcgtccatgcggcggcctgctgcggcctggagaccttcaatcgtcttgctgacgggaaggtccatgtctcccaggcgggtggcgtcaaattcatcgtagccaatggctttggtgaacgtgcgcggccgcatggaccggcgtgtggtgggagcctcgttcaaaacggtctgccccacccgcgtggttttttccgtgaagtccagaatgccgaattgatccagaaatactaccttgccgctcaagtcgcgcatgacgctgacatatttgtccagccgggaggcgtgctgctggagcagggtgccccattttctggtgtattttacctgataattatcgctgatagttactgccatgattgcaaatataatgatagtttgaatgcaggaacggcaatttggattatcgggtccggaataaccggagcggccctgccgcaagcgggacgcggccatgtcccctgcgggattgcgggccggttccatccagcgctaacgtgtatggactacaaggcagaaaagcgcaccacggcagaatcgtgatgtgctgtaaaaggaatgaaaggctccgctttcccgctgttaaagaataattgcgtgcggccgtgtagcgtgatccgggccgaaaagggccagcatgcggcccgtttgccctttttccatgcggtaggagtaaaaacgcttggtatccgccgccgtgtccagcccggaatcatgaatctgttcttccggtacccccgcttcaatgagctgtgccttaatggccgtaggaatgtcttcctcataatgaggcgggcggatacagggggaaatgacggcaatcaggttggacggttccaccccaaggcattttttcatggacttgatagtgttggaaacgatgttgccggcggttcccgccttgcctgaatgaatcagggaacggtggcagttttccttgtcgtacaaccacacggcggcgcagtccgccacgtaaatggcaagcacgcagtcggaaactccggagcaaatcaggccgtccacgccttccacaggataattggagccgatgtcccccaccagggcaactttcgtgccgtgcacctgttcggcgcggcgcaggtctttccaccgccagcccagggcttccacttccgccttatggtacggttccagccgttccagcacggtttcgcggtctccggtgacgtctactcccggaattctctcaatgaattggacgatttctccgggataggactggataggcttcaagaatgctggcgtttccataattgatggatcaataaatgtcgttggggacatcttgtcgttttgtattacctagtcgagcaaaatttggtgtaaaatgtcacggacgccgcccggtgactgagaaaaggtttttttccgcctttccggagtgatatgagcaattcatgctgcgcaggtattctttactttccactttttttgcgggaatggccgccgtgtttttttcctttgctgcctccttggcccaggagacttctccggatgccgggcagctgctgaaaagggtacgccagggggcaactcttcaggaaaacaaggacattaaggggcaaatacgcaaacgcagcgtcaaaattcccttttccatgagtctgcgcggcaatctgatagccttccagtaccagctcaataatgtctggaacaggttcgacctgaaattcaaggaccgcggccaggatatcctttcctggaaggacgggaaagccggtgttttgccggttgcccagtatgcggtgcccattgcggggacggacgtaacgtacgaagatctttccatgcgctacctgtactggccccaggcaaaaattgtccgggatgatgcggcgagcaccgtcaaggggcgggattgctggattgtccagataccgaatcctaattccggggtggggcaatatgcctgggtgcgcgtctggattgataaggagaacggcgccatgtggcaggtggatggcattgaccgccgcggggagctggctaaaaggttcatgattgattccgtgatgaaattgaaggacggatcctggtttttcaaacggatgaaggtggaggtccgggatccttccaatccgcgcagaacggtctccgtcagctacgtagatatggacagcccggaatagccttccggttcccgttccattccccgcggagctttcggattattctttccggggcatgggggcggattccttttcatgccgcacggatggatgatttaggacgtgacaagaaggcgggatgggcgtaaatcctccaaaaacctgttatgaagaaacatttattccttgcatgtgccctggcgttcggcctgtccgcctgttcccagcaccaggagcagccggcggagtccggttctccggtgaaaacgaccatttctcccgtgactgctcctggaaaaaagccggaccggccggccgtgaaattgcctcccaagtccgttccggtgccttccgtaagcccgtcctataataatactcctctttccccgcgcattccgggggtaacggtcaaccgtgtggctgtgccggacaaggtggtggccctcacctttgatgacggtccccatggaacgctgacccccagggtgctggacatcctgcgcgacaataacgtcaagggtactttcttcatgcagggctgcaatgtgaaggctcatccccaggtagtgcgccgcatggtcaatgaggggcatgaagtaggcaaccatacatggaatcacgtttatctgagcaaagtgccccgcgaaaaagcggaatcccagctccagagcactaatgaagccattcgcaacgcctgcggcgttgtccccgtggtcatgcgcccccccggcggctatacgaatgcaggcgtggcgtcctgggcccgccagcgcttcggcttcaccacggtcatgtgggatgtggacacgaatgactggcgcaagcccggctcctccgtggtggccgcccgcgccgtgaacggcgccaaacccggctccatcattctggtgcatgacattcacgcttctacggtggcggcggtggacgccattgtgaagggattgaaaaaccgcggctatgaactggtgaccgtttccgaacttatcaggagaggacgtgccgccgccggccatgctccttccatgcccgcggctcctgctgttccggattcttctcctcttgccgttccctcgattgtggctcccgcggagcctgttcccgctccggcggagacggtggccggcatgtaatccccggtgtttttccttttcctttcaacccggtttccctgcggaaaccgggttattcattgcctttccggagcatttttcccaccgccccggaaaggaggctttccccttaacgggcacacgcacagaaggcttgacctgctggtgaatttctccacaatcctttgccgtattattcacacccaatccggattgaaatgtctatgaatctcctggcatctgccgatactctacccgcacctggcggaatgtccgctcctctcgccttcatctacgatctcttcaataaccctcttttcatcttcattggcggtctggtgttgctgggtgtgtttttctggtacctgggttccgaccaggacaaggtcaagcgcaatgccggaacgattttcattatcggcattgcgtctttttccctgttctccctcttccagcaggggttgaaatacggcattgacattgccgggggcgtctccttcacgttgagcgtggaaccgaatatcggagacgacggcaagcccattcccctgacggaccaggccatggaacaggcatgcgtgatcctgacggaccgccttaacagtaccggggccaatgacgtcattatccgcccgaagaaaaaagacaacctgaatcttatagaagttcaaatccccgctgcggatcctgccaagcgcgaggaaaccaaggccatcctgaccaaagtagccaagcttcagattctccctgtccacccgcgcaacaacgaactggtggcggaggggcgcattcgcgttcccggctacaggatgtatgaatataccttcaaaaacggcaagggtgaggacgtcacggaaaaaatattcctggaaaagcgtgaatcgctgacaggcagggatatcgtgcgcgccggagtggatctggcccgtcccggccacgtcaacgtcaccctgagcaacgaaggggcggacaagatgtataacctgacttcccgcatgcagctgggccacgaccgcatggccattgtgctggatgatgtggtcaagagcgcaccaacggtccaggccattctttcgaaaagttttgaaatcagcgggctggatgctcccggagaagctgaagccctgacgaaggtgctttccaacccccttaccaacaagctcaattttgagtccgccagtgaaatttccgcctctttggggcatacggccctccttcagggggaatacgctggcattacgggattgatcctctgtttcatcatgatgatcatctactaccgctttgccggtttggtggctatcatgggtctgacgatcaatgccctgcttcttctgggagccatgtctatcttcgggtttgagctgacgctgccgggtattgccggtattgtgctgactctgggcgtggcggtggactcgaacgtgttgatttatgaacgcctgcgggaagaaaaggaaatggggcgccccttccgcgtggctatccgcaactcctttgacaaggcgttctccgccatctttgactccaatatcacctcgctcattaccgccgtcatcctgtactggatggcaaccggcaccatcaaggggtttgccgtcacgttgacagtaggcgtcatcacttccatgattggggcgattctcgttacccgcgtcctgttctactgggcggataccgtcggcatgatgaaggatcttaaattcctcaacctcttcaagaaaaagacgaatatcgacttcatgagccagaaaatctggtcctgctctctttccgccattctgctgatgatatgcattgtatttggcgccgtaaagggcaaggattgcctgggcatggactttacgggcggttcttccatttcctatctggtgaacaagggtgacatctccttccgggaagtggaaggcgtggtcaacaagctgtccctgacccagaaggctacggtgcaggaggtggcggagtccacggacagcagcaaagtgaatattctgattaatttctccgaccatgcccaggacaaggaggctatcaccacggcattggacaaggcgtttccggttctggacaacgctccgttcagtgaagaaaccatcgggcagtccatggggtacgatacgctcattacttccgcatgggcccttttcttcggcattctgggaatcatggtttacctgacggtgcggtttgaatggaccttcgccattggtgcggtcatcgccctgacgcatgacgtcctgctggtgcttggcctggtgattctcagcggaacggagctgaatgttattcatattggcgcgttgttgacggtggcggggtactccatcaatgacaaaattatcgtatttgaccgcatccgcgaattcctccgcttctccgacccgaatgaaagcgcttcacaaatcatgaacgaagccattaaccagacgctttcccgtactattttgacctctctttccacgctggccgtgctggtgtgcctgtacttctttggaggtccttccatggaagacttcgcctggacgatttccgcaggcattttgattggtacgtactcctccatcttcatcgcttctccggcggctcttttcttctcccggaagcatgggttgcatgaagaagtcaaacaggccatgaaggccggagcctgaggtttggcgttgagccgttaaacctctgaccggggaaggctgaatgccttccccggtctgtttcttggaaagagagggaaggggaaaggctctgtatggaataacctccgtgttctttccccgtccgcctctttcgcttttcctgtttccaccatatgcggctacggcttccgcatggctcttctgtctcgcattcctccctcttttatttcaggcataagaaaaccccgcctgccgttaggcagacggggccgtatctctggtttcctgctatgtatttctgcgggtgagattattcatcatccccttcctcctgtgccggggcgggagggggaggcatgtcgttgttgccgcgggctgcctttctggcttccctgcgcgcatcaagagccttggaagcgtcagcgttgagctgggccatttcagcctcattcaattttccgtccttgtcggcgtcatacttttcttcaatcaggatccatccggcagccatgatcggggcgcggttggggtcaagctggggacggggaccgttagggcggttgccgcggaggccccggttaccgtcttcacggcgtccttcaccgcctctgcggccttccgatcctctgggagcgcgggggccttcagctctggggcctcccggacgcctcggatcgtccatgttgggcattctcggtcctttggggccaccgggaacggcatggtgcgggccgggctggccgtgatgagggggaatggactgcaattcttccggggagagcttcccgtcgccgtctttgtcaaattttttgatcatggcggcggcgtgggcttcctggcgggctttcatttcttccatgcgcttggcagcttccggatggttttttgcccaatcttcccgcatggctttcttttcctcgtcggaaagcttgccatcgccatccttatcgtacttcttaaaaatttcggctttcctggcttcctggcgggctttcatttcttccatgcgtttggcagcttccggatggtccttaagccattcttcctgcatagcctttctttcctccttggaaagcttgccgtccccatccttgtcaaatttcttcaggatggcggctttcttggcttcctgggccttcttgacgtcggcttgcagaacggctatttcctcgtcggaaagctttccgtccttgtcggtatcgtatttggccaataccagttcttctccgacaatcatgataccgggatcgattctcttcatctgaactcgttttggcccctggcggtctctgcctccggcatggtggcgatgacctccccttctttcaggggggggctgcatttcaggagcatcggaaggagcctccggagcgggaggcggcggagcgtcctgagcgaacgcggaacatgcggcgaaagccgcggcgataatcatttgcttggtcatatctttgaatggtgaggtttgatgcgtttcggaaaggagcgtgcgctgcggtgtttcaaacaggcggaaacgtctccctttgctaaaaggaacccctggaattcattccggttgcaaaataaaaaggcaaatgcgtcggagagggggtgcgccgctgtttttatgacacctgttttcttccggggtaaagaagggtgaacccattgaatatgaaggaaatcagtgagggaatacagcaattgggcgcgagcgcgtgccgcccgtgtcatagcggaaaaaattattcgccggaaataaagcggatgtaggcctgccaccactggctgccgcccagcagccagatcagagcggcgctgagaagagcggggccaaaggggaggtttctgccgaaccccatgcgtgaggcggcagcctgtacaatccccagcagggagccgaggaaaaggctgaacagggcgccctgccagccgcccgcgcatccggccatcatcagaatccaggcgtcgcctgatcccatggcttccctgctggcatggatatccgtcagatttccctccacgctttccagtctttccagaagaaaaacgtccccgttttccatctctatcctgtcgtaccgcagcgtgacggagcaggcagggtgcgttttgccgtcaatggtgacggaacctccggaaaggacggccttgtccgtagaccggtggaaaagcatggaccagtcgtgaggctggccgttgacgatgagctgaagttcctcccgctcggattccggttccctcaaactccacggggcgggaacgtcaaaatgctgtttccaggtgccgaacagaagcttccccaattcaatcaccagcctgatgaccgcataccctgccgctcctcccagcacggatgccgtgaaggcgtccgtccaggtcatgacatggctgtccggcaggaggaaagggtaaagggcgcaggcccccgttccggccaaggcgccgataaatgcctgagagcggaagacaatcagatgttccgcgtcaatgaacatgatgacaatggccatggcagtccacaagcagagcaggacggctgctcctgtggaagcgtccgcgtatttccagccgatggccgcgaagagcagggccgtgagcagctccacaaagcaatatcggaagctgatgcgcgttccgcagcaggcggatttaccccggagagccagccagctcagaaccggaatattcaggaaccagggaatgggttttccgcattccgggcagaaggaacgcgccggatcgttgacggagacgccccgcggcatacggtagataaccacgttcaggaaggagcctatgcaggcccccatcaggccgaaaaccacgggaatcacccatgcgggaaaggcgtcaggcatgggtgggcggggaataggttcggctgggcgtctggttgatgcggtcaatcagcagcctcagtctgccgtagttgccgcgtttgatggggaagacgagccggggcaggcggtccaggtgtggttcgtccgcttcatccggcagggggccgctctggatcattttccccccaggcagaatcaggtctgaaaagtcccgttccagatgttccacccactgggcgggaagctgcgcattcagccggatgacgatggaatctccgacaaaacggtaggagtggaaaatccggtaaaaacggtcgatgtgttccatggcttccgccggatttttagtgacatggatgagatgaagatcgtctgcggaaatcagtccggaatccaccagttccacgcgaatgaaggccagccagttcagccagaaggttttgccgggggaatccagaaggacgatcgggtaaatggtcgcttttcccgtctggatcagagtgagtgtttcaaacacttcatccatggttccgaagcctccggggaatgccaccatggcgtcgctttccgccacgaagttcagttttctgacgaaaaagtaataaaaattaatgagtttgtcgctgtgggccaccacatggttggaggtctgttcatacggcagggtgatgttcaggccgaaggagcgttgttctcccgccccttcattggctgcctgcatgatgcccgatccgcctccggtaatgaccatgtagccgtgttcgctggcttccctggcgaattccctcgccgtttcatacgccggttcgtcattcctgatgcgggcggagccgaagacggaaatcttgcggatgtggcggtacggggcgaaaacgcagttggcgcggtacatctcccgcccggagcggatcaggacggtaaaatcatggtccgaggcggcggactgggccatgttgattcccgttttgatatactcttggaggtagcggggatcgtgcctggtggaggctatttcggaaagctttttgacggcgccttccagagtctggtagctggaatccatggacatggtggaggggcgtttcttgtcttcacctgtaaaatccctgttgtccaaaaaatcaggatgcttcatgagttggtatgataggtttgccctactatgccagatgacgtacattaagtcacagaaaatttaccggcgggcatgaaaagagttgattgttgaaaacagatcgttacattgctccccgcacgggcgttcccacaacatgccgttgatccttcaggcgcattggccgccatgtccgtgttgaggggaaacccggtacattacatacgattatgtcggaaaacgaaaccactactgcagaagaaaccgccgttaccacgctggcccgttttgaggttcccagccgtctggaaaaaattgaagatccgaatgatgcgaatcatttgacctttgtggcggaaccgtttgaaaacggttacggccatacgcttggcaactccctgcgccgcgttcttctgggttctcttgaaggcgccgccattacctccgtccgcatcgccggcgcgcagcatgaattttcctccctgcccggtgtggtggaagatgtgacggaaatcgtgctgaacctgaaaaaggtcaaattcaagcataacggcaaggaaccgcgcctgctctctctgcgcgtgcataagcagggcgttgtgactgctgccgatattgccgacgacaccgtttaccaggtggtcaatcccgatcaaatcatttgcactctggaccaggacaccatgttcgaatgcgaattccaggttcgcgtgggccgcggttttgccaccggcgatgaaaacaaggtgccggatatgcccatcggcgtgattccgatcgactccattttctctccggttacccgcgtgaagtattctgtgcagaatacccgtgtggggcagatgactgactacgacaagctgatccttgaagtctggacggacggccgcatcgcccccgcagacgccatgctccaggcttccgccattctgcgccatcacctggacgtattcgtcaactatgacgacaagcaggtcaactttgaggaagctccttccgccgtccaggacgaggaaacggcccgcctgcgcaagttgctcaacatgagcgtcaacgaaatcgagctttccgtgcgtgccgccaactgcctcaacaatgccaatatcacgaccgttggccagcttgccatgaagagcgaaagcgaaatgctcaagtaccgcaatttcggcaaaaaatccctcaacgaaatcaaggacaaattgctggaactgggtctctccctgggcgttcaggtggatccctccctgcttaccggtcccgtgccgcaggccaagccgcgcctgggtctggaagaggaaagccccgtgggcctggcagacctgattgccgccaacatcgaagacgacgacgactaaatctcacaaaaccaacacacatagaaaaatatcatcatgagacacggtgtaaaaacctccaagcttcagcgcaacgcttctcaccgcagggctctgctcgccaaccaggcatgcagcctcatcctcaatggacgcatcaccaccaccctggccaaggccaaggccctgcgcccctatgtggaaaagctgattacgcttgccaagcgcggtgacgtgcattcccgccgcctggctaccgccaccattcataatacgaccgccgttaagcggctgtttgatgaaatcgctcctctttgcgcggaacgcaagggcggctatacccgcatcgtcaagctgggccagcgtctgactgattccgcccttgtggccatgatcgaaattatcgatctgccccgtgaggctgccgaaaaggaagaagctcccgccaccacggaagccaccgcctaagacgcacctctggaacatcctgttaataccccgctccggccttttgtgaggccggagcggattttttattggcaataaggaagttatggcgataatatcgctcttgcttctttcctgccggaacgttataatccagctttaactatggacgcagtattattgttttccggacaaggtgcccaaaaagtaggcatgggcaaagatttgtatgaccagtatcccgtcgccaaagccctgattgaacaggcggacaaggcgcttggagaatccctttctgccgtcatgtttgaaggccccggcgatgaactgacgcgtacctgcaactgtcagcccgccctctacgtacatggccttgcctgcctggccgtcttgaaggagctcgttccctccctgaatcccgtggctgccgccggcctttccctgggggaattcacggctcatgccgctgccgggacctattcttttgaagaaggcctccgccttgtccagaagcgcggcgcgtttatggaggaagcatgcaacgccacgaaaggcactatggccgccatgatcggcggcacggatgaaaacgtcattaagctggcgcaggaatgtgacgtggatgttgccaatttcaattgccccggccagacagtcgtttccggtacggaggaaggtgtggccaaggctgtagcaggggcgaaggccgccggctgcaagattgccaagaagctcaatgtggcgggcgcctaccattcccgtctgatgcacagcgctatggtaaagctggcggaagaactcaagaatatttccttcggtacgccgtccatgcctgtttattgcaattatgaagcccgggtagtggaaggtccggacgacatccgcagcatgctggaacaccaggtatgcggatccgtgcgctggacggcttccatgcagaagctggtggaccagggccaccgccttttcattgaactggggccgggcaagacgctggccggcatgatggctcgcatctgcaaggaagctacggtcatctccattgaagacgtgcccagcctggaagccgccgttgcggagctgaacaaataatttccctgaataaaagggagtaagccgccggcccgttggggagccggcggttttttgttggcgtgttcatggcgggggtccgtcaaataggcaatatcccatggaacaggggaaatgcctgcctccgtgccagcggccctgctcctgcgcgggcattttcctcatgccgccggtgggaagatgcatgaacatcagcatcgttcccatgaaaaaagcgatggcgggcacgaacagcggtttccatataaggaaaagtgcgggcatgatggaatgcgccgctcctcagtccagaagaatcagggcaatgaggtaaaacaggaggccgcttttaggaggccggcaggagagcatgaaagccgaggctctgagccgcgccaggcgttcctggcggcgcagccccctgcatcaggcatgaaaggaattccgtcaggaaacaggcgttatggaatagaaattcctgatttctaaagaagttccgtcagagagcggatgatactggtcgctagggaaaaatccgcctgctccgttaccctgtttggaaccgagatgactggcattcctgcgcggtgtgcggctgtagtgccgttctgggagtcttccagcaccaggcattcagacggagatttacccaggttttccgcggctttcaggaacagggccggatccggtttgacggggaggccgtcgtcgcggcagacgacggtttgaaaatagggcatgatgcccaatctgttcagccagccgtccacccagcggtgggaagaactggaggccactcccataggggttccggcttccgccaggttccggatgagttttccggcgccgggcaggaggccggcatgttccagatcccggacgatttcctcctggcggcggctgttgacggtttcccagtcgaaagtgcgccccgtcaatttctccagatgttctccgggattccagtgggtgtagccgctgccaaggcattggttgaacaaatccaggggaagagggtggccgcaggacgcgaaaacccgttcccaggaggaataaatggcatattccgtatccaccagcaatccgtcaaaatcaaaaatgacggcgtgtgcccgccggagcagttcacgggctttcagaacggcttccagggaatcggcaaagtgatcaggaatggtcatggacgggagtctttttcaagcctctcaataattccgagaagcttctgtgagccagcttggtttgaaaaaggcggatggcgatgatggtgtagataatgttgggcatccatgctcccagccaggtggggaggtagcctgcggaggccagggtggggaaaaactcatacaggaacagcatggctgccgccaggaacaacgcaatgccgatgccggacatggcggagcgcctctggaacgtgatggcggaggggatggcaataaatgtcaggataatgcaggaaaatatgcgggcgatcctgacgtgccattccgtctgcagacttctgaggtacctggcgtttgtcgtgccggacttgatgagttcttggagagccggggttccctgtgtatccacgcggacgttgggtgaaatcagttgccagggtgtttcgggataatgctctttcagcgtttggtattcctgtccggcaaaaacgggaacatcatggagctggcggggttcctcctgggaataatttcttttgatggcctgccggaaggtccatgtcctggaggccggatcccaggtggcttcatcggcaaacagctcgtatttcatctttccgggggcgctgaactgttccacccgcacctgccggaaaggattgccgggggaatcaattccgggaggattgcccagataccagatgcgggattccgcatcatttttgtagatggtgctctgggaagcatggttatttttgttctggctcagggaggagaacatcagtttcctgtacagggcggagttgggcgcccagtggaacccgaagatgccgaagtagatggaggcaaagacggcgccgatgatgatgggggtgttgattcggagcagggaccgtccggactgcagcatgccggtgatttctgaggatgaggaaagtttggtaagcgcccagagtgttcccaggagaagggtataaggcagaatcaggttcaggatcatgggcagctggctcaggtaaaagcggaacgtgcccatgaggggtgcgtccaggttcatcaggtctcccacattgtccgcaaaatctccgataatgtaaatcagcgtcaggatggccgtacacatgatgaaggccgtgaaccaggtgcgcgccacatacttgtccaggatgctcgaacggttgtacaggaacattcccagcgcggggagaaagcagcccagaaggatgagccagggccgcaggagctgggaaaggggatattcggacggcgtaccgggaatttcccattgcatctgggaccattcccggggcatcagaaaccaggctgccgctcctcccagcgcaagcaggaggagaaatacggaccattggcggaaatgtcgggcctggattgccatgaaaaaagaaggtggggcaagaatgccagatcgggagcgggaaataaagcgttatttggccgccggacagggataaaaggctgcctgaaccgcatgtccgtgcttgcttcgtgaacctcagtgcggttccgctccttaaagggaggaagtggctgcgggagatgttccgcctgatagaagttgactgttgtcaacgtaaactggatgagataaaatcttcctgacaactgtttcccggcaacagcctttccatgttcaaacgtcttgttcaattgtttcttctgttttttctggctgctgcgggtgttctggcgtggtttgcttggtacgtctccactcccctgctcattcccgtgggaggggaggaccccgcctcttctcccgtcgcgggttccctggtgatggaacccgtggaagccgtttcatccgatggcacggctattgaaggttatctggtgagcccggggcgtccggaggctctgtctccgcgccagagccgcgtgcgggatactctgaaattgcgcgggaaaatgccgcatttggaggcaaaaccagagctggttgtgatagccgcctcttggaatgagggagtggaaagttccctccctctggcggaagggctggcaggagccggttacacgagcctgatatggaatccgcgcgggaagaacaatacccgtcaattctgcacgtacggattaagggaatatgcggatgtaacggcgcttttggacgccgtatcccggaagcagggtggattgcctcccgtggccgccgtgggtcagggatttggtgcggccgtgctgttgaaagccgcgtctgaagatccccgcatccgctgcatggtcagcatggactgctttccttccctgaaaaccgtggctgtccgggagatggagcaggattggggcaagcctctgtgctatgccgcttattggctgctggatgccggggtggattggcgtgcgggtttcagtacgtttgacgtggcccccgtggatgatgccctgaaattggattatccggtcatggtggtttgtacgaaccaatattttttctccacgctggaagattgcctgagcatttacgattccctgaaaaatgagaaaaaacagctttatgaatccatccgggaaggggaaccgtatggcacccgggaacggactttcctgcattccattgaaggaaagaagggggaaaaatttgaaaaggtctataaggtcaacgtctatgcgggggatgacgagctgcaggctggcattgcggaatggattcatgagaatacgcgcatgcccatgcccagggtgttgcctcatgagtcttacagtgcgcccgttacgggtaccgctccttccggttcatgaattgttcctttccttttgctgatgatcccgtgagtgcgaatcaggacaacaaccgagaactccgcgaaaaccgccgcaggcgcagccgttttattctgcccgcgcctcgccatctggcagctgtggcggcaggggctctccttgccgccgtgctggtgcattacctggggtttatcgttctgagctggtttgacctgggcattcatgtgcacaaagcccccgctgtccaggaggacagaaagcctctgcctgaaaaaatagttctgaaggcggacgaccgtcctgctccggatgtagcggaagccgttgaaaaaccggatattgagcaacttgaagagattcccccggaattgccggatttagaggatatgcttccggagcaggtagtgattgctccgggggaaaccagcttttccgcggagccggtaagtccttcccccccggaatccctttccccgaaaatgccgcaggtggacatgaatgccgtcgcgaaggggttgcccgaaccctctccgcctgagatgctgaaatcttccgccagcccggttacaatcaagacggctgaaccggacatggtgaatccggatgaatggtataacaataagctcaaaggggcgggcggtcaggatgattcccatttgccggatgggagcaaatctctttcccagctcatggcccagtcctccttgggcaaggacagcgggtacagcaggctgggagcggatcttctttttgaatacaacaaggcggtgatgaaaaatcccgccaggctgagcatgcttcagcttgcggggctgatgatgaaaaatccggatacgattttcattgtggaaggtcatacggacagctttggttccgaggaatataatgccgtgctttccctgatgcgtgctaatgccgtccggcagtggctgaaggataacggcatagctctgacgcgtccgaatggggaatgcaggttgtacatacgcgcttgcggcgcttcccgtcccgtcgtttccatcaggggggaccgggatgcccaggccgccaaccggagggtggaaatccacatgcgcaagccgggagaagaaatacccgccgggagcctgccccttacgtatgcggtggatatgaacacccctgtcgcccgccaggtgcgggccggcgtgggtgcccgcgccggaatccccgcctccccggcagaaaggaaagcgccccccgcagtgcgtccatcttctgccgccccggaacgccgggaaaatcctgtgccgcgtcaggaagtaattcctgaggcggaacccattccggaaacgattccttcggcagagcctgtggaggaacgcatcccttcggcagagccggtagaggatgacatccctctggctgaacccgtcgtgtgtgcggggagccgcgccgtagtgaagggaggtgccggattgagatggaattgatgcgtttccttccggtccgggcgctgccgaaacccgaacggctccggtatcttttctcctttgattttgacgatactctgttcactcttggcggccctgcggaagaaaggatcattttttttagaaccatgcgcatgctccggtcgcagtatggtgttctctggggcgttaatacggggcgtgaccctgtctacctgagggaaggtctggcggatatgttccgggatgatgcggaagcgtttgccccggatttcacggtgacgatggaacggaatgttcatctggcggatgcggagggcagactgatgcccggtgttgcgtggaacgatgactgcgctgttgcccatgacagcttgttcacccgttacggcggcatgctggaatcattgatgggccagctggaatgccggttttccgggctgggactccgcaggcaggacaatgacgctttttccctggtggtggatgatgcctgcggcctggatgaagtttcctgcgtcattcaggatacggttgatccgtatgaggaaattgtcacgcaaagggcaggtccctacctgcgtttcagccaccgtgattacaataagggaacatccctttcctttgttgcctcccggttcggcattccgtcttcccatgtcgccattttcggcgacgggcataatgatctggacgccatgcggcacttgccggaggcattccggtgctgcccttccaatgcggcgcaggaagtgaaagacatggttgcccgcggccatggatacattagcccggaaccgcgcacccggggcgttctggacggcctggcgcatggagtgtttccctatttcgggatgaaggcggaggttttgaaggaggatatttgaaaacggggctttcggatgctgacgggagatcggctttcaacatgtttctttcatcaaggcgctcccggaaggggaagaatcgtattgacaaggaatgcctgcaatgcagaaatgggaaagattctttcccaatcccgattacatgaacattccctctttttcccgtagcgtttccagaggttccgccgtgggctggtttttagtgttgttgctggtttgcggtgccggagccggatattatctttaccaggataacctggcaaaaagaaaagcggcccaggaattgaccgctgaacgtaaattgaaggagaaaaaggccagggaagctgcggagaaacagcgaataaaacgggaacgggaaatcagggagaagaaggaaaaggaacggctggcggcccagaaggcttatgaggaagcgcaggaagagaaggcgcggcaggcggcggaagcggcccgtaagcttcaggagcaggccgaacgcgaagaacgggaaaaaaggagaagggaggagctggaacggcgcgaacgtgaggaagaggcccgcaggcaggaggaagatattcctgtggaggaagagcctgaaccggaagggcgttttccccaacccgtgaaaaaccggatgccggagctttccgtttattctattccttgcagggatgaaatccagacggaaaaagataagccgctggaaacatggtcctgggacaaggcggaaaaaatggaggggatggaggaattccccacgggttcctctccgtggaaaaaagggaaagacgccggacgcatgcaggcgcttctggaaaaatgccgggaatggaaggatgccaaacttgcctcgctgaaggcgtgcccggcggcgaaggattttcccggcgttccggagaatggggcccagacggtcaggcggacggtggagatagattccaatattggaggctggcatagtacgggactgtatgcgccgcccggggcggaaatttcgtgttccctgtccggcgctcccaaagacggttcgatcagcgtccgcataggatgccatacggacagccttcataagctggatgaatggaaaagagtgccggaaataaccatgcaggttccggctggccgtgggcgcgtgaaaatggtgaatccgatgggcggccttgtttatgtgaatgtaggccagcgtcccagacgggggaaggtcttcaaggttcagatttccggagccgtgccgtcacctctgttcgtaatggggaagaccactccggaacaatgggccgaacaattggaaaataccaaggccccgtggggggaaatccgcatgccccggcttattgtcacgatgcccgtggaacagctgaaacagtgtccggatgttcagaagacggcggaatttctgcaaaaaaacatggctcttcaggactggattatgggatgggataccaagccggaccgcctgcatcatccgatgcgctttgtcgtggacaggcagatatccgccggggccgggcattccggttatcccgccatggccacgaaggactggacgaattccattgccaccggttccatcatccattccggaagctggggtttgtggcatgaactggggcataaccaccaatcccctccctttacgatggaaggccagacggaggtatccgtcaacatattctccatggtgtgtgaagtgatggggactggaaaagactttgaatcctgctggggcggcggtatggggccgtccggcatgagcgcggaaatgaaaaaatatttttcaggcacccagacttacaatgaggctcccaacaaggtgcagctcttcttctgggtggagctgatgtactatctgggatttgacgccttccgccaggtggctcttcaattccatgacaagccttatgacaacggcgaactgagtgatgaaaaaaaatgggaatgggtcatgaacgctttttccaaagtcacgggaaagaacatggggcctttctttaagatttggcgtacgccggtttccgaacgtgctgcgggcaggatgaaagaccttcccgcctggctcccttccagggattatccggcctgttataccgcagaggaataagaagatttcggaacagggacgttgccgcactcgcttctggacgcttccaccggctggggctaggatggcggggctgtgagatggctgaatgactggctgggcttcttcaagccccttcaggtgcggaacctgcaaatattctggtcggggcaggcctgcgccctgattggaatgtggttgcaggtgacggccatgggcattcttgtgtatgatatttccggcggttccgctacggcagtggggctgctggcagccttgaacgcccttcctttttttctgggaggaatgctgctggccgggctgggggaccgttttgaccggaggaaacttctcatagccgtgcagtgcgtccagtggctggtggcggcagccctgtttctgctgactgtgctggatatgctccagttgtggcacctgtacgccgccgggctggtgatgggcgtcaatcagacggtgggttttcccacgcagcaggcttttgtgggcgacctgatacagcgccggcaattacaggaggccgtgggcatgtactctctggtatttaatacgtgccgggccatagggccggcgcttgccggctatatcattgcggaatggggcgccggaaccgcttttggcggcaatgtggcggcaagcctgcctctcgttggctgcctggttgccttaaagggatgcgtagcggatacctccgctcccagaaagcagcgcggcgcaggaaggaaagcatccggcctcaagacggtgcttgccacgcgcagtctgctttttattatgatcagcgctctcattcagaatatctgcgggcaatccctctatcagattgttccggcattgatgcacggaaatcccaggaataccggcctcattctgagtgcggtcggagccggggccatggtgagcatcctctttgttctgccgtttgcacgcaaaagcgacagggtgggggccaaactttcctcaggtaccctgtggatgggatgcgcactgtgtgtggccggtgtcgtcccggtggtggaagtgcaggccctctgtttcttttttgccggtttggccacttcttccctcttcgttacttcttcatccgctgtgcagcttctggctcccccggaacgcaagtcggccattctggggctgttcagcattgtcaccatcggtgtgcagccgctggcggccatgggttggggagctgtggtggatgcctggggtgttcagacaacgattgtcttggcgggagggttggaagccttgttttccatttggatgctgagcgttccatcttggcgtcatttcaaattttctccggatgactgtccggagacgacatagcgcctttcctccatttacggcaggtgaaaaccgccggtcgcattctgcggaaaagggagtgcatgggggctttccctcgtggaaattccggaatgcggccggatgagggaagaggaagcagggtgcagaaacgtcaggaaccggctgttaaccgtccgtttttgcttcgtgttcggaatagctgatgcccagcatgcagatatcgtcggcctgattggtgcagccggtaaatttggctacgcaggtaagggcttgatgaacgaaatccttggtgctgtgaggggaagaattgttgaaatagtcaatcagtctttccacgcccatttcttccccgtcctggttggcggcttccgtcaggccgtccgtgtacatcaggatgcgggcccccgccaggagcgaaaactgggcattatggtacgtagcgtcatccagcagtcccagggcgatgcctctgggcagcggcattttgcgggcgaccccgtccggccccagaatgatgggatgcggatgtccggctgtggaggctgtcatgaccccggtttccagatccaggtaaatataaacggcggaggcgaacatggtggtgttcgcccgttgcaggattttggcgagctggtggttgagggaagtaaggaaagccgccgggttatccgccaggtgggacaactgttccatcaggccgcggagcatggaggcgatcagggcggcgcggatgccgtggcccatcacgtcgcaaacgatggcgccaacgccggaattgcctacgggaaaagcatcgaaccagtctcctgcaacaccctccgaaggagtgaaaatatggtgaaaatccgcatggcgggtcaggccgtgttccgtatgggagcgggagggaatttcgtagggaagcagggcgaactggatttccctggccaaatctatttccttttccagagttctgttgcgttcctccaggatgcgggccgtttccgtggccttgatttctgtcttcaccagtttggtgacatcactggaaatacctacaattccctttagctctccgttgcgtccgtaccacgggaacttgctgatctggctccaggaatcatccttgtggagccatgtctcatgatgaaggcgggcgcggatggggcgtccggtaaccatgatgtccatttcctccttgcgggaaatatcggacatcgtttggtcaaaaaagtaatcgtccgtgcgtccggtcaggtctgccggcgtcggtacgcccagcttattggctgtggcggtattcgccaggacgaaacgtgattcccggttcttgaaatagatgctgtcgggaatgtgttcaatcagggtatgaaacaggtccctgtcctccgcagcgcgcagttccgccgttttccgccgggtaatattaacccatacgcccaccagcataacgggccggcgctgtttgtccctgcgggcgaggccgttgacgcggacccagctccagcttttggagttcagcttcttcatccggatttcaatgcgcatgggcacatgggagtggccgtccagataacggcgcacttcctgggaaaaaaaagcctggtcttcctcgtgtatggtaagctccggctgggtgaagatattgggagctttctccttgcggctggcccccatcatggtcaggcagcgatccgtgtaatgaatgacgcccgttttaatattccagatataaaatccttcttccgccgccgccagggccattttgattttgtcccaggtaaaaactctctgggcggaatgtctgttgcgtgagggcggcattgcagttgcccttaatctaacgacaaaaccgctgtcttggcaagaggcaaaataaaggaatcctttctgaaaggaggcctggccgggggaacgcgtatgaaggacaccggctggtttttaagatggactcctatttttctttttccttttcctgggattgaagaaattgcagttctttcttcaaagcgcttcctacgcggtgctttgccagatagacctgggcaatcgtgacgccgagctgccggcggaccttggccgcgtcccactcccgcaggacataatagtcaaaaatctggaactgcttgggcgacacttttgctttgacgcgttccagagccgcctgaagaaggttattctgccattcccgttcccatacctggtcaaaattattcttcccttcatccgggattttgtcgatggggtgttccagggtatccgtggcatcagggttcatcagcatggccgtgtcctttttccgcttgcggaactggtcattgatgcgccagcgggtcatgttccatagccagagtttgaaggaaccctgttccggtttgtaaatatttttcctgctctgcttggcgatggaaagaatggtttcctgtaccacgtcccaggcctcgtcttcccttaatccggccttgagggcgacggaataaataagccgccaatatgtccggtaaaattcatcccaggtacgctggtcttcccagttttccaaacgcgcgatcaggcttttcctggtatgttccgcgtattgggaaagtgtctgctcgtcaggctgggactcgttatggggttgcaatggaggcacattcatggtttatcatgaactacggatggaagtgaagcgaaagccgagtaataggccggaaaattctgcacgatccggcctgttcattcactacgtccgtcgtggagaaaatctttcagggaaacggacatgatcaggaaaacgtcaaaacgcaggggaacctccgtcattgcggccctgattgcgttgtgcgcggtggtggggtacggtttgacggagtgggcgccgctggataatgaaccgcaggcggttccctcccgccagagggaagagcggcagacggttcgggagaaggtggaaatccccgacaagggggagcccgttcgtttgctgaccatgaacgccggtaactactttgtgccggaagacccgaggagaagcaattttcaggtaaaatacaagcctgtggaagcccgtgaagccgtggcggagctggttcgccaatcgggggcggaaatcgtggggctgtgtgaaatgggtggggaggctgccgttcgtgacttgcaaatgcggctgaaaagaaaaggagttcatttgccgtacaaagttcttgtcatgcgggacggggaagaccgtggtttggctcttctttccaaataccgcatcgcggatgaccgttccgtaacggacatgcctgtatccggagaggcgaaacggaaaaagacgatgctgcggggcattctggacgccacggtcagcatgccggacggacggctgttccgcctggtgggcattcacctgaaatcacgcctcagccgtgacggttccgcagaggacacacggagaagggaagcctacgccctgcgggactacctgaatgaagctcttgcctctcaggacggcatgcctctgcttctgtacggagattttaatgacggcccgtcagacagcgccgtgcaggtcatccaggggccggccaaaacggaataccgcctgaaccgtttgaagcccagggattctcgtggtgagacctggaccatttactacgaagacggtgacacctaccattccttcgaccatcttttcctgaacaatactctgaaaaagcgcctcggccgcaagcctcccatgggcatccttgactctcccccctcgctccaggccagcgaccaccgcggcgtgtgggtggaattaaggtagataaaaatgatttattataaatggaatgcgtaataaatatttattaggtttttttatttgatcgaattgatatttttgtgatgtaaacatacacttgtaaaaacctaaaaaataatattgctaacgagaataaaatttgtagagctatcccgcagtattaccttctcgcataactgataactatttattatggattttttaattaattctaatgatatatctcatccatgcaattagaggatttaaaatataaaaaatgaatagtttaatttaattttatttcggttatttttttcttcctttcgctggatatatttccagatattggtgtttgaatgatgttgaaattttacagtaagactattctgaataatctcgtaaaagtatggactgctttcatttaatgtttcttattgggattcttttgttgaattggcaaatcattttttaccatagttatgtatgaaatattcagatactcttatcggattgcaaatatctattgtctgatattaaatgttggttctaaaaaattagggttttgcgaaaatgtaaaagtttgaatttaaactttggatggaattcaatctcttcttagggataataacagaatggagtttatagataacataaacaagaccctgaaaggggatttgaccaaggagttgcacgacggcagcaaagttgccattgccgcctcgtgcttttccatttacgcctttgaggagctgaaagcgcagcttaaagacattgaggagttgcgctttatctttacctccccgactttcgtcaccgaggaagccaacaagcaaaagcgggagttctatattccacggttgaacagggagcgcaatctctatggctctgagtttgagataaaattgcgcaacgagctttcgcaaaaggccattgccaaagagtgcgccgaatggatcaggcggaaagcctgcttcaagtccaactatacgggagagaacatgatgggcttcgccaccgttgacgacaaggcgtatatgcccgtcaccggatttaccacggtggagttgggatgcgagcggggcgacaacgcctacacggtgataaacaagttcgaggctcctttctcgcagcaataccttttccttttcgatcagctttggaatgacagcgcgaagatgcaggtagtcacggacaagatactcgacaacatcagcaatgtctataaggagaacgcccccgacttcatctatttcgtcaccttgtacaatatcttccgtgaattccttgacgacctctccgaagacgacctgcccaacgaggcaaccggattcaaggaaagccagatatggaacaaactatataatttccagaaggatgcctgccttgccatcatcaacaagttggagaagtacaacggctgcatccttgccgacagcgtgggattgggcaagacgtttaccgccctctcggtcatcaagtattacgagaaccgcaacaagtcagtgcttgtgctttgcccgaagaaacttaacgacaactggataacctacaagagcaactatttgaacaaccccatcgcccgtgaccgcctgcgctatgacgtgttcttccattccgacttgtcacgccggggtggaaagaccaacgggcaggacttgatccatatcaactggggcaactacgaccttgtggtcatagacgagagccataatttccgaaacggcggcaaggtgacaacggatgggaatgacgacaacccgcgcgagaaccgctacctgcaactgctgaacaaggttatccgggcgggggtcaagacaaaagtgctgatgctctcggccacgcccgtgaacaaccgtttcaacgatttgaagaatcagatacagcttgcctacgaaggtgagtgcggcaggatggattccctgctgaacacgtcttccggcattgacgacattttccgtcaggctcagaaggaatacaacatatggacgaaactcccgccgaaagagcgcattacgaaagaactgctcagccggttgagcttcgacttctttgaagtgctcgacagcgttactattgcccgcagccgcaagcatatagagcagtattacaatacggcggacatcggcaagtttcccatgcggctggctccgctgtcacgccgtcccaacctgaccgaccttgacacggctatcaactataatgggatttacgaaattgtcagcggcctcaaccttgccatttataccccttccgatttcattctgccaagccggaggaaaaaatacatggacgaggataacgacttccacggtcgcggcagagccggacgcgagaagggcatacgccgcctgatgagcatcaacctgctcaaacgtctggaaagttcggttaattctttccgcctcacccttgaaagaatcaggaagttgatagcgtcaaccatcggacagcttgatgcgttgaatcagggcgacagcttttccattgaatgggaggatatttcgcggaatctcgatgccgatgatcgagaggcggatatgttcatcggtggcaagaagacaagaattgccctgcaggatcttgaccacatcacatggcgcggctacctcaaaaaggatttggagaaccttgatcttctgctgctcatgattggctccatcactccggaacacgaccgcaagctgcaacagttgattaccgacttgcgcggcaagtttgcctgccccatcaatgcaggcaacaggaaggtgattatcttcacggcgttctccgataccgccgaatacctgtacggttgtctggctgctcccattctggaaaagtatgggctgcatacggcactcgtcaccggagacgtggaagcacgcagtacattgcgccttccacaacgcgagaagctcgacttcaataaggtgcttacgctcttctctccaatttcaaaggagaagtctgccatttatccgcacatacgggaggagatagacgtgcttatcgctaccgactgcatcagcgagggacagaacttgcaggattgtgactgtctcatcaattacgacatccattggaatcccgtgcgcatcattcagcgtttcgggcgtatcgaccgcatcggctcgcgcaacgaggtgattcagcttgtgaactactggccggacgtgactcttgacgaatacattgacctgaaaggacgggtggaagcccgcatgaaggtgtcggtgctgacaagtacgggcgatgacaatcccatatcgcctgaagagaaaggcgaccttgaatatcggcgcgagcaactgaaacgtctgcagagcgaggtggtggacatggaggatatgaacgcgggcatttccatcatggatttggggttgaatgagttccgtcttgacctgcttgccagcctgaaagacgctcccggcctggagcatacgcctttcggtcttcatgccgtggtgcccgcaagtgacggtgcgcctgccggagcggtgttcgtattgaaaaaccgtaacaacggcgtgaatattgaccacaggaaccgcctgcatcctttctatatggtctatatctcggaaagcggggaagtggtggtcaatcatctttcacccaaggagatgctcgatcgcctgcgcttcctgtgcaaaggcaagaccgcaccggacatggagctatgccgggagttcaacaaggccacttccaacgggaaggacatgcggcggtattccgaactgttgggcaatgccatctcctccattatccatgtgaaggaagagagcgacatcaacagtttcctgagcggcgtgcaaggttcgctcttcacggaggagatacgcgggctggacgactttgaattaatctgttttctcgtcatcaaatgagtatgtacggactgcccatcactacggaacgcaagaagcaattgccgaaaaaagccgtatatgcgaagttcgacctgaagccctcgcagcgcgacggcttcgatgtcgatgtgagccgcatggatattgtggcggccttgtctccggcaacattgccggccattgcggcgggagaaaacatcaagaacatctatgtgcttgctgtgcagctaaagcggaaggattacgacagcaagagcatcgtcctgttatcccggctcattccgcagaatatcctatttgccttgcagtttgaggcggacacgcaattcgccgtttatcatgcggacaggcttatccgttccgcatggatgccgacaggggaagcgaaaattgcgctttcgggcttgagcatggatgccgtttgggagaatatcgtgaagagcatcggcggcattgagatggaacagggcaagactcttacacagcagatacaaaccaatgaacaacgagcgaaaacccttgctcagattgctgctttggcgcggaagatggcaagtgagaaacagcctcggcgcaaacgggagtattttgaaataatcaaaaaactaaaatcaaacctataaatggacaaattgaaaatgcagagccacgatgtgacaggctccaacataaataagatagcgcgattgttcccgaactgcgttacggaacggttaggtaagaacggcaagccggaactggctatcgactttgaaaaattggaagcggagttatccaacaatattcttgcagaaggggaggaacgctatcagttcacttggccggacaagcgggcggcaaaccgtttggcgaacactcccacgacaatgacgctccgtccgtgccgggaggaatcggtggattttgacaacacgcaaaatctttatattgagggtgacaaccttgatgtgctgaaggtattgcgtgagacatacctcggcaaagtgaagatgatttatattgaccctccttacaacacgggcaacgactttgtgtacaatgacgagtttgcacaaggcaagtcggagtttgaacaaaacagtggtttgttcgatgaagaggggaatcagacgattgacccgatgttgcggaatacggaaagcaacgggcgttttcatacggattggctgaatatgatatatccgaggctgaaggtggcgagggacttgctggcggaagatggggcagttttgattcacattgatgaacatgaagttgctactttggaaatcattgctaaagaaatatttgggccacataattatctaggtacaatcgtatgggataaaaggaatccgaaaggggttgttacagggatagcatatcaacatgaatcgatacttgctttttgtaaaaacgtatccgtattcgccttaaatactccttttaagagagaaaaagaaaatgcgaggacaatgatacaggtagtcaaggatttgataaaaaagtatggaaaagtaacagagaaagttcgtttagaatataaaaattggatcaagggacataagtctgaactaagtggaggcgaattagcatattctttagttgaccacaatggtttgatatatcagcctgtctcaatggcggcgccagatagacccgagacaagatcacacagaccattattacatcctattataggtaaaccatgtccagtaccagctaaaggctggagattcacggacgtaaaaatggatgagattttatctcaaaacaaaatagaatttggaaaagacgaaacaacgcagccaagacaaaaatattttctccatgaaaatatggaagaagccatatcgtcgttattatattttggtggttcagataatgcaatgggattgccgtttgataatcctaagccgttatatgtagcaaaacgattaataaattctatagcgaaaggttcagacacaatcctcgatttcttctccggctccgcctccactgctcacgccgtgatgaaactcaatgccgaggacggcggcaatcgcaaattcatcatggtgcagcttcccgaattgtctgatgagaagagcgaggcctataaagccggatataagaatatctgtgagataggcaaagaacgcatccgccgtgccggaaaaaaaatcaaggaagagaatgccgacaaggaaggcattgataagctcgacaccggtttccgcgtgctgaaactcgacagcagcaatatggaagatgtctattacactccgcaagagtttgacgagcaatccctgttcaatgagaatgtgaagcccgaccgcagcagcgaagatttgctgttccaagtgatgctcgacctcggcattgaactctcggcaaagattgagacgcggcaaatggcaggaaagaacgtgcattttgtggacgggaactatctgatagcctgtttcgacaaggacgtgaatgaatccgccattacggaaatcgccagactgaagccggtatatttcgtgatgcgcgacgcttcggcagccaacgacaacgtgatagacaatttcgagcagatattccgccactactcgcccgacacgaattgcagaatactgtagccatgaaattcaagtttaagatacaacaatatcagacggaggcggtggagaacaccgtggccgtcttcacggggcagccctcgcacgccatagaggaatatcgcctcgaccgcggacggcaggcacaacgacagttggagttcgatggtgaaacaggatacagaaaccacagcgtggaactggacgggaaagccctgttgaaaaacatcaataccattcagaacctgtatgacatcacgccgtcttcttccctttcaaagggtatcggtacggtgaatctcgacatagagatggagaccggaacgggaaagacatacgtctatatcaagacgatgtttgagctgaataagcagtacggctggagcaaattcatcgtggtggtgccgagcatcgccatccgtgagggcgtggcaaagagtttccgtatgttggaggagcacttcatggaacactacggcaagaaagcgcggtggttcatctacaacagcggcaacctgcaacaactcgacagtttttcatctgattccgggttgagcgtgatgattatcaacacgcaggctttcgcctcctcgatgaaggagggcggcaggagcaaggagagcaggattatttactccgagcgtgatgagttcggcagccgccgtcccatagacgtgattgccgccaaccgtcccatcattatcatggacgaaccgcagaagatggagggcgatgccacgcaggcgggcatcaaacgcttcaacccactgttcgtgctgaactattcggctacgcatacgaccaggcacgataccatctatgcgctggatgctttggacgcttaccggcagaagctggtgaagcgcattcatgtgaaaggttttgaagtgaagaacctccggggaacgagcgggtatctctatctcgacaacatcgtgttgtcgcccaaacgtccgccggaagcgcgcattgagctggaagtgaagaatgcttcaggcagcatcgtcaggaagataaaaacattcggcgtgggcgacaacctgcgcgaagagtccgggctggccgagtacgacaactttgtggtgtcggaaatcaacatgaacggctatgtgacctttctcaacggcgtgaccatacgcaggggcgaggtgatgggcgacccggatgagctggacatgcagcgggtgcaaatccgggagaccatcatgtcgcacttggagaaagaacgccagcttttcaagaggggcatcaagtgcctgtccctctttttcatcgacgaggtggcgaagtacaagagctacgatgagaacggggaggaagtgaaaggcgtgttccagaaaatgttcgaggaggaatatgcgaggttggtgaatgaggagttctacatctgggatgaggactacaacgaatacctccgccgtttcctgccccaggacgtgcatcggggttatttctccatagacaaaaagactaaccgggtgattgacggcaaggtggaaaagaagacgggactgtcagacgacatttccgcctacgaccttatcctgaagaacaaggaacgcctgctgagctttgaggagccgacacgcttcatcttctcgcactcggcactgcgtgaggggtgggacaatcccaatgtatttcagatttgcacgctgcgccattccaactcctccaccgccaaacgtcaggaggtagggcgcggtttgcgtatctgcgtggacaggaacggcgtgcgcatggacaaggaactgctgggggaagacatgcatgaggtgaacaaactgaccgtgatagccaacgagagctatgcggattttaccacagccctgcaaaaggagacacgggaagtgttgcgtgagcgcgcagccaaggcaacagtcgcctattttcaagacaggcagattaagattggggaggaaatacataccattaccgaaacggaagccagccgcatcatcatctatctggaagacaacggctatattgacgaggacaagcacatcacgccggattaccgtgaggccgtggcaaacggcacggtggctccattgccgcccaggctgcaaccgatagctgagggggtagtccgtctgataaactctatcttcgacccgaaggcactcgacgacatggtggtggaggagaagacaaccacaccggacaacaaacttaacgaaaacttccaaaaagccgaattccaagctttgtggaacgagataaaccaccagtatgtttatacggtaagctacgacagcaacgagctgatagaaaaagccatcctgcacatcaatgctgaactggaggtaaagcggctccgctatgtgatggtggagggaacgcaggatgaggagcaggtaactgacttcggagacacccgttcccaatccaggcaactgaccgatgtctgcacttccaccgtccgctacgaccttgtgggcgacatagccaaaggcgccaatctcacccgccgcacagtggtgaagatactgcaaggcatccagacgagcaagctttacctgtttaagaacaaccccgaggagtttatccgcaaggctgtaagcatcatcaaggagcagaaggccacgatgattgtggaggccatccgctacaacatgacggaaggcaaatacgacagcagcatcttcaccgtgaagagcagaatggattttgaccgggcatacgaggcgaagaagcatatcaccgattatgtgttcagcgacagcaagggggaacgccaattcgcccatgaccttgacgaggcccatgaagtggtggtctatgccaaactgccccgtactttccaaatacccactccggtaggcaactatgcccccgactgggctatcgctatgacgaaagacggagtgaaacacatctttttcattgccgagaccaaaggctccatgtcatcaatggatttgagtgccatcgaaaaggcaaaaatcgcatgtgcggagaagttgttcaactctatctcaacggcaaatgtgaagtatcacaaagtggctacctatcaggatttgattgatgagatgaacgcggggtaaaaaagaacctttttaactttgtttttgggactcttttttatgagccggattttatcccaggccggtttgaccctatcttgcttgaggtgtacccattgggtcagccggatgttttctcttacggacgaatggcctgggagaggattaccggatggcaatgagttttatttggccaggaacatatcaggcattccagttcctcaaaaaatgattgccgtgtccgtctgaaacgggtagcatgccaaaaatcgttgttcaatcctgcatcatctgtatgagatatttttccaagcattccggaatggctccgcgctgttcctcgccggggagcaaggggtttaccctggtggaattgattgttgtcattaccattatggttgccatgatggccttggccgccagcatgttgaggggcgggggcagggggcaggggcttcaggccgccgttgaaatggtggacggcatggtgcaggaggcgcggctggatgccatgggcaaaggaacgtggagccgcctgattattgtgagcactcccgatgacgaagcccgcaatatgcgcactttgggcgtgatgtccaaaaatacccgtaccgggaagtggcatctggtgaaccgtttgcagactctccccgccggtttttacgtcagtccggcctacagcacccttctggaaggctcgaagaaagccagaggcgagaaatccacggcccgcggttttgccagtcgtgacgggcaggataccgtcaaccttcccggcaacagaatgacggatatttacttcattgaatttgacgaggaaggccgcatgtcccagccgaacgcccccacccgcctggtggtggttgccggttccgccggaaacggcaaggaggagaggccaaccccgatggtggacggcaaaccgggtctggcaggcggcattgtgatttatcccaaaggcaatatcagccgtctgaggacgacggagcaggtgattcccaattagtttctgtgatataataccggatttcccattttatgttgaccaagtgtatgaaacagtctcgtgccaaggggttcaccctgacggaagtggtgcttgcgatcggcgtggtggccgtgctgattgtagtgttcatggccatgtttattcctgccagaaggacggttcagtccgccctgactattcgtgaagcggaccgcatcgtccacgccctgacggcggaacttggagaactccgcaattccgagcgtgccgcgtccaacgccagaaagtcttcctcctccaaatatgtttccgcttttgacaaggcgttttactggatgcagttcacgtccaggcccgctacgaccattcttgtttacaattacagggcggatttgaccaagggggcccgcaaagacggaactccccagccctggctggaggatggcggaagcattcccggcaaaaatactgcggtggtgacaggggtctgcctggcgaacaacaaagagcgttgggatgatttcaaggcccttatcggtcccgtcttcgccgtgcgcatgacccagctggtagtggagcgcatggattcaagctcctacgggtacaagctggctcccaagtacgggacgatttataatccttacaaccgcggcaaggtgattaaggaaccttccctgtatgtttatacgccggagaaaggcggcggcctgaatttgccgtggggggcggaagtcctgtaccaggcggagttcttccagctgttgaatacggactccgagcgtttacaacatctgacgtgggaaaatttaaagactcccgtgtttacgcgcaatctcgctttccgccgttagcgggcattatctgaagacccctgaaaaaacatgaagacatttgccaaaatcaaatccggcgcgttcaccctgattgagctcctggcagccatgaccatcactaccgtgctggttctggtaattgtggccctgacttcccgcggggtggatatctggagatgggtgctgcaggatgtgcggaccacgacgcttgcccgcacggccatggataccatgaccaaagattttgaaagcatgcagttccgttccgggaatccctttgagtggatgctggtgcagcgggacagcgatttggtttcccgtgcgggaaagaccaaggtttccaggaaaaagggccgctcctcctccctgaatgaagcccgcgtgaacctgatgaccatggggccggaaggcgccaaaatcacgaatgcttcccaattggttttctttaccacggctacggaccgcaatccggccaagtccagcatggacatgcggaatgaccgcatcatcggtgatgtgaattgcgtggggtacaagcttctttaccgtgaccagattctggatcaggatgctacggcggagtctgacggttttcccgtttattccctgtaccgtaacttaatcagcgcggaggataccgtgcggaaccttctgggccagcaggatctatggtccgcttatgcacggtaccagcaggatgaaaccgtcccttccaacttcctggtggaaaatattgtggaaatgacgctgatttttgaagtggattaccagaagaagatcggcaattccggcagcaacaaatcggacaaggatgcctcgcaaagagcatccgtgctggttccggtcatgactacgggcgccaaccgtctcggctcctgcacccagatggatgtgtatggcaatcgcctggacatcataggcagcagcgtgaatattgatgatttgaaatccggccgcgttactgccgtgacaatttccatgacggtggtgacggatgaaggcatggctcttgtgcaccagatccggcagaaaaagcgtcccgctccttctcctgaagaatttttcgaacgttatacccggtctttcacccagaggattgcattgccgatgaaccgttaggcctgtatccgggaaaccggggagggcggaacgtccgctgttgctttttgcctggagcgttcctgccgttaattgttctgtagttgccatatgttgggtttcacaaatatcgtcggcaatttatcccctctgccggaattagtgctgtggcgcgatcctgtcgccagaagcggggaggaagccatggccgtggacgaagctctgctggaatggggcaggaagcctgtgctgagggcgtaccgctgggcggaaccgaccgtgacttacggttattttgatgaggaggccacggcacgcgccatttttccgggtgaggagcttcattttgtccgccgctggacagggggggggattgtagaccatcggcaggatattccctttactctggccatgcaccgcaaggaagaaaaagagcgtccttccagcgcggttttgtaccgttggattcatggggcgctggcccgcgtcctgagggattgcggggtggagtgcgtgatgctggacggggatgccccggacggagggcgggcctgtttttccagccccgtaacgagtgatcttgtccttcccggcggggaaaaactggctggcggcggccagagaagagtccgcggaggcgttcttcaccaggggagcatccagaattgtcttctcccttccggatgggatgaattgctggccgcccgcctggcggaaaagcattccctgtgcgtggacgcggaattgttccccggcatgaatgcccgcgtggaggaactgctggcttccaaataccgtacggaagcatggcgttccggcgtacggcatgggcgtccgtctcagccacggtaattccccccccttttttctttccgatgaattatcttccagatcccggccgctatagccacgcagcctaccgccgctgcgggcgcagcgggttgctgcttcctcccgtttccctggggctttggcataattttggcgctgcggatgattttgagaacgcccgtcggcttattcacggcgcgtttgatgccggtatcacgtattttgacctggcgaataattacggacctcctcccggttcggcggaagaatgctttggccgtattttcatgcaggatttgtcccgtttccgtgatgaacttgttattgcaaccaaggcggggcatctgatgtggcccggcccgtatggggattggggatcccgcaaacacatgcttgccagcctggatcagtccctttcccgcatgaagctggattatgtggatattttctacgcgcaccggtatgatccggaaactccccttgaagaaacggcgggagcccttgttacggcggttcgctccggaaaggccctgtatgccggtatttccaagttcccggcggaacaggccaggcagatgtgctccatgcttggggaggccggcgttccgtgcctggtgcatcagatccggtacaatatgtttaatcgggaaccggagaaatccgtttttcaggctgttcgggaaacgggtaccgggtgcgccgctttctctcccctggcccaggggatgttgacggaccgttatctggaaggcattcccgaagattcccgcgcggcgggttcctccgtctttttaacaaaggagcgggttcttcagcatggggataaaattcgccgcctggccgccctggcccggagccggggccagagccttgcccagatggctctggcctgggtgctgaaagatcccgtagtgaccacggccctgattggagccagccgcccctcgcaaatcagggattgcctgaaagcactggatagtgcgccgtttacgccggaggagctctctctgattgacgcagatgcggatagataggcactgtttttcccgcggtgctggtctttctgctggaaggggcatttcccgttccggacacaggttttttcttggagtaaagtagagctggtgttatgtttttactactttaatttaaagtgtactgacaatgataaccatccaggatttattttggctcatcccatcggcttccgtgctggccctcatttttgcgggcatctttttttaccgcatgaaagcgcaggatgaggggaacgaggtcatgaaaatgatcgcccggcatgtccgtagcggcgccatggcctacctgcggcagcagtataagattgtcgccattttctttgtgctcattactgttgtcttcgcttttctggcctactgcctccacattcagaacccctgggttcccttcgctttcatttcaggcggctttttctccggtctggccggctacatcggaatgaagacggctacgtatgcttccggccgcgtggcgaatgcctgccgccattccctggatgccgggctgcaaatagctttccgctcgggcgccgtgctaggcctgaccgtcgtgggccttgccatgcttgatatcggtgcctggtactgggttctggattggttttacggggacatggagctttccatgcgcctggtcgtcattactaccaccatgctgacgttcggcatgggggcttccctccaggcgctgtttgcccgtgtgggcggcggcattttcaccaaggcggcggatgtaggggccgacctggtggggaaggtggaggccggcattccggaggacgacccccgcaacccagccaccattgcggataacgtgggcgataacgtgggggacgtggccggcatgggggcggacctttacgaatcttactgcggttccattctggcttccgccgctttgggtgcggcagcttacatggccgttcctgaaatggcgatcaaggccgtccttacgcccatgctgatcgccgcccttggcaccattctttccctgttgggcgtgtacgcggtgcgcgtgaagcgcggcgcttcccaaacggagctgatggctgccctgaaccgtggcatcaacttgagttccttcctgattgccattgcttccgcatttctgctccagctcatcggcctggataactgggccggcatctggggggccatcgtcaccggcttggcggtgggcatcgtcatcggcaagagcacggagcattacacttcccatgattcctatccctgccgtaaaatcgcccacagcgcgaagacggggccggccaccgtcattatttccggcatcggtatcggcatgatttccacctgcattcccgtaattactgtcgtcgttggcactgtgctggcttacggcctggcttccggggactggcatttcaccggggcggaaatgagcaaggggctgtatggcatcggcattgccgccgtcggcatgctttccacgctgggcctgacattggcgacggacgcttacggccccatttccgacaacgccgggggtaatgcggagatgagcaagctggacccggaagtgcgccgccgcacggatgccctggatgccctgggcaacacgaccgccgccacgggcaagggatttgccatcggttccgcagctctgacggcattggcgcttctggcctcctatattgaagaattgaagatttccatccttcactggagtgaggccacgggcaataccatttacaaaattaatgatgccgtaagtgtggaggtttccaaaatctccactgcttccctgtctgatttcatgggctatttccaggtaaccctgatgaacccgaaggtgctcatggggctcttcgtgggggccatgatgtccttcatgttttgcgggctgaccatgaatgccgtcggccgcgccgcggaaaaaatggttaaggaagtgcgccgccagtttaaggaaatcaagggaatcctgaccggagaggcagaaccggattacgtgcgctgcgtggaaatttccacggcgggagcgcagcatgagatgatctggccgtccgtactggcggtcatcacccccatctgcatgggtatcgttttcggcgttcccggcgtgttcggcctgctggccggcggcctggcttccggctttgtgctggccgtattcatggctaattccggcggagcgtgggacaatgccaagaaatatattgagcagggccatgtgggcggcaaaggctcggaaagccataaggcagccgttatcggcgatacggtgggcgaccccttcaaggatacgtccggcccgtccctgaacatcctgatcaagctcatgagcatggtggctatcgtcaccgccggcgtgaatatagccgtgaccctgttctaaacagaaagattctttcacggaaaacggagggagtccgcaagattggcggactccctttttttctggctgaagggaaccgtccactggtgagcggttttttaatttccgcttctttcaaaggctctctgaaagactgttcctaatagggggggagggggtaagtatgattttttaaatcatatttttatttgtatcagattttatttttgttagtataaaaaataacaaaatgactgacagaataggccagctacctttttcttccttccggtttttattctgctgtctggcagttttttccggagttgttcccttgtgggcttcggatggcccggatgatgacatgaaggagacggaagaggaagcctgtggccccctccagattaaatctcagacagagttgtgctctgcggattattatatcaagggaagaagtgaacaggacaaggaagaagacagaaagaggaaggatataggcatcggggagaacatcaccttgcttctaatcggcaaatccaagggaaatattgaagaaattacctgggatattaaaggagaaggcttccagcagacagatactaatccattcaaaggttcacaacaaattaccctgactgccaaaaaggatttaaccaaagatgcccgtgtcaccattacagccaaaaccggtgaagacaaagaagctaaaatcaccgtcaatatcaggattcccaagaagataacgaaggaaaaatatgagggacacatggatttgggagatggctttttcgccaatacggctgattttaaaatatccaagggggaacacggtgtctggggatttattaaagtgacgctttttcctactgacgtcagttttaagggagtcaaggtgattgagcgggatggaggactcatgtgggaaggaaagaacgggactcccccgcggcctcaaccggaactggcagccgagcatgtaacctgcaacatggccgctcccattcaggataaaaataatttttatgatatggtaggggataatcgcaatattgaggaagttcttgaaacgattcgccggtccaaacataatcctcaacaattttggtttgtatgcaacttccatattcattggggaaagggagggaaaggcagcgagcaacaggattccatctttttaggaacaactaatcaaaaatattctattgaagctttggaccagcgtacgacaaaaacggtcgttgaaaaattcgggttcacgtttaaaagaaacagcaatgaggattaaaaaacaatgaccctgttacctcctttatgcgcatgtgccgtctgcctagtaatcgggaagggcaatcaggcctattccgattctcccctggagaacccggcgtgcatcgaccagtacaaacagccgtccgcaaccattcgggaactctccggtttgctgaaggacatgcggctcaaatccttctataacggggccaggaaacatacgctcacctttagtttggcgactcgggataacattgataccgagctgaaagagaaaatatggaattattatctggtagcctcggctcccctttttacctacaaaacgtatcgggaaatcgagccggatgttgatatgggcgatgatagggctgatattcaccgcaagtccgaagcctgcctcctcatggaaaaatatatcggcctggtccggaagacgaacaaaatcaaggaacccgttaaaaatcagatcatccggcgcctgtttcttccctattacgcgcgcatcctgaaacagtacaaaaacgcgcaggagcccaatccctaccagagggatgcccagggaaatcccgtccctcccctttccgacaaggaaaaggaattccggaagcgtgagatagaaagaatcaaacgtctccccgttcaggaagtcctcaaactgatgcgtgaaggttcaagccaccgttcttttatcgagacgagaaatgaagtatttggagacgaagtcaagcatcttgaaaaagccttgatgaaactgcttgtttccgaattccccggtcaatacggcaaggttgagaattttattctggaagccggatattcaaaagaagacatccccggtttgattgaccgcaccgtgggcagggacgaaaagacggatttcctttataaagggaaacatcgtcagaaacatgacaagctctacaggaaaaagaagtgatggtgtccagccccgaatgtttaagacgttctttctcccttttctttttgtgaagagatatgtcggaaaccggggggagtgaagaaggctcgagtccgatggcaaggcttgcaataaccggtttctggaaagggaattctggattcgtaaaaaaggaaaagagaaacgtgctgcgccagttggcagctccgttccgccggtgggagtggggcgggcggttcctttggaagtttggaagcgccggagaggcgtcgtgttttctctgggcagattgagaagccaatacggttttttcgccattgacggaaagtttttttgacaaagaaggggcagaggagtaataaacgcgcagatgcatttcagcactgtacagcccttttttagcaagaaccgttattatggcaacggctattggtggcgcgtacccatgtccggacgggggaatcccgaggtgcagtaatagcattcagctatgaccatttttcaagaactgctttgattcctccgagagtcaaagcagtttttttattttcaacttacatcatcatccatgcaaacaccatccatgatcactctccaacagcgcagccgccgcctgagcgccgatctggagacccctatcagcctgtttctgagcctgactcagaacaaaattcccggacttctactggaaagcgcggaagtggacggcagatgggggcgctacagcatcatcgcctgcgattatctgatgaccgtttcctgtgtagacgccaggctttccctttccatcaaagacgaccgtctggcttccctgaaggagctggaaggcatgccttacctggatggactgcgctctctgatgcaacgtctggagctggtgggggacgatatgaggcaggctcccattacgcgggctctgtacggctatttcgggtatgaaaccgccgccctgttccagcccaggctggcgcaggccattccggcttcttccgcagagtcctgcctggtgctggccggcaccgtgattgtttttgaccatttgtacaatcgccttacccaactcagcctgggtgaacaccgggatttgtcccatgccccgctccatggggcggaggaaccttccgtcggggaagtttcccgcacaccggaccaggcagcctacatgaagggggtagagcatatcaaggagctgctgcatgacggggaagccatccaggtggtgctttcctcccaggcttccgcggagttccacggagacgctttcatgctgtaccgccgcatgcgcagcattaatccttccccatacatgtttttcatgcgcctgccggaggtgacgctgttcggatcttctccggaactgatggtgcgctgcacggacggcaagcttcagctttcccccattgccggaacgcgcaggcgcggcagggatgacgaggaggatgccgctctggctgccgatctcctgaaagatccgaaggaatgttcggagcacgtcatgctggtggatctgggccgcaacgacctgggccgtgtcgccaagcccggttccgtgaaactggaacgcctgatggagattgaacgtttttcccacgtgatgcatatgacttcccgcgtgaccgcccaggtgaacgacggattggacgtcttggacattcttggcgctgccttcccggccgggacggttagcggagcccccaaggtgcgcgccatggaaatcctggcggaggaagagcctctgccgcgcggaccgtacgccggatgcatcggatggctggggttggacaaaaacggcgtccacatggattccggcatcaccatccgcagcatgtgggtgaaggatgggcgcatccactggcagacgggagccggcatcgtatatgattccgatccggccgcggaatggcaggagtgcatgaacaagggtaagattattgacgttattttgaaaggagaagaccatgtttctgttcattgataattacgattcgttttcgtggaatctggtgcaggcgttttatgccctgggacgcaagcccgtggtgcatgcgaatgacgatcctcgtattctggaactggcgaccagcccggagctggaagccgtgtgcatttcccccggccccagccatccgcgcaacgccgggctgtgcctggagttcctgaaacgcctccccgcttccgttcccgtgctgggcgtgtgcctgggacaccagcttctgggctacttcgccggggcggaggtttcccgcgctccgtatgtcatgcacggcaagagttccgacatcatccatgacggcgcggggctgttttccgggcttcccaatcccatgaccgtgggccgctaccattccctggtgatccagtccaaggaggacgagccgaatccccgctttaccgttacttcccgcgggccggaaggggaagtcatggccctgcgctacaatgaccgtccgtgggtgggcatccagtttcatccggaatccatcctgacgccgaacgggcttcagcttctgggcaatttcccggataacgtcgtgccttcggggcagaaggaaaagcgcatcagccgcattctggacgccctggccgccggacaggacctgacggcggatatggctgccgcaggctttgcggacatcatggatggccgcatgactccggcccaggcgggctgctttttgatggggctccgcatgaaaggggaaaccccgctggaaatggcccacgccgtgggcattgccctgggccgcgccaaccgggtggaaggtttggaaggcgactgcattgacgtggtaggcacggggggagacggccgcaactctttcaattgctccacagccacggctctgacgctggccggaatgggatacagggtggtgaagcacggcaaccgcgccgtgtcctcctcctgcggttctgcggacgctctggaaggcctgggattcccgctggacgtagctccggaagatgtccggcgcctgttggacgagcggaacttcgctttcctgttcgcgcctaattttcatccttccttccgcaatgtaggccccatccgccgggagttgggcatccgcaccctgttcaatctgctgggccccctcatcaacccggcgcgtcccacgcacatcctgctgggcgtggcccgtccggaactcgtcgagctgctggcggagacgctccgccagtcccacatccgcaaggctgccgtagtatatggtgccgggggatatgacgaggtgacgccgctggggcccaccaagatgatgatcatccacaacggcaggctgacgcccatgtccctggatcccctggattacggcatccagccctgcaatccggaggaactggccgttcattccaagtcggaagccgtggacgtgctgagaaacatcctggcggggaaaggcccgcgtgccatgatggacatggtgattctgaatgtgggggtagccatgttcctgctggaggagcacatggacctgtccgtctgcatggcgaaagcacgggaagccgtctgcgccggcataggaaggagaacacttcatgctgcttgaccggttccgggaagccaaggcggaggaaatagccctgctcacggacatggcctcccgccgggaactgccgcgcccgtggaaggggctccggccggatttcctgaaagccattgcggaaccgccggacgggcagcccgtggcggtcattgcggagttcaagcaatcctctccgtcgcgcggtgtcatcgccaccgggctgaaaccggaggaagtggctgaacaatacgctgcggcgggcgcctcctgcatctccgtgttgacggaagaacagtttttcggcggccgcatcggatatttggaacgcatgagccgcgccgggcttccgcttctccgcaaggatttcatttttcatcagcttcaggtgatggagacggcttctacgccggcttccgctttgctgctcattgtccgtctgacgccggatgcacggacgctccgtgttctcagggagcaggcggaggcttacggcatgcacgccgttgtggaagtgttcgacgctgcggatctggaaattgccagggactccggcgcgcgcatcatccaggtaaacgcccgtgacctggacacattgaaaacggacaggcaggcctgcctggacatggcgaaatcccgccgtgagggggaggtgtggatcgccgccagcgccatgagcgcaggggctcatctcagggaagccgcggaagcggggtttcaggccgtactgatgggaacagccctgatggacggaggaaggccgggtgaaaaactggcggcaattttagaagaaacgatatgaagaagcattcatttgcaatcaaggtgtgcggaattacccgccagagcgatttatcaaccgccatggggatgggggcccatttctgcggcttcatctttcatcccggaagtccgcgttatattgcaccgtcgcgcgcggcggccctggactccgccctgatccgccgcgtgggcgttttcgtgaaccagaacgcggaggaaatcatggatatcatgaaaacggcccgtctggaattcgcccagcttcatggcgcccattctctggactgcgcgcgccgcatcggtccggaaaaagtgatccgcgtattgtggccggaccggtatgaatccgtagatgccctgcaaagggaaatggagctatgggcggacagctgcgcctggtttctgctggatgccggcagccagggaggcggccacggcgtttcccttgactgggcctccctggcgtctctgagttccccccggccctggttcctggcgggaggcctttcctccgcctcactgaacagggcgctggaacaatgctctccggacggcatagacctgaactccggcgtggaagccatccccggccagaaaagcccgcaaaaactgctggcggccctcaaaccactcaccccttacactccttaccacatcgcatgaagaaagaaggatatttcggcaatttcggcggccgcttcgtaccggaagcgctgcgccccccgctcatggagctggaggaagccatggactccatcatgccgtcccgcgagtaccgggatgcgcttcaggatctgctggtcaattacgcgggccgtgaaactcccctcacgttctgtccccacctttcggaaaaactgggcttccgcctgtggctgaaaagggaggacctgctgcacaccggagcccacaaaatcaataacgccctcggccaggcccttctggccaaaatgatggggaaaacgcatcttattgcggaaaccggggcggggcagcacggcgtggctacggctacggcggccgcccggcttaaaatggactgcaccatctttatgggcgcagaggatgtagaacgccagtccatgaacgttatgcgcatgaaattgctgggagcgacggtttttccgattgagagcggttcccgcacgttgaaggatgccattaacgaggctctccgctactggatttcccatcaggcggataccctgtattgtttcggtacggcggcgggcccccatccgttccccacattggtcaggcagcttcaatccgtcattgggcgggaggcccgcgcccagatgctggagcgtgcaggcaggctgccggatgtggtggtggcatgcgtgggcggcggctccaatgccatcggcatgcttcacccctttgtggaggatgaaggcgtccgtctggtaggggttgaggcgggaggcaccggtgagcccggctgttataactccgcccccatcaatctgggcagccccggcgtgctgcacggtcatgtgaccatgctgttacaggatgagaacgggcaaatacagccgtcccattccatttccgccgggctggactatcccggggtaggcccggaacatgcctatctggcggaaacgggccgtgtccattacggtgtgatttgcgacgcctctgctttaaacgctttccagacgctcaccagagaggaaggaatcattcctgcgctggaatcctcccatgccgtggcctgggtgctggaccatgcggaggaactgccgcaggggggggatgtcctggtcaatctctccggccgcggagacaaggacctgggaatcgttaaaaaatatttgaatctttaagccgcattcttccatgaataatatgcagaaatcaccgttgcagaaagccgtggagagggcccatgccctcggcaggcgtgccgttatccctttcattaccgccggattcccggacaaggaatccttctggacgcacttgtcccgtattgacgaagccggggcggatattattgagataggagttcccttctcggatcccgtagcggacggcccggttattgaacaggcatcccgggatgccctggcccgcggcgtcagcctgaagtggattctggacggtctgaaagcccgcaagggcggtttttcagccgaactggtgctgatgggatacgtaaatcccttttaccagtatggcctggaacggcttgccctggatgcggaggaggcgggcgtcagcggtttcattgtaccggatatgccgctggaggaatccggaatgttccgggaggctttcagcccccatggcctgacgctcgtcactctggtggctcccaatacttccgtggaacgcatgcgggaatacaagccttatacttccggcttcgtttatgtggtctccgtgctgggaaccaccggtgggaaagccaacctggagcggagcgttacggaaaccatgcgccgtgcccggtctgtttttgatgtgccgctggcgctgggcttcgggcttcagacgccggaccagctggagacgctgcctgaagatgcccggccggatgccgccgtgcttgggagcgctctgctcaggcacattggagaagggaaggacgccggggaatttttggaaaaatggaccagaggttaaactggacgtttctctctggtttttaaggatgggcctgcacaacttattgtgcaggccctttttattttatctggtaatgaaaggcgaaaatacggattcgcaatccgcttcgttttcattcacatattattcaatttttaacagaataattatattgataattaatatgttacatatctttaacataatctgctggcgggaatcccggatttttttgacggagaaaacgttccgggtattccggaaaaccgttgtaactgattcttttcctttgacagcggattgcgaattccttatttatattcacaatcatatttcccttgccgtgttgtgggaaaggttcttatttgttcattaaatacctaattatcaaacgttttatgaaattacacctccctttgaatttattggctgccctgatgacctccttttccggagtaacgcttggcaccgccacgctggcaggagtttctggtcttttggtgacagcatcacagtcctatgcggcggatgtcgcctttgacggaacccaggtgaatgtggcggcgggaggctcggcctcctatgatgtcggtactgttacggcttctactaccttgaattttgccggagccggtacggccgccatcaccaatttaaacgggacggctccggaagccatcctgacggtaaaccgcgtggccagcgggggcgccagcctttccaccctgacattgaacggggcaggcactttcaacggaatcatttccctttattccaacacgacggggggatctcagaacaacatcctgaacctcaaccacgcgcaggccgcccaatacgccacgatcaaactgggcggttacggttatacgacgggcgcttccgtcctgaaagccggcgtgaacacttccatcagcaagctggagcacaacaatgccgcggctttgattaccggggagggaaccacgctgaccattacgggggattcttcctcttacggcggcagtttcggcggcaccgtaacggtggactatacggggggaggcaccttcaccctgggcaattccgacaagaatacggctctcactcccgcggcatctccgaacgctaccctgaaaatcagcagaggcactctttccctgttctccggaaatgtcacctgatcccagaaactggtcatgggtgacggcaccacgctgaatgtccaggacggtccttccgtgacggggtactcctcctataatgccgcttccatcaataacggcggttttaatttttccggagcagcggttttcggcagcggcgtcaacctgacatccagctggggcaagaatgtgaagttttccggtgttctcacggcggcaagcggtttttccatcagcggcggcgcgaatgaatatacctattacaacctgctcaacaccgccaatgaaattggggggacgatcgccattacgcgcaactttgcctctctgggcatcggtgcttccggctcccttgggactgcctccgttactacttcggtcaactcccagtacctgacctattacggcactgcgggggatgcggcggatgtcattgacaattccatcaccggggcaggcaacttcgtcgcccagtcgggctgggttcatctttccgagaacgtggcgcttacgggaacctataccgtcaattccggcgccgtcctctccagggccggttccattaacgccgcgcttgccggaggccgactggatgctggcgccggaaccatgactgtgacgggactgtcgggaaacggcaccatctccgcctctgcgggaaccatgaatttccagaacgccttcacagtaggggaaacgatgggcatcctcgccaacggttccgggacgatcacgggcaatgtaacagtggatggaggccgtctgtattatacttccatggacaatgtcggcagcgtgctgcagaacgtgacgctgacttccggcctcattgatttctccggttttcaggaatttcaggacttgttcggttctgaagccctggtgaacacctcctataacctgggcgttgatttggggaacggctttactctggcggatgttgacgagtccctgtacacaatcagcaccgtggacggaaaaacagtcatcacgtttacggcttccggcgcccatgagaccgtctgggaccctgcctgggggctggaagaagctccctcttccgcaacaggtacgctggcgaaccagcagtctttgtccctgtacggtatccggtcttcttccatgcaggaggggttcggttccgtgaatgccgtcaccggaacgggagacctgacaggagtgaccctggccggcggctactacaatactgcgtccaatgccacggctacgcaaatcaccaccggcatctggacggatgtgctggggggcaattataatctgattatcggcggcagctatgccaacaactggagcggttccggcaagtggaacgttacgggagacgtccatacccagattcagggggacacctccgtcaactgggtcgtgggaggcaactacaaggacggccaggcggcgggcatcacgggaaacgtttacgtatccgtggacgggaatgccgtcattaaaggcagtttggtaggcggaggcacggcagcccataattccgtaaacaaccttgacggcagcacatacgtcgtcgtgcgcagcatgcaaagcgtcacggacgaaaccatttcgctcaactccgttgtccggggcttcatcatcggcggcagtacttttgaagccaactcctcatcccgtgccgccattaccggaagcaccaatgtgacgattgatttgggaacggcctccggcagctttgtcaagagcatcgtgggcggttcctattcgggaggttccggggcgtatacgataggaggcgattccagcgtcagcattaccgccgccagtgacgccgtctttaccggggctgtctatggcggcggctacggcacctccggaacatccaccgtcagcggcaattccagcctgacgctggatggcggcacttatacgggagccctctatgcgggcggcggcggggcaaggtccgctgtgaacggggacgctactcttaccgttaagaaagcagtattccgtacgggcagtacgctgaatgcatcggagggtacggtaggcggcacctcttccttgcttctgggcggttacggcaatacggcggaccatgccatttccttctccaatacggctgtgaccggtttcgacatcgtgaccatgttccaggattctttctttacggggaatctgaacatgaccggttccagcgtgctggcgctggcgggaggggcaggaacgggaatcaatctggacggctcgttctctctttccgctgaaggggaactgaacctggatctttccgaattcggaatcctgacagacggcatgtccgtcctttcaactacgggcctgtccaatatatcttccattaaggcttcctttgctgacggcgtggctggatccatcaccatttccgacaacggcaaagaccttgtctatacggcgggaaccctccttttgtgggaggggggtgaaaacggcgtctggagcgcggaaaatgtctggacggacggcggcgctcccgccacatatgcggatggtatggcggtttcctttgcggaccaggccggagtcgctaactctgtcgtacagctggattctgaggtttcgccaagctccatgcttgtccgcaactccaccacccgttatgaactgacggggacgggagaaattaccaatacggccgtcaccaaggaaggcacgggaacgttggtcctcggcacctcttccatactcggcacgggtactactgtggctgtgtcgcagggtgttctggcattcggttatgatacggcccttcccggcacgggggtaacctgggaggccggttcctttttgggtgcggccaatggcgcgacggtgacggtggatttgggaaccgtcactaacccggtattctccctttctccggatgccaactctttcatcactctggcgactccgtccgacatcgttttcggcaatgccattactggggaaggaactgtccagaaaaccggcacgggcttgctgaaactgacggggagcaactccggccacatcgtggtgcaggagggcaacctccagatagggaacggaacctcatccatccgctggggaagcgcgggttcttccgtcaccctggaaaacggcacgtcgctgattattgccggcaacagttcgggaacctcccaccataccatcaactccgatttgattttgggaacaaacgcgtccgacgccgtttccctgaaatgggtggacgcctcccaggcaagcgccgcggactatcagcatagcttcaccggaaccgttaccgtcaacggggcggtctccctggtgggcagggacaactgggccaaggaaatgggcttcaccggaacgctcactggagccggttctctgacttacagccgcggagcgggcgacggcaggtacaattccaacggaaagctcatcatcagcggagatgcttccggatttaccggaatgatcaccatgaatgcttccaacggctatagcgccgggctggatctgcgcacttccatctctcagggtggcgtcaccctgacatccggaacggacacgaccggattcgctttcatgcgcgtgctgggggatgttgaaattgcctctctggacggaacggaaaattcccaggtgggagccgtaggcggtgcgcgcacgctgacggtgggggccggcacgtacaacggcacgctcacagaccgtggtgttgctcttgggtacggagccacttccatttcgtatgacgaatccggcgtcctgtctctgaccaaggtcggcgaggaaacgctgacgctgggcgggacggtcagctacacggggctgacggatattcaggggggaacgctcgctcttactgcttccggagctacgtccctggggaatatcacgatggcggccaatacgcggatgacgactgcgggcgccctgaacctggcggccaactctacgctgacactggatatcagctccgccctcgaagtgggcggcgctttcggggctggaacgttcaatcttacgctgaacgggcttgaaggcattacggatgccggggaatataccctgatttccgccgccagcggtcttgatgccgccagcgccgtctttaactgggccggatataccggggacgaaacgctgatttatgaactggagcagacgggaacatccctcaagctggtagtgacttccgccggggacgtatggatctggcagggagcggaaggagtgacctggagcgatacgaacacgggcgccatgtggggcattgaaggttccacggatacggctgccgagaagaatctgatcttcaacagtaccggggcgggaaccgtcaccctgtccggagcggtgaatcctgcttccatcacagtcaacaatgctgccggcagcgattatgtcttcgtttccgacggcaccggaaaaatcgcccagggaacgctgaccaagcgcggcgaagggaagctggtccttaatttggacaacacgggttggaacggggatatttccgtccagcagggcgaactggtagcccaggtcgccaattccctgggatccggagccattaccgttacggacggcgtgctcactctggctacggcggacgttcaaccgggaatgggcatgatcaacctgcagggcggccgcctcaatttggcttccggctcttttgccacggcgtttaccgcagacaacatgacgtggacgggcggttccatgacgctgggcgaggaagtggccgccaccgtcgccaaggctctggccaatggaaaagccgtggaattggcggacggttccgtactgacggtcagcggggctaatgataactcggctctgaacctgaatgcctccggttccggtaccgtttccgtgggactgggaaccagctatggggccaatgtcctgaatgtgagcacggaattccaggggatcctgtccgtgacatccggctatttccaattgaataacgtaacgatgggggcggacggcatcttgaaacttgcggattccaacgtccgtacggaatggaacggaacagccggaggaacgtttgccaatgacgttgtctttacgggcaaccaggtctttgccaccaaggatttcaccttcagcggcgatttgagcggaacggcgttctccacccagggagcgggcaatattaccctggcgggcggcgtcaacctggacggtcagctcaaggtgcaccgcggcacggttaccgtgaattccgccgatgtggccaagctgggggacagcattgacatccagaacaactccacgctggcctttgcccgcgatttctcctacggaggcgtcatcagcggtacggccggcagcacggtatccgtaaacgccggaacgctggaactcaccggagcgaacaccttcctgggcgcactctccattgcgggcggcgctacggcgcggctgggtgacggaagtgtctgggccggctccctctccggagctggttccctggttattgacactgccggagagataacgctggcggccggcaacaccgggttcaccggttccacgacgctctccggaacgggcaccgtcaccttggcgggggccgactccctgtggtccggacgggtcaccgtcaataacggtgttctcaatctgtcctccctggatgcggccaacgttattctgattacgaagggaagcctggcaaacgcggaagccaaaaccgccggaaacgtggaagtggccgcttccgccggaacgcagggagccctgaataccatcaatctgggcggcctgtccggctccatggtcggctccatcgtcatggaggattactcccggcttacaggcgtttccggtgctctgaacatgacgggcaagacggtgacgctgaaactggattccggcagccttacagcgggcggaactaccggacagggcgttattgatgcggacagcctgacgctttccgccgccacaacaaccatcaacctcagcaaccagggtgttctggacctgcttgccgccaaccgggattccactgacggcgtagggcttgtactgacaacgggaaccctggctgtggataatttcaagcaaatcggattctctcctctcctggcttccctcggctataccgtgacggaagtcctgggtgcggacgggacgctgatggtcagcggcaatacggatcttgtctatctggtggacaccacccccaattcagacaaccccaatatcagcgattacgccgcgctggatccctacaaggctgtcggcattaatggcaccacgcttcatgtgagcctgaacggggctccggaagcctcccggaatggggacggcctgaaagtcagcaacctggttggcagcgacggtgcgctgaccgtgacgaatacggcggatgatgcggcttccaaccacgccgtggtggatctggttcaggatgttgacgtcggcggcaacagctacggcggaaccatcagcggggactatgtggattttgtcaagaaaggtgcggaaaccctcaccgtagaaggaaacttcaccgggaatgactccagtctcagttcctcggagggaaatatcatcctgaacggtgcaggcaatagccttactacgctggaactcgcgggcggagacataacgctgggcggacggaatgacggcgcctcccgtgtaaccacggtggagacgctggctgccggcgcgggagggggaaccctgaatttgggtaacggagcccagatggttcttaccggccagcaggccggcagccatgtcacggaagtgactatctccggggacggtacgctgaccttgggtggtacgggaacagactcctccctgacactgggcaacggctcttccctgaacggtgtcctgctggatatccgtgaagggtccgccctgtccgctgcaaccggttccgtgaataccgtttccggactggagggcggcggagctctgaagctgagcggtgcggaaatgacgatcagctctttcgattcccatacctttaccggtactctggacggggcatccggaacgctcaacgtcaaatccggcaacggaagcgtccagactatcaagggtgcgggcaatgcaggttatcacctgaatgtgagtgacggcggcgtgctgaccctggccggaacggcaggggagggcggcaatcccgcccaggcttcctatcaggggattaccgtgaacggcggcacgctcaatatcggcagcgcagacgatcccaaaacccagctgacgcttggctcggacggcttgagcgtgacaggggacagcacagtggccattaccacttcctccacaacggtggacggcctgggcaatccctttgtcacctccagcggaaatattacgctgggagacgggacgggggaagtcacgctggtcatgaacaatctggataccctggtttccgggagttcggaaacgctgaatatggaattgttcaagacaacggacggcgcgctggtgtccctgggtgacaatgtcaccctccaggacatgattcttggttccatgtatgaaaacctggagctgaccaccaatgacagcatgacggccatcatcctcaccggtacggcgcgcacggaaaacattttccgtgactcttccctgacgcggaatgccgctactggagcggacatcctttggaattcccgctatcacatggaggaaggctctgctttgcgcgatttctatacctctgttcttctttcccagaattcaggcgactattccggcgccgcccgcaaactggccgccgccgccggcagcacggttaccagcctgggcatcgcccagcgcgactccctgcgcgaccagatgggctggatacgcaaccgcgtggcgcagatgggcgttaaccctgcatatgtccatgaagacatgccctacttccatatgtggatgcagggaaccgggtcttatgccaagctggacaccaggggggatgaaagcggctacgaactcaccacctggggaggcacggtaggcatggacgtggatatcaacgaccgcctcactgcgggagctgcgtttactgccaattacggaagcctgacggccagcgcggcggatatggcggacggagacctggacagttactatgtcaatctgttcgcccgctaccagtaccgtaaatgatcccatctgctgattctgacgggcggctggaatgatgcctcgctgacgcgcacggtgaattacggtacggggtcttaccaggcccgcggcaatacgacgggagccggtttcggcgccatgtacgagttggcgtatgacatcgctctcaatgaagacaggagcgtgattctccagcctttgtttaacgcttccatcgtgacgacccgcatggacggctatcgggaaagcggttctgccggaaatgccggactgaaggtggaagaccaggaactgactacggctgctgtcgctgtgggtgcccggctctccggactcatggggtccaatatcttcgggcgtgaagcgctgggagaagtacgggtgaacgtttcccaggatatgggagaccgccgcgggcaggctaatgtgggcttcctggcagatccctcctatacgcgtccggtgtatggcgccaaggtcggaagcacggccttccagattggcgcggggctgagcgttcccgtgggcacccagggcgtcatttttgtggacggcaatgcggatatccgcagcggttccagctccatcaacgggagtatcggctaccgctacaacttctaaaggaaaaaacgtcggccaattggaaagccgctgcggatgattccgcagcggcttttttcatgaatgggcgggatttctttaaggataacttcaagcttgggttgacgtccctgatggctgcttacttccattcccattcaatgggcgtttccagatcgggccgcagcgcctggcgcacagggcaggacaaggcggttttttccagcatggcgcggagagggtggctgccttccaggggcatgattaccttcagttcaattttttcaattcccttggatgattccgccgcacgcgccagaacgcgcatgcctttcaaatccactccttttctggccgcgaccacggaaaccaggctcatcatgcaggaggcgagcgtggaaccgagcaaaactccgggggaggggaattctgcgcggccttcaaaagaagcgggcaggtccgtggaaaacgtgacgttggaaggaataaaggtggtttcgcagcggaattgtccgacgttctccgtttcggaggtgtaataatgatcagtcatgaaggtgtgacagcgaaaaccctgttcgggttcatccggttcaggttattttcacgttgaagagccgtgaagttccgctttgcagggaacctggccgttccttcatgacatggttgattttttcctcttgcttccggttccctgcattacttctttttaagcgttgctccgccgtgtcttcttgcggcgggaaaaagcttacgccgtccccttcggcttccttgccgccagaatgcgccggatgggttccgcataaagctccggctccagcaggaaggaatcgtgtcccttggtggaagcgatggtatggaactccgtgggaatatgggcggcttcaagctgcgccgcgaaatcctgctgttccgccgggcggaaacagcagtctgtatcaatggaaaagataagcgcgggaatccctgcgcggcggaagccttccagggcggtttgaaatgttccgtccggggtgtggtcgcggatgtcgaactccgcccacatatccgcaatacggatataggcgttggcgtcaaagcgctccgcgaacttggttccctggtgaagcatgtagctttgcgtgctgcgggtgggggtcatccacgtgagcaggccgtagttgcctcccacctcttttctggcgcgctgttccagcccttcctggtaaacaaatgatttgtggccgatgatacgggcgaacgccagccctttttttggcgccggtccccggtagtaatccccgccttggaaatccgggtcaagctcaatggccaggatttgttcaaacagggacaggcggtgttcaatggaagcccggtaaccggagccgatggagatgaagctccggacccgttccgggaactggcacgcgaagctgagggcgatcagtccgcccacggagggtcccataagatgaacgcgttctatgcccaggctgtccagcagaagggcctggagacgtgcctggtctgcggcctccacatgcgggaagcgggagccgtagggctggccgtccgcagggcaggcggtagcggggcctgtggtgccgtagcagcctcccaggtaattggcgcagatgatgcagaagcggtttgtgtccagcggcttgtcggggccgataatgctgttccaccagccctcgtggttttccggtttccagagggaaccgatgcccgggacttccggattgtaaccgtaggcgtgctggctaccggaaagagcatggaacagcaggatggcgttgtctttgttcggcgtcagggttccgtactgttcgtaggcgacgcgaaccttgtccagcgtagctccatttctcagggagaaggagttgggaagatccaggaatttggtttggacggcaggaagctgcatggatgtacggaaaggggcttggtcagcaaaaaaagaccggcacccggcgggcggcggtcttcttgaaatctgtgctgggccagggattacttgacgccctttttggaaaggcgcgtgcctgccgtagcgccctggcgggccttgaacttgggattgctcttgcagatcacatacagcgtgcccttgcgcttcacgatttggcagtctgcgtggcggcgcttcatagaggctaaggaagaaagaactttcatggtgtataactccggtttggtgttcggttcgggagacggaatataccgtttagttaagaattgtaaagtcatttctttgccaaaagtaagatgccgtctctgcagagatgcttttatgaggaagatgcagtaaagcatgggatggctttggattccgcgccggcggaaaaatttagggaagacgtcatttagccgggaaaataaaatgcgggaagggacctctgccgggggaataaagggtttgtgcaccggaggggattcgtataacatcttttccggttttccttatgactgattcttcctctcctgattcctccccggcttcccggaatacgtttgcccatcatttgggaatgaaagggtttctgctcatggaagggctgttgaagctcgtgggcatgaaaacgctgtaccggctggggcgcgcggcaggggccgtggcgtggcatctgcttccccagcgccggaacattgtggaaaggaatctgcgcatcgttttggatccggccctgcgcggaaaggaactgcagaaattaagccgggaaaatttcaaaaggaccattgccaattttttgtgttccgcgaagacggccaccctgacggatgagcagttgaagcattgcgtgacggtcggagggcacgaacagtttgccgcgcctgtgctggaagggcgcgggcaggtttgcgccatagcccactccggcaactgggaggcgctggcgagaatacgcgcattttacccggaggtggagcgttacgggtccatgtaccgccagtttgacaatccgctgatggaggaatacgtgtaccagcggcgcacggaacgtggaactcagatgttctccaaggagggaggcatcaaggctcccatgaaaatgctcaaggaagggggggccctgggcgtgctgagcgaccagtttgtatgggagggggtgtatgtcccctttttcggcaaggtgaccggcacgactccgctgcccgctctgctgagaaaaagggctggcgcggacatggtggccatagcggtgcgcacggatgctcccggccactggatagcggatatggggaatgtggtggatttttccaggtcggacggctctctggcgggggacacgattgaagtgaacagggggctggaaacgttgatccgggaatccgtgctggatgtgttctggatgcaccaccgctggaaatccgttgaccgatttgccccgcaggataaaaaaacggctgcgctcctggaaaatatggagctgaagccgtaccgcattctggtagccgttcccagggcgctggatgaagccctggcgactgttcccctgattcgtgctttgaaaaccgtccggtgcgacatgcaggtgaacatcgtctgcccgtctgcccagctggggatatggaagacggtgccggaagttacccatgtgctgccgcacgactccctgaagcagcttcgggaagctttggcagcagatgaattttacaatgacggaccgctggatctgggcgtcatgctggatggagatatggaaaccctgaaagcgctggaaccgtatggccccatgatgttttccgggctggacacgcatcccggtgcccggaagtacaaattccgggtaaaggcccccgtcctgcgcaccgcccccccggcgcaccgggtgcagctttatctgcaattgggggggctgcatgggctggacgtcgccaccccgtctttgttccctgtgaaaaaagcggccccggcggaagacgcccccattttaatcgctccgttttcccgcctggggagcgccagtgaatggagctgggagcagtggagggagctggtttcccttctgccgggacggacggtgctggcggctttggaagaagaccgggagcgtgccgcctccctggcggaacatttgaatgtggagctggcggtgggtgcgccggaggctctctttcccgtcatggatgtcgctgcggctgcagtagctgtggatggcgactttccgtccctctgttctttccgggggcttccggtggtgactctgttttccacccggcttccggatgtttaccgccctatgggcacattcaaccgttccctttacagccaccagtgctgttctccctgcttccggaaggaatgtgaccgggatgttccctgcaaccgccacattgccgtgcgggaagtactggaagccttgcgggaaatttccgggaaagaataatctgggaagggacggaatgccgcccccccggcgttggcggaaaaatggcgggaatgctgccgttgccgtaaagaatgatggaataacgaaaggaattgcggaaatgccgtattccggagcaattccagaaatgcgtcttcctttttgcatggattctgtagtggagggaagagggcccctcatccggaagagggggatgcctgcgtccggtttgctgcggttggtggcgccaaagcgcgaaaatccggttaatgcacgcaatccggaaaaccgccccgccggaaaatgccgcgaacctgttccgccagttctgcggacgcttccgggacgtccttcaaagtatagtccagcttcaattcatcccatttgaatctccccagctggtggaaagggagcacgtccacgcgttccacgttgcccagaagcgccgcatggcgggagagttcctcaatttcttccagattgtccgtaacgccaggtaccagcacatacctcagccacacgggcttgcggagggaggccaggcgttccgcaaactccagtgtagggtgcagttccccgcctgtcagggcgcgataccgtttcggattccatgccttgatatccagcaggataaggtccgtatccgccagcatttcttcgcccgcattcacgcccagatggccggaggtgtccaggcaggtgtgcatgcccagtttccggcagcctttcagcacggcaccggcaaaatccggctggaagaggggatccccgccggagagggtgactccgccgcccgccgcctgcaaaaaatcccggtaacgggctatttccttgaggacatcatctgcgctcctgagccggcccctccgcacgtaggaggtatccggattatggcagtagcggcagcgcaggctgcagccggacaggaaaaggacgaagcggatgccggggccgtccacggtgccgcaggattccacggaatgaaccaaaccggtgacggagctttctccgtccggatcatggttttgtggaaaaacctgcggcatccgcttgcagtccgggttaacgggtgtggaaagtgcggttgatgacctcctgctgctgttcccgggtcagcttgatgaaattcacggcatagccggaaacgcggatggtaagctgcgggtatttttccgggtgatccatggcgtcgagaagcgttttccgttccagtacgttcacattaatgtggtgacctgtagcggcaaagtaggcgtccagcagggagacgagcttgacgcggcgttcacgttcttccttgcccagggcctgaggaacgatggagaaggtgtaggagatgccgtccagggagtcgtcataggacagcttggctacggagagcatggaggccacggctccgttcctgtcccttccgtgcatggggttggctccgggggcgaacggttccccggctcggcggccgtctggcgtgttgcccgtctttttgccgtacaccacgttggaggtgatcgtcaggatggactgggtgggcagggaattgcggtaagtgtggagcctgcgcagtttttccatgaaattgctgaccaggctgcatgctatgtcgtccacgcgcgggtcattgttcccgtaacaggggaattccccttccgtcttgaagtccacaatcagcccttcttcattgcggatggcttttacggtggcatacttgatggcggacagggagtccgccgccacggaaagcccggcgattcccgtagccatcgtgcgcagaatttccggatcatgcagcgccatttcaatgcgttcatagcagtatttgtcgtgcatgtagtggatgatgttcagcgcgtcaatgtaagttttggcgagccagtcctgcatcttgtcgtacagggccatcacctcatcatagttgagaatttcctccgtgtagcggggggagggcggggccacctgcttgcccttgagttcatccacgccgccgttcagggcgtagagaaggcacttggcgaggttggcgcgcgctccgaagaactgcatctgcttgccgatgcgcatggcggacacgcagcatgcgatgccgtagtcgtcgccccaatgcgggcgcatcaggtcgtcgttctcgtattggacggaggacgtttcaatggaaaccttggcgcagaagcttttgaaggcttccggcaggttccgggaccacagaacggtcaggttcggttccggagccggccccaggttgtacagggtctgcagcatgcggaaggaactgcgggtgacgagggtgcgcccgtcctctcccatgccgccgatggattccgtcacccaggtggggtctccggagaacaggttattgtaatcaggcgtgcggatgaaacggacgatgcgcagcttcatcacgaactggtcgatgatttcctgaacttcctcttccgtgatgagcccctgttccaggtcgcgggtgaaataaatgtcgaagaaagtggaaacgcggcccagggacatggccgctccattctgttccttcacggcagccaggtagcccaggtacgtccattgcacggcttcgcgggcgtttgcggcggggcgagtgaggtcgcagccgtaggaggcgcccagctgggcgagttcttccagggcgcgtatttgttcgctcatttcttcgcgcagacggatcagctcatccgtaaggggggaatgttcacggtttttgaggtccttgcggcgttcggcaatcagcttatccgtgccgtacagggccacccggcggtagtccccgatgatgcggccgcggccataggcgtccggaaggccggtaataatcccggcggaacgggccgcccggatatcggaagtgtaggcgtcgaaaacgccttcattgtgcgtcttgcgtatctttttgaaaatgtctgcggttttctcgcacatcttgaacccgtaggattccagggcctgttgggccatgcgcaagccgccaaagggtatcagggcccgtttcaggggggcgtccgtctggaggcctacgaccacttccagttccttgtcaatgtagccgggcttgtgggatgtgatggaggataccacttcttcatcagcatccagcacgccgccgttgtctatttcccgtttcagcaggactttcagctcgtcccataaacgaagcgtgcgctgggaggggccggaaagaaactcttcattgccggaatagggcgtgtagttatgctggatgaaatcccgtacgtcaatggactccgtccatgctcccggcttgaatccctgccattcctgcggaagggcggtggactccttcaagtcttttactatgctgatcataaatagaatgtagtgaagaagactggagaaaaacgttccgcagcccctgaaaggctggaaacggcaaaactccgcgccgcgtaattatatcgtgaattccgggggacaacaaggctaattctttgcgaagagaacgcgggtgcgctggctttggcatgtttcacctgtctgtccgttgcggagcggaaaatgaggggaacatgcgattgcggaaaagtgacggaagattatttctctttactttcctaatctctattgcagtatctcaacgcttaccgttatgaaatcttatgcatgcctttgtttattgctggcgggagttttttgcgttgcttgtttctccggtgcctgtgctgatgaattgccgcccacgctgaagccccaggtgaacccgcgggctgtgtatgactggaaaaaacgtcatgaagcagtgatggagcggaaccggaccgtcaaaccggaatatgtcgtctttggtgacagcattacccaccgctggggcggcgagccttccggggacaacagggctctcggaacaggaaaaaccgcctgggatagcctgttttcttcccatgcggtaaccaatatggggtttggttccgattacgtggataatgcctattaccgcttgcagctgggagagctggacggcatttctccgcgggtcatcatcgtgctgctgggaaccaataatcttggcgggcggaaggatgctccccgggtctgcgcagacaatctcaaggcttttgtgagcctggcgcgccggaagtgcccctcttccaaaatcctgttgctgggcattctccccagggaggaaaaaaagctggctcccctgattagggaaaccaataaaatgatatccggcctggctgacggaaacagcgtgtttttcgccaatcccggcgaggaattcctgggggaggacggagtgtccccaaaacccgggctgctggaggatgggctgcatcccagtgccagggggtacgacatactggggaagtcgttgagcgtattgctgaagaaaatggacgacaagtacggcaagctgcccgctccccggtagatgaatacgggggagggcgttcctgttccgggagaggccgggggatggatgaaatggagcgcgccttggaagaggccggacacggtgctcgcctggccgtggttgcggcaggatttgccggacgggcagtggtcttttttactctgccggcggaagagacgcctgcgatcttgatgcacggcaggatttgcttaaactgaaaaccggttttactttttgattatgaatttcctctcctacatactcgccatattgctggggagttccagtctggcattttctgcgccttccattccggcctccgcgttgcccgctaccctgaagccggagccccatcagcgggacccgtatgattggaatgcccggcatgaagccgttaaaaaaagaaaccgggccgtcaagcctgaatacgtgatgataggggacagcattacccaccattggggaggggagccttccggggacggaaaaaatacgggatcggggtcctgggagaaattattcgatccgcatgcagcgacgaatatgggctttggatttgattatgtggataatgcctattaccgtgtccaaaacggggagctggacggcatttctccgcgggtcatcattgtgttgctggggaccaataatctggggcaccgcaaggatacgccgcaggcatgtgcggacaatatcagggcatttgtccgcctggtgcgccggaagtgcccctcttccaaaatcctgttgctgggcgttctcccacggaaggagaaaaacctggcggaaccggtgaagcagacgaacagactgttggcggggctgcataacggaaaggacattttctttgccgatccgggaaaggcgcttctttccgcagacggtgcttctccgcagaatgaattcatgaaggatgtggtgcatcccaatgccagggggtacgaggttttggaaaaggaactggccgtactcctgaaaaagcttgatgcaaaataccggggagggaagcaggcgggaaagcattcctgatgatcgtcttctgatggaaggtaggattttgcttgaagggaaagccccggttgaggaaaatatacggcctttgatatttagtttatgaaaaacctgttgtttgcattgtttaccggttccttttgttgttgttatgcccaacagaaggccgcacccgttccggagcctgaagttgtcgccactccgccggctgatgcggggcgcggccttatccgtgtggactcccgtgaaatacgccattattccggtacccgcaaggaaccggattacctggtcagcagggataacggaaaaacatgggaaatgaaggccgctccggctggctaccctcccaactacggtggcattcccaaggaatctccggctattgtgcgcaaccctttgaccagggaattcattcgtgtgcagcctatcgggggctttgtatttctttccaggggtgggctggacggcaagtggcttgccgtcacgaatgacggcaaactggaagaagactggaaagacccggaaaagaggaaaagcctgaaaaaactgggcggcatcatgcggacccccgtttttgtgaacaagggccgcagggtgatcgtgccgttccacaacatgggcggcggcaccaagttccatatttccgatgacggggggctgacctggcatgtatccaggaacggtgttacttcccccagacatgaagccaggcccccccaccagggcgtcagatggttcaacaatgccgtggaagccacggttttggaaatgaaagacggtacgttgtgggcgcttgcccgcacctcccaggaccaggcgtggcaggctttttccaaggattacggggaaacgtggagcaaaccggagccttcccgctttttcggcaccctgaccatgaacacgttgggacgcctggatgacggaactatcgtttccctgtggacgaatacaatggctctgcctgaaaacgccacagctggcaacggaacgtgggaggatgtattcaccaaccgtgattcccaccacattgctatgtccggggacgagggcaaaacctggtacgggttccgggagattatcctggacgaacaccgcaaccatcccggctatgctacgctggatgatccggaagaccgcggcaaacaccagagcgaaatggtgcagctggacaaaaaccgcatccttatttccctggggcagcataaaaaccaccgccgcctggttattgtgcaccgccgctgggtaggggccaagacgcgtgccacgcagacggggaaagatttggattcccagtggaccattcacacttatatcccccacaaaaaaggccattgcagttataaccgcaagccttccgccgagctgattcaggatccgtccgggggcacgaagaaggtgttgcaaatcaagcgtctggatgatcccgaactggtcaatgaaaaatccaatgtggattaccggaacggcggagctacctggaactttccgaacggaaccacggggttggtcaaattccgcttccgtgtagcggacggggagcaggcggatgattccggccttcaggtctctctgacggaccggctgttcaatgcctgtgattccactacgaaggattatgccctgtttaccttcccgatcaggctgagacctgcgccccatctgttgctggggatgaaaaaagtgcctttctcgcccggcgcgtggcatgaaatttcccttctttggcagggtgggcaggccgtggtgtctctggacggaaagaaggccggaacgttgaaaatggctaataagtcccctaatggagtcagttatatccatttcatcagcaccgggccccaaccggatgccggcattctgctggatacggtgaatgcccgggtgaagtaaggatcggcgggattcaatggttttccttcttcggaagcggcggagcgcttaattccggcaggtatttcagcaccatctggagatgttcgtttgaccggttgcctatcctctggagggctgtgcgtccgtatttgtctttcagggatgggtttgcgtggtggttcagcagaagacgcgcaatacccagtttcagccgatccagggaatcgtctcccagcagcatgcctcggcagcatgccatgaggggagtttctccggcggcgttttgatggttgacgtcagctccctctttgatgaagagattgaccaggtccctgatttgagggaggcaggacacatcaatgaaagccagctggcggcacaggtttagcagggccgtgtctcccgctgtttccggcagggtggtggacgcgggcatggccgcattcacgtccgctccgtattccagcagaatatgtgcaatttgcagtgcggcgttcggagtgttcaggttcagggaaagaaggggcggggccatttccccgcggaaattgggatcgtacccggcttcgcaaagcttgcggaccagcagggggtatccggcggccgcggcccatgtgagcagacttgtttttttacctttcaattcaggctggagggaaatatccgcaccgcatttcagaagaaacagggccgcttcctcatagggtgctcctccaataccggccacacaggtgatgacgaggggcggccagcccagcggccccggtttattcacatccgcaccgtactgaatcaggagattaaggcaggagagcctgttatgcaccggcaggggcgtggagtcgtccatgcctggctggcaggcgtaagtcaggggggtatttccctgttcggagtccggaatggagggaaaggcctgttgcggcaggatgatctggacgttcgggcccgcatggcgctgtaaaaggcggttcagcaactgcacttctccgagcccggcggcgagatgcagcagggtttcatgggatggagtgatgcagcgtccgtctgcgctttccgccgtgtcccgtatcatctgaagccgttccctgatttcgtccttcatatattggcgcatggaaacctcggaaaacatgtgccagtcaatatggcgtgaattgagggaaagcccgcggtaaatgaaacgttccgggcttcgatgggctgtgaaatttgctgcggtaagaatttgttctttttccgcttttgtccagatagggttgaaattccattccgcgggagaagaatcattcctgttcagccagaaaacagcgaaagccgcggcaagagaggcaaaaaagctcaaagctccaagaaaccagagagttttctttcttaaagtcatgtgtatcataagcaggggtactgcgaaaggccatgatgcaggaatccataactccgggcaatgaaaaaatagtatgagcaaagaatgcccggggcaaaccatgtgggaattcgggtggcggattgcaaattcggatacaattcaaataattggagttaaatgatccacgccataaactccataatttttgtgaagtccggcccatgacaccatattttccgtttccttcgtaattctctttatccacgagcttttttcccagatgaagaggaaaaaaattctcctccgaatttgcaattcggtgtgatacgctaaatattgcggatgtgcggatggtttcaaattatttgcatttgccgctgctgcactcacggtagaatgaaggaagctgaaacttatggaagaaatggagattcttccgtaaaatgatggagagaactgtatccttgatgctggcctcctggtctttcctttcgctgtccgctccatgctgtctgaagccgctcttgccctggaagtaaggataaacgatgattctggcagcgttatggattccgtcaaacttattgcgtccgatatggatgggacgctgcttaatggaaaaggtgaattggaccctgcgttttttcccttgtttagggaacttgagcttcgcggcattcgttttgcggcagcaagcggccgccagtatgacggattgctccggacctttgcccccgtggcggaccggatgctgtttattgccgagaatggcgcttatgcggcggcgggtagaaaagaatggctgcttctggacatggatcatgaaacggtagccggtttgattgccgggatcaggcgcattgaaggaacctgcatcgtcctcgcagggcgggattccgcatatattgaggacaaacagccggaattcgtccgggaggcccgcaaatattacacacgctgtcaagaagtgggggacctgctggacgtgcggggggacaaacttttgaaaatagcagtatatgacttcctgggagccggggaaaacagttttccccggctgaagcatttggaacatggcttccaggtggctgtctccggagagaaatggatggatatcagccggaaaggggccaataagggggccgccctggaattgattcagcggaaactgggagtttctccggaggagacgatggttttcggggatcagatgaatgacgctccaatgatgcggcaggcgcgtttcagttatgccatggcgaatgccgtgccggaaatccgttccatggccgcatttgaggcgccgtccaatgaggaaaacggagtgatgcaggtgcttggaaagatgttggacgcccattctccgcagggaagggtcgggaattgcaggaaaccccgtttctaattgccgggtaatggaataaaatcagggttatgttgatgttattgtcagatttttttaatatgctggcgatggtcgtgttcgcttgcattggcggtgtttttctgggaatgggctttctgctgcttaaattggcgggaatttttttcggaatattggcggggtgtattgttctgatggaagcggccggaaggtggatttcccatttgatgggggcgtgagtccgttattcccggcaatgaaggggattcctgtacgctttccgtgaggggagagctttctgatggctgggccattgccggctgctgttgttgccggttcattgccgaatgctgaagaggaaggctgcatcctgcctggattctgcgtgttaaaaccggatagcggagttttgtgataaacagacgtttgccgtaagatgccctggaagacagagccccgcagaaaggaaatcccagggatatgaaatgccgggcgtccccatggaagggactgttgcctttgtactatttgacagggcgggagacggaattttaccgtccctcccgtcagcatgaaagctgttgtcctttttagttttgcttttccgcaatgtctgtggtacacccgtgccagacgtcatgaatcaggaatttttttcagtgctcgtgcaggtggcggccgccttggggctggccggcatgatcttgttgctcagtatcttgatgggcaagcgttcttccgtgcgtaaaccggcggacattccctacgaatgcgggatgattcccatgggggaaggcgcccccatgttctctgtaaaattctatatggtggccatgctctttgtcatttttgacttggaagtggtattcctctacccctgggccgtcaatttccgggactatattatgatgaatccggaatcgttcacggccatgtgcattttcattggcattttgctggtggcctacctgtatgcgctgggcaagggtgccctgaactggcaccacgatccccgttgaccgtttttgttcccttttaccaacgccgtgttccatgaaggaatacggcgttttttatgtgaaagaaaaattgccttggaaaatggcgggggagaaatatccgtaaatcctgtcctttttccggatgcctgtttgcgtgtaaaatcttattgtacaaaagatgatttctcttgccagaagaggggaatagggatagcgtttgcgcgatcaggaaattcatcatgaatgtgcctcttcctaaaacgacgcaaggtgtttaccgtctgtcggtcagtaccttttattttcttcagggtttggtgttcgccagttgggcatcccgcatcccggacatcaaaagtgcactggggttgaacgatgccgacttgggatccgttctctttgccgtcccggtggggcagatgtccgccatggcgctatccggttacctggttggccgttgcggcagccggaaaatactgatggcggcatccgtcttttatcctgccgtgcttgtatgcctgggtatggcggggtctttctgggaactggcggccgggttatttttctttggggtagccgcaaatctgacgaatatatccgtcaatacgcagggagtgggagtggaacggctgtaccagtgcagcatcatggcccggttccacggtttatggagcctggcgggttttttcggagctttgctgggagctgccatggtggactggcatatttctgcggaaacgcatttcatcgccattttcctgatatgcatgattattctggccgttttttccccctctcttctgccgagggatgcccggcgttcctcctcccagggaggcggcatgttccggagcatggatgcttatgtactggtcatcgggctgatcgccttcggaagcatggtgagcgaaggaaccatgtttgactggagcggcgtgtactttgaaagcgtggtaaaacccggcccggggctggtgcagatgggatacgtggcattcatgagcaccatggccctggggcgttttacggcagaccgcctggtgatgcgcttcgggcctgtgcgggttctgcgcgccagcggcatccttattgcctccggattgctcgtctccgtcctgttcccgatgctgtggtccgccacgctgggctttctgctggtgggttttggcacctcttccattgtcccgctctgctacagcatggccgggaaatcccggaaaatgattcccagcatggcgctggcttccgtttctaccatcggctttctggggttcctgatggggccgccggtcattggtcatattgcccatgcttcctccctccggtggtctttctccctgattgccctggttggactggggacggcattcattgcccctttcctcaagaaatataggtaatcactgttaatgatatgcctatattgtgaaatggtgcgcctggcaggactcgaacctgtacgcctttcggcaccagatcctaagtctggcgcgtctaccaatttcgccacaggcgcaacgaacgggcggacgcactctgccataccaggctctggcgttcaagattaaacaggagtttttacctttgacgcgcttgtgggaagcacctgtggtgagaaacccataggaaagttaactgacctgttgggtgtctgctttctggcggtattttccattcatgggcggatgtctggttccccaaaggcacatttactccggattagaaggggggggcattgaatacgtcctggtttgtctgccggtaaaggatggaaaatccttggtagctgattctgtgaaggaggttctggagaaaggaaagttttatcccaagccggtgttggccgccggtgatggttccggggcgcagtgtttcgcgtatgaggagtgcgatactgatgccaaacaacgaggcgtggaattaagaagattctcgagccagttaaagcagtcctgaaccggaggatggaatatcccagatattttcccgggcaggcttatcccatgatttgtgccggaaaaggaaatagtttcacgaacagaaagtccagcatccccaggcacagggcgatgcagacggcttttttaggggacaggagaggcgctgttttcagccaggcgacgatgccggcatgaaccgccagagagatgcccacagaccaccagaagaacggaatgcccgttatggcgaagagagccgccagcgggtaggtgaatgccagaaagagtttcatgacagcttcccattcatgcccgcgcaccatcatcagctgcttggacagaagagagacatacaggcaggaagggactacaacgcacaggatgagggaaacaacccctttttttgcataccgttcttcctgtgtgggaatgtacatgccgcatatactgggtcaggaggggaaaattgtcaaacattgtcctagcccggcggggcgggagcaatatactgacggcattgcgtatgtcgtcttttgagttgaattcctccttcaagccttccggagaccaggagcaggccatcggcaagctgctcaagtctctggaggcgggtaacaagcaccaggggctcctgggagtgaccgggagcggcaagacattcaccatggcgaatttgattgcccggatgaacaggcccacgctggtgatttcccacaacaagacgcttgccgcacagcttcattcggagctgaagagttttttcccgaataacgcggtggattactacgtttcctatttcgattattaccagccggaggcgtatatcgccagttccgacacctacattgaaaaggattccgccattaatgacgagttggaccgcctgagcctgaatgccatgaattccctgatgacacggagggatgtgattgtggtggcatccgtttcctgcatttacggcctgtccactccggaggattacaggaacctgacgctgcgcatgcgcgagggggatgtcatggaccgggacgtgtttttgaagcagctggtggaacgcctgttcgagcggcaggattttgattttacccgcggcacgttccgcgtgcgcggtgaggtggtggaggtgtttcccgcttattcggaaggtgaagcaatccgcgtagagtttttcggcgacgaggtggaacgggtttctttgattgactccgccaccgggcgcgtgagggaacggcttgggagctacacttttttcccggccaagcagtatgtggccgctccggagaaacgggcggcggcgttgaaagctatccgggaagagctggaggaccgcgtaggctggtttgagaagcatgggcgcctgctggaagcgcagcggcttaaattgcgcacggattatgatttggaactgattgaagagctggggttctgcaaggggattgagaattattcccgccatttgtccggccgcctgcccggaagcgctccatccaccctgctggatttctttcccaaggattcattgaccctgattgatgaaagtcatgtggcggtgccgcagctgggaggcatgtacgagggggatcgaagccgcaaaaatattctggtggagcatgggttccgcctgcccagcgctctggataacaggcctttgaaattccatgagtttatggaaaggcagaaccagattgtgtatgcttccgctactccggggccatttgaactggtaaattgccgtgcggataataagacgtatattcccgtgcgccgtgccgccagatccggagaaaaggctccggaagggttcaaaggaattttgtttacctctcccaaggacattcgcgttgctcccagcccatccacggaaccggtagaaaaatttgacccaaccaggcgttctacacccctgattgtagagcagattatccggcctaccgggctgctggagccgaagattaccatccgtccgttgaaagggcagattgacgagacgatcgccatgtgcaatgaacgcgttgccaaaaatgaacgcgtgctggtcacgacgctgaccaagaagacggcggaagatttgacggagtacctgaaaggggtaggattgaaggtgtcctatattcacgcggatgtggatgcgattgagcgcgtggagattttacgtgctttgagagccaggaagatagacgttctggtaggcattaacctgcttagggaagggctggatttgccggaggtttccctggtgtgcattctggatgcggacaaggaggggtttttgcgcaatgagacatccctggtgcagacggcgggccgcgccgcgcggcatttgaatggagagtgcgtcttgtttgcggatgtgatgacggattccatcaaacggctggttgagctgacggattaccgccggggtattcaggaaaaatacaaccgggaacacggtattgtcccccaaacggtgagccgttccgaacaggggcagttgaagttgtacgcagaggatgatgaagagtccttccgcgtagcggaggatgaagccgggtatggtctggaagagcgcattgccaggctggaggcggaaatgaaggaggctgcttcccatttggaatttgaacgcgccgccttgattagggatgaaatcaggcaaatgcgcggagaatatggaaaaggcaggggataatatccggcgtgatgaattggggatggcctttctggtaggatggcatgctgtttttccgtgatatttgtccatcttattcttgatcgtcatttgacggtgatttggatattgggtttaacagttaattgcttaaagaattctgctgatgtgacgtcagtgttccggaccggagtctgctgtcaacgtgaaatattctaagaaggccttacgccgatgggggagtatatgaagagctctttgttccagtcttttcttatatataagatttctcatgataagcacttgccgaagtggcaaagggtatggcggatgacagaggattcccaggctggcagcagtagctgtctgatcatcctttgccggttatgttccccattttatttcttgatgcagccggctgcgtcaaaggcgccgggcaatgatggtcaggaggggcccatttgccatcgtctgaagaaaagatttgcataaaaaatacttgcgtatttggaaaaagcctgtaatctccttccaccatgacccgcaaaggtggtatcaataaaacccgcaaggcagtcgccaagcgtttcaaggtaaccggcacgggcaaggtactgcgccgtaaacagggcaagcgccacatcctccagaagaagtccagcaagcgcaagcgccagcttggcaaggtggctctggtggacgagacgcaagtctgggcagtcaagcagaacctgcctttcgcctaaaccgcggaaacgctcgactaatgccgagctttccccccgctgaacggggggccttcatgcagccttcttccgatgagaagataagaacaggcgagactgcagggaggtgaggaagaacagtctgttcaagatagaaatagaaataagctatgccacgtgccactaatggaccggcctctcgcaagcgtcgtaagcgcattctcttgcgtgccaagggtttccgcggtttccgcagcaaactcttccgctacgccaaggatgctgtttacaaggcttggcagtatgaataccgcgaccgcaagcgtcggaagggacaattccgccgtctttggatcgcccgtatttccgctgccgtccgcgaccgcggtctgacctattcccgctttatggaaggtttgaaagccgccaatatcgatttggaccgcaaggttcttgccgatttggccgtctctgacgaaaaggcttttgacgctatcttcgctcaagcgaagaaggccattgaagccaaggatggcgccgctctccgcgcctgaatgtgcgggagtttccatctgttcagtaaacattaaccgacagcctccggaaataattttccggaggctgttttcatgtccggacatggcagttccggacgttggcattttcctgtaaattccttatggagcaggtgttcgcacgttcatcatttagtgcgccagccagtttctcttgttgcagcgtcggttttcccatgccggctggaaaaaatcctgtttccgccagtgcgcatttttgttaagaacacaacggagctttaattactgcttccaattccggaggcatttattgcaaaggctgttcaggggattcggacagaaaagcaggttgcggcgtttgatgccccgccagtttttttcctggtagaaaaaaggcgtttttattcgttcaggttccgggccgggatgatgccgcctctcccagaggcaccgctcgaaaaaaggggacgcggtcttttacttgcagcttcagaattcccggaaggtaaaggctgttttccgggctgtcaggcaccttttgaaatccatttggaatatcagcatccactttgtcattaggacatctttgaagcttgttcaccggagaggcccgtggtaacctggacggcaaaaactaccatggatagcattctttccgtccttgccaccatcgccattattttcggcgtggtgatgttgtttaacttcatgatttttattcatgaacttggtcattttttcgctgcccgctggcgtggtctgtatgtggacaggtttcaaatctggtttggccgtcccatctggaaaaaaacggttaacggcgtgcagtgggggctggggtggattccggccggaggttttgtatccctgccgcagatggctcctatggaggccattgaaggacgtgcggagcttcccaaggatttgaagccggttactcccttggacaagattatcgtggccgccgccgggcctgccgcttcttttctgctggctgtgttgtttgccgtggccgtctggatggtgggcaagccggatgtggagatgggcgtgactacggtcggttttgttgctccggacagccctgcggctcaggccggcattcttcccggtgacaagattgtgaaagtggacggccatcctgtggacaagtgggcgggcaatatggaaggcgtgcgggaattgatcatgctgggcgagcatgaccgggtggtttttacggtgcagagacctggacatgaaggagagatggaaatttcctgcggattccggattccggaaacgtcctggtggcagcgctccggcatgcgtcaggtggggttgatgcaggccatgccctgcgtgattggggaagtgatccccaattctcctgccgccctggccggattgaatccgggcgatgaggttacggccgccaatggagaacgcctctggaaccctgccgcactggatgttctgctgaagaagaatgaaccgctcttgctggatgtgacggacagggccggggttgcaaggcaggtgaagatccaggggaagcttccggagaattggcacaatggtgcggacggttccctgctcaagggggcccagcctattctgggcgtgagctgggacctgagttccgtgggccgtgacgttaccgtccatccttctccgtgggcgcagatcaagcagagtctgaaatggatgggggataccctggcgaaggtggtggctcccggcagcagcgtgggcgtggagcatctttccggacctgtgggaattgccaatcagttttacaagatgttctctctggaggaagggtggaagctggccctgtggttttccgtggtgttgaacgtaaacctggcggttctgaatattctgcctcttcccgtagtggatggcggccatgtggtcatgaatgccattgaattggttttccggcgtcccctgaatgtaaaagttctggaattcgtccagttcggctttgtgttcctgctgatggggttcttcctgtttgtgacattcaaggatgtgggggatttctttggcaagaagccggacaagctgcccaccccggtattcaaggccgttgcggattagttgcggacggcgttttttatcccggcctgttccatgaagcagtcactggcggcgcgtttcctgttccgggcggtggtgctggcgtttcttgtgtatgccatgctgcttacctggtggactcctttcactggggacagcttcatgcattccgtgttcggggcggactaccgccttgcttttcagcccgtgctggagcggtgctggtggtcatacatgcactggaatccccggctgggagagttcctcgctatttttacagctacggcgggaaaatggctttttctggccctcaatcccttcgtgcttctttccctggcgttgatgatgtttttcctggcgcggggaagaagggtcaattccggaaactggcgggatgtgctgctgtttaccgtgggagcgcttcttttgcttacgtcttcatccaggccggggatcacgatgttctggctgtccggagggaccaattacgcctggtcggccgccatctggctgggtttcctgtgcctgtaccgctccttatgggctggaacttcccggattagggacactcctttttcctggctctggataggcgtcatggcttttgccgccggcatgacgaatgaaaaccagattcccgcttccctgggcatgctgttcgtgtactggtgttacgcccgctgccggggaatggttctcccccgctggtttttcattggctggggattccatgcgctgggcggggcctttcttctgctggctccgggcaatgcggcccgccttcattcggagacggcgggcggcgcagccgttctccattcctggggggagcgtttcagcgccattccggaattggtaaacgccttttatgaattcatgccgattcctaaaattttgctggccgttgccgctgccactctgatcctgctgactgtggaagcggggataaacgcctggcgggggaaggccgggcggcgtatgtgcgtctccctgctgtttattctggtggctcatgccatggctatcagcttttttgtacgcgtgattccggcatggcacgccatgttttccgccacggtattgatgatgacgggaattctgggattgtacggggtatggatggatgccgtgcgaaggcggtggctcccattctgcgtgctgctggcggcggctgatccggccctgtgggtatgctccggatatctggatgcttttccccgtatccaccgccagtgcgaggaacggaaaatgttcatccggcatgaattggaacaaggcaagaaaaacattacggttcctccttatgattccgttcctttggccccttatgtttccgttatgtggcgcatgagcagcggggatccggatgaatttatcaatcgttccgtagcccggtatttggggattgaaagcatccgggtggctgttccggaaccgtgacggctttattctggccgttttacaaatcctttccgttttttatttgaatgcgggcaaatgtccgcggatcaacaatccggtgtcaatggcaaatcatgaaaacttaatcatgtattacgtttatttttttgggataaatcatcttccatcaatatgataggaatatataacatatttaatatgaataaaatatgctattatcaagataacttggcattcaccggattgttgatccggtttactccgttttgccatgaagaaatccttgttgtctttagctttaatctcaagtaccttgcttgccgtagaggcggcaacggtgcaaattgatttcggacgcagtgacgccacgacggacggcgtactcaatatgaattatgatagtgcctccgccgctttgggcagcatgccgggaagcgtttctttggcatggagtacggcagaatggcctgtagcggcagacggccataccaccaccaagacggttgcggaagaagccgattggaaaaaccctttcaatggcagcatgcctttcagcttgggggacacttttcgtgacggtcttttaacgcagacggccgacgggtccggttctttcaccgtaacgttcagcggtcttgccgccggagagtatgccttgtccatctttggaggtttcacaggcaaggatgtgtttgccggtcaaacatggacgatcggaaacgccgatgcttccaatgccgtctggacaagcttcggcacagacgccagcggggactgggccgaaatttcttccgtgacgggcgataattccggagtccttactccggcgaacgcttccacttccagcgctactgccaataaagggctttatgctacggtagagaatgtcgtggtaggggaagacgggacgcttacccttacgattcagggggatgggagcaagggatacggccttacagcccttaattacctttccctgacgcaggttccggaacccgctacggcagcattgagcctgctgggcgctgctgcgctgttcctgcgccgccgcagggactgaccggaaagaacagacctttgttatcaacgccgctccgtaattcacgcggagcggtttttttatttggcgtttttcctttccctgtctatgcagcaggtcgtttctatcccggcctgttggccggagcaatgcctgccccattccggagaaaagccggaatgggaatgaggcgcgggaaaaagcgggaaaacggacttgtccgggaagagggagttattgaatggggatggtttccttcaagcaggtggagacgatggtgcgcgtaatgcgttccagcggtattccggtgattctggatacgatgcgggcgtaagcgttcaattggtttgcatggcgctcgcgcagttgctcaggggtatcggcatggtccgtcttgaagtccacgatgcgggcgccgcctccatcaagaatcagcctgtcaatgatgccggaaatccagttattcccgtcaatggcttcaatatgctgttccttcatgatgcgcgccgtttccggaggcgtgaaaagttcgcggatggatgggatttccatgcactccgctacgatgcgttccgcctccgtggcagggtggagagcccacgccggtttgttttcatcatcccagcgggtaatccgttcaaacacggcatggacggcggaaccaagcgcggcggccttccctgcgcctgcgtgtttttctccctggagcggggaggcttcctccgacaggccggaaggggatatccgttctctggccaacggtttttgcggaggccattccagcgcgtttttctccgcgcgtttttgtatgctttccgggaattcctcataccacccgtcaagaccgcgggagtacaggcatgacgctccggattccggaagtatgtcttccgttccccggttgaggggccggatagaggaacggactactttccacatggaatctgcctccgtttcttccttgtcttcccggtacgggaggataacgtaggtagcccgcttggcccgggtaagcgccacatacagcttgcaaaatccgtcgaattgctgccgggcgcgccattccccgtaaagttcccggaattgcgggatattcatatagacatgccgggagggggccaggacaatgccttccacaccgccctccccgttttttttgataaaatgggtcagatgccttccgtccgcaaaaggtgtatccctgccgatctggggcaggatgacgatgtcaaatcccagccctttggatttgtggatggtcatgatgcggacaattcccgcggcggggtcttcccggcgggtcaggtcttccatgcgcctgatccattcatccagggaaacgccttgttcgtccacctgttccgcctcattctgccagacggccaggcggtcgcggtggaagtccgtcagttccgcccctccccggagcaggcgctgttccagttcctccatgacggcggcgtaaccgtcccgttccagcaggaggcgccattccttccaccccatgctttccgggcctccctgcgtgatgaggggccggagaggggagtgggtgagcaggccgatgacaaaggggtctcccggcatcagcagccagcggaagaagtacagcaggttttttcccagcggagagtccacacctactggaacgtcgtcacatacttctgcagggatgccgtggtccgtcagccagcccttgatgacaagagcctggtttttcgtactgaccagtatcgctgtttccaggccgcggcgcagggcccctgtacgctccagaatatcggccgccgcctggcataccaggtcgttgttggcggagacgttttccgccttgggcgcctgccagatttgggaggtgccgggacggtcttccagatgaggggcgcaccggtgcgccggatattctccccactgttccagggcggcgggttcgcacccgggcgctgtccgggcatagtcgcaaatatcgttgaccaggtccagcacaggctggacagaacggtaggaagtggacatgccgcgttgttccagttgaagctgtgaagaaacggagcggaaaagctccgggtctccgccgcgccattggtacacgctctgcttgatgtcccccaccacgaaaatgctgccttcatttccggtcttggattccgccagatcatccagaaaaggcttgatgacgtgccattgggtctgggacgtatcctggaattcatccagcatccaatggtcataacggcagtacatgcggtattgcaggtcccgtttgagttccggcgtcatggtgccccctcccagcatgcgcgtaacgtcgtggaacaggaatctccccctgttgcggaccagggaggaatatttgctctcaaacaggagcatcagcccgtgcgtggcgcgggttcggcgcagcgtgtgcagggtttccatgcgaagccagctttggatgagttcttccagagcaggcgtccagaaatcccggaatttttcccgcgcctcttccacggtaatagcccaggcggaaccaccctctgtacggaagcgcacgcggcccagcctggcgtattgggaaaatccgttcaggaagcgcaggaacagttctttgttttttacgccgtttttcccttccggcgcaggagtttgctgaacctggaaaatcagggaatgaaggacggaatcaaattgttccagagagacgggtggcgccagctcctccggtgtgaagcccagcgtgacggggtttccccacatcccggcatccggcacatccagaaaaagttcgtgataggtgcccaggcggcgcatcatggatttctccgcgtctgcggcttccgcgtcagaatccgccccggaaaggaaagcgtcttcaaaatccttccttcgctctctgtttacggagcattcccggtacagggagagcagggcttcacggcgcgccagtttctccgccgtggggtcaatcatactgaagccgctgactcccagctcaaaggtgctggcggaggcaatttgggcaaacaggctgtcaatggtgcagaggttgagtcgcgccaaattctgtaccaggatgtgcagtaaatggaggaagcgttcccgatgcaggttttcctccttccatgcctccggagcgccgggccagagaccgggctccccgtccgttcccttgataaccgcccagagccgttctttcagccgcgccgcgcctgcctcatccgtggcccccgcggccaggtctgtcagaatgcggtccctgaattctcccgccgcttttcgggtgaacgtaatggcgatgaggcgttcggggtggttgccgctgttcagcgccagcaaccccaggaaacgcagggagagctggtaggtttttcccgttccggcggaagcggagatcagcatgttggtcaggggcggcatcttagaaaggcaggtggggggtgaggcggaggcccagcagatcctgcaggctttccctccgggaagtcatcaggtccttgaatacgtcataagagggcggtgtccagcccagttcctccgcagtaatgagaccgcgtccttcatgaagaagtttcatcagctccaccgtccaggcacaggcgctgtccagcgcgcattcttcatacccgggcatggtgtcgtggagggtgtcccaggaggagattccgatgtccatgggattggcggggagggcgtaataagccgcagagggatggcccccgtaggtttccgaggcccacagcacataaacgggtagctgcaggtctttccagcgcgcgtgcgccagctttccgtttttcaggcgtttggtgtagggatgcagggcaggggaaagcaggggcagggcgtccggtcgtccgaacggggccagatgctttttttcacaggaggaggccgctcccgttttgtagtcaatgacccgtatgcgcccgtccgcatggcggtcaatgcggtcaatgcggaatttcatggggaagccgcccagtatccagttttctacctggtgctcaaaggcaatgcaggaccatccttcctgaagggcctgcaaatgctgaacggcgtaaacggaaagcctctgttccatggagcgtttttgcagcagcaggggcatgaggggggaggggccgtattgtttccggaaggtttgttccagtatttccgtgatagcgtcctgaaaggaggctgcgttcatgccgtctttcaggacggcgtgttcccggcagaaacattccagcacgtcgtgcagcatggtgcccagttcgttgacggccatgtcctctttgtccggcaggaattcttcctcattcatgtgcagcgcctcccgaatccagaagcgcatggggcaggccaggaaccttttgaggacggagggggaaaaggccagccctttttccttccacgggtttttgtagccgggcgccatcgcgccgatgtcctcagcggtcttccagccttccgcgggttgaagatgccagtttccgcgctggtagggcaggggggcgggcacatcgctgatttcctggaaaagccgttctacgcggtgcggcagctccgcctccgggcagcgcatgagcagggatgaaggggtcagaggatcgttcctgctgctggtccgggagagaaggacggtgagactgccttcccgttcgcgggaatggagcagggcggtcagcagaaaactgtcccgggcttttttccggttaaaggaatcaatgcccagggtttcccgcagttcctccggcataaactggtcggaaacgcctccttccggtacggtcccttcgtttagtcccgtgagaatgaggtttttttccgggcggaagtgaacttccatccagcccagggaatccagcgccgcatgagcttttctcctgtttctgacgcgcagcggctggaggcatttcatcaggagcaggagagccgtctccgggctggaaaacgcggtggagcgctgttgcagacgcatgagcccggaaaggcaggaatggaacatttccatggcttccgtctccgggccatagatggttgccaaagccgggaaccattccatcagccgttcccccagcattcccggttccgccatccggttccgccattccagaatggcctggatggaaggaaaggcgccgggataagcctctttcagcctggaaagcaggtattcttccgtttccggaaggaatttctgctggattttgtccagtgcggcgcagcaaccctgctggccttttattcccagggaggcgcagagcagggaggagcgcgccagggaatagacggggcgcgccgtccccttttcttccagtgcccgccgaaggttgcggagcagatccatgacaccgcttccggcaaaaggcttcccttccggattgtggaggccccagccgtattggcgaagggctgcgtccagggcgacgttcatgtcaggatcgcaaacgcccagggcgatgtccggcgttcctccttccgctgtgcgggcgatgatgcggcacgtttcttcagccagccgcgccgggttggccgcaattctgatttgaccgtcgcggattgggatggggcgccgggaccactcttccggcagagggcatccccaggaatcaaaggaagcggcttcttcttccggcgcatgtatccatatctggacgggtacgccatttctttccgcatgctggagggcatggcgcaggggggggggcacctccgctgtgcaggccagaataatgtttccacctgtttccctcagggaattcagcagccggggcggggcttccgccttcatggcggtcctgtcttcaagcttccagctttccagttgttgcgtgcattgtccctccagcctttccatgtccttccagcgttcgtctctgcccgcacaggcatggtgggccatgatgcaggagacgccctggttcgccatggcgtgcctcaggttttgcaggctgccggccatttccagcatgctggaaaaatcctccggcatggtgtgtggaaacaggcggggataaaggcggtgaggcgttttccccagggccaggagccacccggccagttcttccggagcggacgccgtttcttccttttcttccatccgggggaactggtctgccggaatgacctggggagcaaagattgcctgtgtacgggaaatggaggcaaggtattccctcagctgccttccggattcccgtgtgggaaccagcaccagatgccggtggaagtcatttcccagggaaagcaggcgttccgctacagcacggcaggccggtttgtcccaggatagaaagaatcggttcatggcagggaagcaggattccccggaaagggggaaagcggaaaattacctgggaatgctacatcaggatggcgggatttcccatctatttttttcattattgccggggcggcgcatggcatgccgtgaggtgagccggcattgggccgcatgttgacggcgaagagaggaattattttgcctttccggcagggcgtggaggcggaaattcggaggaatggcatgtttattgttcctggacggcccgtttttccctggttccggtgaccagaagcacacctgtgaagaccagcaggacggagaggactttcatccatccgaagtggtccatgccccacatcaccgctacggatgatgcgatcaccggctggcagtaattgtacatgctgacggcggtgggtttcagcctctgctgggcgaaagacaggcagatatagctgacaaaagtagccagagccaccacataggcaatgcccagccatgtttgtacgggcagggcggaataatggatggaacccacttcccggaaggtgaaggggaggcaggcggctgcggcatacgtaaacatccatttcagcagggtgacgggagagtatctgccaatcaggttcttaaaaaaaacaaagtaaacggctacgctgcactgggaagccaggcagagaatgtcccccagcaggttgttgtctcccgggagggccgccgcatgcgcgccgctgccggaaaccagcagtatggctccgatggcgctggcgcagaccccgatgatttttttccccgtgaccatttcccggaggacgaacgccgccagaatcatggtcaataccggtgtaatggtggtgatgatggccgcatccgccggggaagtgaaccctacgcccaccgtgaaggccatctggttgaagatgattccgaacagggaggcgtaaaacaggggcagccgatgcttcctctctatgggttcccttggcacgaaagcggaggccagccagaacagggtggccgctcccagcaggcggaatgtggcgagagaagcggaacttacttctccctgctgcatgaccagtttactgacgggagacatgaggccccagatgacggccgccgctcccatcgcgatatgtcctttcagcacttctgatggcatggtgcggcccgctgcgcggcgggtcgcacattctccgcttccgcaagcggattgcaagagtttttagtacgggaaggagcgtggaatacaggggaaacgtgtctatccggagcatttggaaggactcgttattctgactcctctttccccgtcgtttccggcttttccctgaatggaaaataacaactccatattgtttccgtcgttaaagttcatttttgtttccttgcccaagccttgctgtggattggagaggaggtacaaaaataactcccccttgggttgatgcctgccctttttcggatacgtgttgatcgtggcgtttttgcccagtgctactgcggctggtcattattctgttcaacaggcatggaaatgccgattttatgttccctgctgttgccgcggagttccggggcgtacatggcctcaatgacggccggaagggcgctgaagcgtcccggacgttccgcgcgcaggcggtggctgatctggtattggcccatgggcagggaggaaaggaagaggcgtatttcttcatcccctatttccctgtagccgaagacggttcccagccgggcgtagccgctggcggtttcccgggattcgcagcctgcgggcctgggatccaggagcatgaggtattccacgtcgttcttcgttttcacggtcatcaccacttcaatgatgtcgccgctggcgatgacgtccccgtttttcaacagcgtgcgccgtgtcaggtctctgccctgggagacgagctctcctgcatccgtctgggtgtccttcacggagccgtttttcaccgtttccttccggatgcggtaataggagcgttccacggtgacggcattgccagcggcggggatggggtcttccagggagaagtagctgagcgtggaattggcatagatgttcccgctgccttttttcctgcggatggtgatgacgtggctgccgtccgccagggctttcccgctcatgcggaaagcattgtcaaaggtgaacagggtttccttcgtgcaggaaaccgttttaaccggaacgccgtcataaaggatttccgcctccatgtcctccatgccttccctggtctggaggaggtaggcggacagggcttccaggcaatccgccgtatccttggtggagtcccagtaggaaccgttggcgcggttgtcgagcagccattttgccaggcgcgccgtgacgggattgccgggggcgctcttggacatcagtttcaggtaggccgcctgcgtggctgcgctgctgccgtaccagcgccaccagtatcctgcattgggaaggcgcagccaggcggtttgcagggaatcgtcctgctggaggaattgggagatgacaggcattaccttgttgaagtcgtccatgcggtgggcgtccagcaggatttccgccagttgaatctggctgatgacgggaagttccagcctgtcacggaacaggtagcgttccataggcaggtttttcacgccgcattccgccaggacggagtagaccagggtatccgtcgcggaggccgtcaggcggtaattccccagtttgcggagggcttccttcttttcaggtccgtccggcagttgttccagtttccggaatttgtctccttgttcaagaagagctgtctggcgttcctgatagtttttcagccagcggacagcgccggaaagcatgccttccggcacgttgaccgtgtttgaagcaattttcaggccgtgagccacgtgggccgtcatgacgggatctccctcttccgcccctccgaaccatccccaggagccgttggagagctgtttttcccggagggaggagattcccctggcagccatctttttcagcgcggcttcatcataaacggggttgcgttccagttttttcatgacgctgtcatggaaggccttgttcctgatgtcccggggattcaggctgcgatggcttttcagcgccgctccgggattcaggccgagctgcttgagcgtgtccgtcacgacgagggcggggaggaagcggttgagcgtctgttccacgcagccataggggtattccgccagatagggcagggcctccaccatgctgagggcgatgctgggggagaccttgacgaccagttcgctttcctccctgcgccgctgctgcggcagggaaatggaaagtgtcttttcctgttctccggagagcactgcggcgctttccgcatggagctgcttcatgccgtgcaccagtacggggaagttcatctgcatggcgtctccggtagagccagccgatgcttccatggcgacggcggcggttccctccctgacggcggcagcccaccagttgacgactgcctgcccctgggcaggaacgtccacttcccgcacggcggaattatccgtatctgcggaaagcccctgcacggccggagcgtcagccgggagaagttccaggcacccgtctttcagggaaatggaaacgcgggcgcggatatcctttcccgtccggttgcggaccagggcgctgagcatcacgatgtctttttccacaaagaagcgcggggcctgcatactgaccatgaagtccttcgtggtcaggaattccgcggaagcttgcccaacctgcaatccgggggtgatgacccaggctgaggccttccatgtggtcaggttgtccggcatttccacagggacggcaacgtttccttcttcatccgttttgagcgtgccgcaccacttgatgcagtccgcaaaattggtgcgcagttgaatgtgcggggaaccgttttcctgcgcgtccgcatttccctgtccgtctgcaaaggactcgctttttgcactttctttgtccgcggccatggccatgaccggaacggcggcgggggcggccgctcctgtagccaatgcacggcttgcggcagcatcagcaccggaatcgaacactgcctccgcaaagccgttaacggtccctttggcctttctcgccataggtccgtaatttctgtagagcagggattggaaagagggctggcccggaccgcgatcctgctgcgtgccggaagccgtcatttttttcaggctgaggaagccggtttcgttcagtctgccccatacggttttggagatgtccgtaatattggggcgtgcgatgtattccagagccttgtcataaacggccagggcgacgatgccgttactgacgggtttgccgtccggccccttgacctgaatggtgacgttgccttgttcaccgggccggtattgggatttgcccggcactacggaaggagccagaagctgtccggcgggcggaatcagaagatcggcggaagcctcatgaagttctccgtttctgacggtgaaggcgttgacgcccatattgggcatgtcttcccgggtcaggcggcattccacaagggctgtctgccggtccagggaaaccagacggcgggattcgtttttccaggagttgcgcaggaaggtccagacgcgggcgtccggataatcagaggtgacgagcagcctggccgtatctcccggagcatattcctttttgtccagatggatggaaagaggattgattttaaaaggattttgtttgcccttgccgtaggaaaggaactggaaggattcttccaccttgttgccgtgcccgtcctccagggttgtggaaagggcatacaggccggattccccggtctggaaggacagggaggcttccccatctttcccggtggcgatatcccaggtttccagcgtttcccgtctgccgtccgcacggatatgctgcaggacgcaggttcccctggcatgggcaattttggcgccatccgccgtggctgcggtaatggatgcctggaccggcgttccggcgggggcatagccgcggttcagggtggtgaagatattaaacggacggaaagtggcaatgacctgtccggaagcggaaacttcccgcagggaggcgtccgtcacgctgacggaaacgcggtaggtgacgttgctggaggggaaatcccgggcatcctgcgccgtgggtaattctacggatgcttttccgtccttgtccagcggcaccgtcttttccaggacggtcagaggcgcatccgggaaaaagggaatgtagtacgggctgaaagacctgtcgtacagccagctccatttccagtaaggcgtccagatgttcgcccccagcgtccgggtgatggtgatggttgccttccccccgcttacggggccgcccgcgtaataatccgcctgaatggcgacgggaatgggttgtcccagccggataggtttggcgggggcatccattctgacggagaattccggctttttatactcttccatccggaaaaggggggcatacagccggaaatccggatctgcggagtcatgcagtttcagcttggccccatactggcccagcggggcgtccgcgggaatgagcagttccagttcaaagctgcctgtggaatccgtcgtgacggtctttggagggaaaatgctctcatcccctgttggagagacaatggtcagcgtcagttttttcccggcgcagtcttttgttccgggattcgcgatgtccgggtggaagaggacgcctttgaaacgggccgtctgtccggggcggtacacgggctggctttccaggaaaaagcaggaataggagtcggaggccttgttggccgtatccatgaggtaattgccggattcccagccgtagtcagatattcccgccagcacataactgtcccccttggaaacgatgcccaggaacatgttgtagggaggggcgctggaatggcggtgagggattgtttctgtcatggctccgtccttgtccgtgattccctttacctggcgtttttggagcgttttatcctgccggtagcggaggagccgcaggctgcctccttccacgggcattcccgttctggcgtccgccaggaaccagagattgccttccggaacggaacggcgtaccagcaccatgtctgacagagtgagaaagcgatggaaccggtagccgttttccagtgtgacggtgagcaggtaccagccgggtttgcgggtgggtacgggaatgtgagcgatgtggttcaggtgccggttcccgggagtcagggttatctcatcccccttgatttcctcccccagatagcgggcataggatgagtcatgcaacaggctgaaaagcaggttccccaggttggaatacctgtctttgtaagcttttcccagcgttttggaggtttggaccttgtccatgcgttcttcctgccaccgtttcatatccacggggcggaccgctacgcaggcccgggaagcgttgcggtaggagaaggaaacagtcaccggttctcccgccagcagcgttcttttatccgtatcaaatgttccgttgggttccgtgatggaggcgatgcgttttttcagattgtccgccacgtccagaaattcctccttgtcctttttgttccaggattgtgcgttccaggtttgaaggatttttcctaaaaactgcgcggcagcgggcctttggttgcgggccaggaattcgtccgctgccagattggcggcgttaacgtagtaatccggctccggcgttattcggacggcggaagcaatccggatgaagtcataatccgggggaaggttggtgagcaggaatttaccgttgcccgtccggtcggttttaacgatggtctggtccgtttttaattccgccgggttgatgcccgccaccatgcccgcgttgccggggccgtacacgaattcctggtccggcgccgtattggcataagagaacagccggcggcaccaggaggcggtgaaataattgacctggttggccagttccggattcgcctgaatggcggcgtccagtagccagcgcatgcgttccccgtcgtttttagctgtttcccaggaggaagaggcatggtaaaaaataacttccggctttcctgttccggcattgaccatgacgggaacggtggcgacgtttcgaaaaggggatgcttcctctctggagacgtaatccggcaattccttcaggttggtcaggttccccagggctgcgtaagactggaaggcggaaaggggagcgtagcggtttcctttgaccggcaacgcctgtgccgtgatgaagcgcagttgtcccagaagtttcatgttgttgcccttctccgcaagttgcatggctttgacaaggcaccgcagggcttccacacggtcccttgcttctccggaatattctccatcccatggcccggtaccgcggatataggcgccgtccaccagtttgaacgtatggcaggcactctggtacaggagtgcggcgtccctcaggaaatggggattggcgccgtggcgcttcatctgttcctgcagaatggaatccagattgatggaatcatccagggcattgagacgggtaagagcctggtagtaaagaagcagatctgtcccgctgtattggtcgtcatattcatggagttgtttcagggcctgttccgccgctttcttgaacagccttttgcccagaagcttttcaaggttttcaacagcttgcttcctttgctgcggggaaacaggggaatttttaccctccgcaagggcacgttgttgcggaggggtggatgcgtccgccggggacggcattccagaggccagcaatcctgccgccagaaaaagagcggaaaagaatctgttcattctgccagactacttccaagtaaaatctttggcaagttgcaagtaggctgcgggaaaagggagattgtcttaacgctgtcaacaaggccgggagtgagggaaggggtattccatgatcagacgtttttcccctttcgtcatgcgtgctgcatattactgcaacccagtcggtagatggcctggatgtcccggacatccagcttttccagtccgccgacggggccgcgcacactgacggcctgttccgccatcagggggaaatccccgggaaggatgttcagttcttccatagtcgtcggaagccctaattcccggtaaaaacgttccagacgggaaataccttcccggatgatggctgacggttcccggaaggaaccttccactcccatcacattgacggcgaactgcacgaatatttcctggtgtttgggggaaacatacttcatccaggccggggtgacgacggccaggcctgcgccgtggtgcacatggtacagtgcgctcaattcgtgttccatggcgtggcagccccagtcctgttcgcggcctacccccaacaggttgttgtgggcgatgttgccggaaaacgcgatttccgcccaggcgttgtaatcattcaggttcccgttcaggatgcgggcgtttttcatgatggtgcgcagggtggcctcacaaaggctgtcggaaaggtccgtatgcagggttttggtgaaatagcgctcaaaaatgtggctcatcatgtcgctgatgccattggccatctggcggtgcgggagcgtaaagaacaattccgggttgataatgctgaatacggggcgcagtttgggggaaccgtaccccagttttcttctggtctcttcattggtgatgaccgtattcgggctgctctcgctgcccgcggctggaatggtcagcacggttgcgacgggcagagggtcggactgaggctgttttttggaaaggtatagttcccatacgtccccttcatggggaacgcccagcgcaatcgctttggcagagtcaatcacgctgcctcctcccacggccagcacgaggcccaggccgtgttcccggcagaggcggatgccttcatacaccaggggcaacgtagggtttgcctggacgcctcccagttcctcatactccacgccggcggcttttaaggatgccgtgacggcatcgtaaagaccggaacgtctgatgctgccgctaccgtaatgaagcaggatttttttgcctaacggcttgagaagggttcccgtttcatggtgggtgccttttccgaaaataagagtggttttgttatcgtaaacgaagttgagcatggcgggaatgatacggcaacgctacggtccttccgcccccttctcaagatttttgtatggcctgttcccctttccagggggggatgctgttccggaggatattctctcatgcaggggttctgttcttctctgttttttcatcattggctcatctggacggagctttctggaggattgttttctttccgttgttttttggcgataagattcagcggaaatgactctctgcgggagtggcggcgccttccggccccgaggggccagcggaagacggttatttcattattctgggccgcttccggcaggtaatcggaacaatggccgtattcggccagggatgcgcggagaaaggaggggaaacgggaagtttcagaaatccgtaaaaattatcctggtgaatactgttcaaaatcacgatgcatggcatactcctcctgctttttgcttgagcgcggaggccttcccgtttattgtcatgcacgggccatgtccggtccccgtagttcaatggatagaacgggtctctcctaaagactagatgcaggttcgattcctgccggggacgccacccaatattattcagggctttgcatcagcattaaaaacgcagggattttgcctctcttgtgcgaggtatcgtcatggttgattgaatggggaatgattcaagggaaaagcaggtatccggattatcggtgtccggccggagagggcgaataacttgggattcatgtccgattggaaacaaaaagcaaatgcggaagaaagattgcagatagcaaggaaatgtgctaaaggctgccggagaagagcctttggggcggaacattgtgcttcgggacatgaacaggcaggcatggagcaatgtttcccagccgtacaggggatggatgaaagagcgttatgcaataacaaggacaagaagatggaggcaattaaaataatccgttatctgtcgcccgttggagaaatgatgattggctcatatggcggcaatctttgcatttgcgactgggcaaaggaaaaacgccgcggcacgatagaccgccgcatttgccggcatctcaacgctgaatatgaagaaggaacttccgaggttattgaacaggcggtaagccagctccgtgaatatttccagggggaacgcagagactttgatatacccattgtatttaccggatcggaatttcaaaactcagtctggcatgaactgatgaaagttccttacggttccaccatttcttatgcagagctggcgcgccgcattcatcatccgagggctgtccgggctgtagcgtccgctaatgccaccaaccccatctccattttcgtgccctgccaccgcgttattggcagcaatcagaaactgacaggttatggcggggggcttgatgcgaaacgggaattgcttgccctggaggcgcgggtaagcggaagtgtgctggccttatgacccgtgatgtgaggaagacaggcaaggacgtgtcaggtaaggctgttttgggaggctgctcttccggggcagcccggcagggggggcattaagaagcttccgcggttgcggctgaatttccggctgtcttcgtttgaatggaggtgccttgtgaggcacttcaccatttgaggagggtatttcctccctgggcgaatccggagagcagggtgcccattgctgaggttttctgggctctcgcattggagcggcccatgtattgctccgtgttggcgcggttgtacagggattgggcgttcctcatggcttccgccgcttcatcctgaatcctggtttgcagacgcgtcgccaaagcctgttccctgattggaacggagccttcccggagcagggaagattgggcggcgtccagtcgggcttctcccatttggcgcgcagcgtcctgctgcatgcgtttggcattttccatccctgtctgtttttggaggtctgcctcgttcctgagggtggcggcatttgcgtcctccgcctgtctggtggcttccgcgctttttttctgtgcagacgcggatgccgcacctgctgccgctgaagtagcggccagtgttatcattcccaatgatgctggatcaaatcccatgcgcgcattctgatatgaaaaacggttcaggcgcaaaacgcctgaaccgtttgacatgaatcagggtttggcacagaaggggttactcaatcacgatgctttcaatgttcagcaccggatgttctggagtggagtggggatcaatggttccggtaatgatgacggcgtcttgttctttcagcccgttcacacctttggcggagtgcttgatgggctgcccctgttcatccacgaactggacggtcatcgtgttatttttccgtatttccaccggtaccgtaccggcggcccagactcccttctccttcatattgaccaggagctgagccgggtctccgatggtgaaggaagcaatgttttttgaaaagacggggtcatctccgattaccgctcccttgacggtgactttgtcgcccggagccgcttttctggcatctgaaacgaccagagcgcgtggcaggccaaccatattttccgcgaatcttacggccatcttctgggtaacgttctggtcggaagtgagggcgtttacagtttccttgggattgcagcccatcagggaaactgcggccattgtcagaatgatcaagtgtgtggtgcgcatggaaactcctttctgttgaaaggttggattccttttctccttctgccgttcatcattccgtgtaaggaaaagaatattttttacaggaacagcccggcagccagcatggcgagatccctgagaacgtcccacaatttttccgcattgtggatgcaatccgccagaaagcggtgaaggcttacggcattgaacaggcgcaggagcgccaggaagagaagaagattggcaaaatatacgagaatcagggagaagaaggtgccgttgtccgccaggtccggctggtccttgggaatgatccatgccgtccagaacaggtggaagcaccaccagaagcccaggccggagtaaagaagggcctggcaggtgactgtaggccagaagaggtacgttacgccccataccaatccccacagcatggcccagagaggaaggaagtagggggaaagggagataaagatgttgtttttatccgtctggatgtaacctccgtccagatccgctttgaaagcatggatggagccgcggctgcaaatgaccgccagagcgtgcgtcagttcatgccccaatacgtacaggtacagcagggaggatgtgaacagcctgctgctgcccagcaccacccacacggcagcgcccatcagggcgtaccatacgggaatggagaagaggatattgaggctgccggaggcatgggccagctggtcgcacagggacatggccgtgatcagggccagcggaagcaagataagggtggctacggcatgcctgatgaaccgggttctgcgcgggagatccatgaaggaaaattcctggcattcgtcctcccagtattcggaggatacctgggcgcggtaagttttgtcccaggcgtcccggttgcattgccgcatcatgtcgccaaggcttgccgcggatcttggtttccgggcggtttctgcataccggcgccagtcctggcgcggcggtgtgtgtctgggggccttgggcatgcggtgtgaggtctggaaccagcataaagggacttgaggagaaatgcgaaccaaatttgcctcttccggaaaccggaggaaaaaatgttttatccacgccggctgttcctgtataatccgccgcatgcaagatgtcctgctggttctggaaacttcctgtgtgcagtcttccgttgcggcttggagcggggaaagtctgctgtgccaggcggcatggagagcggagcgcaaccattcctccgctattttcaaggcggtgcggcaggttctggatgctttggaagggcggcgtttgaaggaaatcgtggtaggttccggtccgggcgcttacggcggaatccgcgtagcgctggccgtggcggacggcctttccctggtgcacggttcccgcgtggcggctttttcctcctggaacggacttggtctgcatcatggtgaggcctgcgtaatgtcagatgcccggcgtggcggctggacgtgggggaggctggaaaacggcgttctgacggatgtgccggcagtgcttcctgcagagcaggcccgcgccagcgtggcggagtgcatgggaaaaggcgtgcccgttttttccacggaaacggcggatcatctggccgcccgggaaatgtcggggattgtccccgtgtatccttctgcagaggcgctcggggccgtgtggctgtccctggcggaggcccgcagagaagaacttctggaaagtccggcggaaccgctgtatgtgagggctccgcacatcacccgcgccaaacgtcccgcatgggccgtgaaggcgtaattaaggtttgactttttggaagattgttagacttttaaccggtaatattcaccaccagtagcattttttaacatgagcaatgacactttttccgagcgcctcgcatatcccaaaggtttaaaaggaatcatcgccaatgaatccgctttgagtgacgtgcgcggcgaggaagggcgtctgttgtatctgggctacgatatcgatgatctggtggagatgtgctgttttgaagaagtggtttatctgcttctcaacaagcgtcttcccaaccgtgaggaattggagggcatcaagaaacgcctccgttccgaccgcgacctgccccagcccattctggatttcttcaaaacggccaccaagtccgcccggcccatgtccgccctccggacggctgtttccatgcttggcatgtatgacgaccggacgaaggacgccgggcagttgaaggaaataggcctcagcctcatagccaaggttcccgtgatggtggcgtattactaccgtttgtgccagggtctggagcttccccccgttcgggaggatctgagcgaggcggaacatttcctgtggttgctgaagggtgaggaaccggatcagtatgaagcccatattctggaggtagcctacattctgcacgcagaccacggcatgaatgcctccacctttgcggcgcgcgtctgcatcgccacgctttcggacatgtattccgccatcaccgcggccatcggcacgctgaaggggccgcttcatgggggcgccaatgagggcgtgattgaaatgctcaaggaaataggcacggaggatcgggtggactcctacattgaggacaagctggcgcggaaggaaaaaatcatgggcatgggccaccgcgtgtaccgcgtgctggatccccgcgccccgcatttgcgacgcatggccatccgcctttcctcccgaatcggtgaacccaagtggatccgcatgtcggaacgcatcgcgaaacttgtccgggagcgcaagggcttgaacgccaatgtggatttttattccgccacggtttattacagcatcgggatccccaccaggctgtttaccgccattttctccattgcccgctgtagcggctgggtggcccaggttctggaacaaatggaggataacacgctgtacaggccgctgactctttacacagggcccaaggaccgcattccggttcctacgatcgacatgcggtgacaggttttaatcaggaaaggcgccggaagcaatatccggcgcctttcctgcatctgccttccgctttttttcgtgaaaatatcctttctatccgccggcggtattcgaccgtactgttcattgtcctgggctttttccattatagccgtagcggaaactcaagaaattattgaatagcaatatgccgtgatcgcgggtggggatgaagcagatgattttttcagttccctgggagactatacgggattcccataagggcatgttctgggatatctgcggagccgactcttccttgattctcttttatctggtatgcccctgacggaggaaagacgcggaacccgcctcttcatggccctgtgttctttggtggtggaacccgcagaacatccatgccgatgtggagaggcaggcggggggccgtcaaatgccggtctggcgcagtccttcataaaggacgacagctacggctgtggatagattcaggctgcgggctccttctccgggcatcggaatagtcagggcggtatctgcgtgttctctcagcatgctttccggcaatccgcgggattccggtccaaaaaccagatagtcccctgcgtggaaaaccgcatcccaatgggaacgtggcgccttggtgctcaggtaccagaactgcgcgccgggggctgccgcttgcttcaattcctccaggctgtcccagacatgcaggtccaccttggcccaatagtccagacccgtacggcgcacatgcttttcatccagactgaaccccaaaggtttgatcaaatggagcctggagcccgttgccagcgccaaccgtccggcagctcctgtattatgcggaatttccggatggaacatgacgatgtggaaacggggctgcatgcgcttattctcatcacaaacaggcctcccgttcaagtgggacttgtccaaaagtggcaaataatgtacgttttcacccgatgagagacatcgtatattttgatttggaaacccgtcattccgcggcggaggtgggcggctggcataatacggccgagatgcgcctttccgtgggcgtgacttattccacggcttccggcaaatatacgatttattctgaggaaatggtggatgatctcatccggcagctttcccaggccgacctggtggtgggttacaaccacgagcatttcgactatggcgtgctccagcgttatacgatgtggaacatgattgatatcacgaacaaccttgatttgtgcaaggacatcgaacagcgcgggggagtgcgcgtcaagctggattccgtggcggccgcctccatcggttcttcaaaaacggccgtgggcacccaggctctcaaatggtgggcggaatacgcgcagacgggtaatacggagcttttaatggatatagcccgttattgctgttttgacgtgaaggtgacgcgggatgtgcactggtacggggcggaacacggtttcatccgttatgatgataaaaagggcggccaggtggaattgcccgtggattggaaattgtaacttttcctgcaggcatgcccggtcggctgtggccggttttttcccgggcgctgaagtgggtctggtttcccgcctttggcggtgttgccgtttatccccggacagatgccggttatcagggaatggctggggctgagaaaggcttccgggaggaagcggacggcaaccatgcggttgccgcctggcttaacggcggttgatgcgggccacttcccgctgggcttcgcgcatttccacgcgggctttcaaatcgtagcgctggtcgcggtgggttttgcccttgcccaggcctagagccagtttcaccttgccgtttttccaatacagcttgagagctaccagggagcagcctttctgggaagtctgctgttccagtttgaaaatttcccgtttatggagaagaaggcggcggggccggcgcgcctggtgctggaagaattctcccgctgtctcccagggctggatgtcgcagccgtacaggagcatctggccgttttccaccctggcgaaggaatcggcaatattcaccttgccggcgcggatggatttgacttccgttcccttgagttccatgccgcattcgtaggtgtccagaatttcgtaatcccggcgggcttttttgttggtggaaatgtcggagctcatggcacgaaggggagaaggatgaaaaggccccgggctgggagaccggggcctggctggatagagatgattccgtacggaattccggtccggaaaggcaataaagggaatgtattgttactggttgtcttcctggaggctgccggattccgtatgatagacgagtttgccttcaatgatttccgtcagggcaatgttcgcgttgcccatatggggcgtggtgggcaccagcggggcgcggccattattaagctgggctacgcggcgggaaaccacgttgatcagcatttggggctcgggaatgattttggaggcttgttcgacgagttcggctttcatgtaaaaaggtctaggtagatatcctgatgcggagagagatataaaaacggttcctgtccggaatcaagcttatattacggcatgagctgccttcgctcacgggaatccagttctttccatgcgccgggtttcagtcccgccaaggagaaatttccgattctggcgcgaagaagccggagtgtgggaaaaccgatggcggcggtcatgcgccgcacctggcggtttttcccttccaccagcgtcaattccagccatgaggtgggaatggaggcgcggtagcggacgggagggatgcggggcggcacgtcaggctccctgcgcatgaggcgtgcccggcaaggcagcgtgcagtgcccgcggatgcggaggcccccgagttccagagggcgaaggtccgtttcggaaggagtgccttccacctggctccaataagttctgggatgcctgccggaggggttcaggagacggtccgccaggcccttctcatcggataaaagaagcagcccttccgaatccgcatccagccttcctacaggatacacgccgggaggaaacccagattcagccagtgtccggtggtggggagcctccttcgtaaattgggagagaataccgtaaggtttattgaacgccagaatcatgccgtgcacggcaagggtagcatgaaccgctggctttggcacgggaaattgaagcggcttgacttgtctgtgttggggaaggaaagtatctgcatgcatggaaaaacggcaggttgtgtcctgatgcttgcgtgttgcgtgcccgtctgggttcaggcggcgccggatacgggggaagtgaaggcaaaaattgcgcggaaaatctggcaaaacgaatgtgccgggacaataagggggctggtttcctggaaccggggagaggcgtttccatccctgggaatcggacatttcatctggtttcctgccggagtcacggaaaggtttgaggaaagtttccctgctttcattcagttctgccgcaggaagggaatctgggttccggaatggttttccggagcggctccgtggcggatcagaaaggaatttgaaacggcggacgttcgcggcggtcttcctgaacggatgcgccggtggttgtccagcccggcggccctgcaaatgcaggcggatttcattattgccaggtctgtggccgctctggagcgtatcaagggccagtcccgccgtccggaagagatggcggcccgctattacgccgtggcgtcggttcccaacggcatgtatgccctgattgactacgtgaatttcaagggagaaggaaccaatccggcggaacagtaccgggggattggctgggggctcaggcaggtgctggaggaaatgcgccccgtttctcccggacagcctgcggcggttggatttgcggaagcggccaaaagggtgcttcagcgccgcgtggacaacagcccgccgggccgcggagaagcgcgctggcttgccggatggcggaaccggtgcgattcctataagaggaatttgtgacgaattcctttcccaacagaaaagaccagttgtgcaattatccttgacctgacggggattagggtgtaattccctcactccatcctgaaacttcgctgattttatgccaaacactcaagaagaaacaacgctgattttgctgaagcccgactgtgtgcggaaaaacctttccggcaccattttgaaacgttttttgtccgaagggtttcgcctgcgcggcataaagatgatccagcttgacgaaccggtgctccgggaacattacgcccatattctggatctggtcatcaatggggaaccgcttttcccgaagctgcttgatttcatgaccagttctccggtcattgccattgccctgaaagggcccggcgttattgtgcgcgtgcgcgaactgctggggcccaccaattcccagaaggcgcagaagggcactatccgcggcgatttcggaacagacagcatgatgaacatctgtcatgcgtccgacagccgtgaatccgccgccgtggagctggcaagatttttccgggaagaagaactgtttgacggccttaattaagggaaggccgccttttcccatcaggtttcattgagggccgcagctgtaataacggctgtggcccttgccgtatcggggctgtgccttccttgggaggatgaagggggaaggcagcggcttttctgggagaagcaggaaagaacgggttacttttcccagggagtggtaagataaaggaaggcctttttcatacggtaggcctcacgcatgaagccgtccatgatattgttgcagctgtgtttggaaaaggaaaggccgtaaatgcgcttgatggcggcatcctctccgtgctgcttctggcgctttagctcagcgtccatgtcccggcattcgatattgggggcgctcagattgtcgccatgccagcgaaaatccgccagcagcctgttgtaatgcacgaacttcttccccgcccggccaaggcgcgcgtaatattccccgtccatgtcgtagtggaagcgttcgtccagcaggaacccctcttcaatagtagtgctccggcgcaggaacaatgcggtggaagccagataggtgccgtaccagatgtgcatgttcagactgtagggcagggccttcatggcgcgttggatctctccgtccggcccgatgaaattccatgctccatacacaatgtccgcatccgggcgggaatccgcaaaggccttgaccgccgccagagcccccggcagcaaccggtcgtccgtattcagccacataacccatttcccgcgcgccttgcggaagccgcggttaatgccttccgacatgccggaatccttctctatatatagtttcaggtgagggtaggagtgcaggatatccagggtgccgtccgtggatcctgcgtcctggataatgtgttcaaatgtaaccccttcctggtttttgacgctctctatgcattcccttacgtagcgggcgtaattatagctgggcgtaataatgctgaaatccggttctgtgtccataggcaaggttagttgaaaggcttgatggaacgttccctggcgatgtaaatagggcgctttttaacttccgtataggttttggccagatattggcccaaaatgcccaagcacagcagcacgatgccgcccatcatgcagaagacgcataccagggaagtccatccgtaagcggaatggggccagatcaattcgcggatcgtcaagataatgatggaaaggaatgagatgaaggaaagaagtacccccatgatggaagccagcgccaggggggcggtggaaaaggccacgataccttcaatggagtacaggaacagcttgaagaaagaccacttggtttctcctgccacccgttccacattttcatattcaaaccatttggtccggaaccccacccattcgtacagccctttggaaaatcggttgtactccttcagggaaagcagggcttccagtacgggccgagtcatcagcttgtagtcccgggctccgtccacgatgcgggtgttcgatatctgatgaatcgtcttataaaaggcgcgggcgaaaaaggaccgcagcagcggttccccctgccgggtgacgcggcgtgtccccgcacagtcatatccttccttttcaatggctttcagcatatccggaagcagggaaggaggatcctgaaggtccacatccatgacggcggcataatcccctgtggccgcttccaggcccgcatagatggcggcttctttcccgaaattgcgggagaaggaaatgaattttacttcaggggagtgttccgccattttcttaatcatttccagggagcggtctgtggaaccgtcgtccacgaagataagttccggggcgtagccctccaggcattccttgaaaacccggtctatttcttgcttgaacgccggaatggcttcttcttcattcaggcagggaacgatcagggaaatacgtttcatgtcagtgcccgaatcatacttcagaagccgtgcggatgccagaaaatatgcacaaagccttcctccgccggaaggggaggaaggctgccggaaaagaagccgtgcgtggaaaaataccggtaaggtcagaacttcggcaggttgccgatgtcatcttcgttttcaggggcgtgcgggtctttcaaatcactgtccccgtcttttccgaaagaccagaaatcataatccggattcaggccgttgcccattttcaggtttctggccctgtcggttctggtggggatggattgctcgctgcccaggcggtagcggtagggggaaccccatggatccgcaagaatataaagggtaaccggcctgccgtccttgcttttcacatggacttcccggacagtcgggttgcttttgggctgtgtagaggggttcaactcatcattgtaaatggttgtatccctggaaggaacaccctcattcttatggtcgccgaacagagccatgtaaaccacgttggaactgtattcctccccgttggccacggctacgccgtgattgttgaagggagcttccgtgccgtaggggtagcggtcatggtcgctgtggtagctctccagccccatttcaattttgcggacaatggattccgtagcctgttcgttctttctggtttcaagccaggtgtaaatggagatggtcagcgtggccagcaccacgatgatcaccatcactaccaggatttccatgagggtgaatccctttgcctcccggagccggcggtatgcggagtgatttttcatctgattctgcttgaggggttatcccatcttttcaataacctgcaggaggggaaggaacatggcgaacacgatgccgcccacgaccacggccaggaatacgatcatgatgggttccagcatggaggtcatagctcccacggcattgtccacttcatcatcatacacgtccgcgattttcaggagcatgtccggcagctggccggtttcttcccccacgtccaccatggagattaccatgggcgggaaaagcttggaggaggacatgggcgtaactacggattcgccttccttgacggagtcatggatgaggccgatggcgtctcccacgatcatgttgccggcggtatccttcgtgatggtaagcgcctggaggatgggaacgccggaagtcaccagcgtaccgaaggttcgggcgaagcgggcgatggcgcttttgctctgcacattgccgatgaccggcatggtcagcagagcggagtcaatcttgcggcgtccgttgggcgtcttgctcatggccgtgaaaacagcgtacaggatggcgactaccgcggccagaatgacggcattgggcacaaagaagggggcggccatgaaccagtcgctgatgccgaacacaaactcggaaataccgggaagttcctggttctgttctgcgaacatcgccttgaatttgggcacgatgaccagcatcaggaagatcacgatgcctacggcgataaacaggacgatggagggatacaccatggcggagatcaccttgcttttcagcttttgggccttttcctggtattccgccagacggttcagcacgacttccagcacaccgcccagttccccggcctttaccatgttgacaaacaggcggtcaaaaattctggggtgttgggccagggcttccgagaaggtggagccgccctgaacggaatctccaagagcctcaatggttacgcgcaggttggggtttgcctcctgtttggccagcacgttcaaactctggagcaggggaagccccgcgtcaatcagcgtagcaagctggcgggtgaaaatcatcagagccttggccttgattttgcctcccagcttgcctttttgcttcttggctcccttggcctttttcttggcggcaggcgtctgctgaatcttgcccttgcccgcttctacgatctgggtggggtacaggccatgcgcccggatggattccatggcctccgcttcggaattggcctccagggtacctgttttctggtcgcctttatggtcaagtgctgtgtattgatatttaggcatatatgttgtattttaagtgttttttcttagtggttgaaataaggggaagcaacggcgtccggctgtccgttaagtatatttcagcacttcttcaatggtggtgttgccgtcataaatatttctcagcccgtcttcccgcagcgtggacatgcccatttcaatggctttctgcttcagcaccacggaaggagcgcggtccgtaatcatgtcgcgcagggtatcgttaatatccaggagctcataaatccccttgcggcccctgtagccggaattggagcatttatcacagcctcggcccgtgaaaaagtgcttgtctcccagttcatagggagagacgccaagctgggagaggatggtggatgagggttcatacggcgtgcggcagtccggacagatggtgcgcaccaggcgctgtgcaagcaccccttccagggaagccgccaccaggaaaggttcgcatcccatgtccaccagtcgcgtaatggctccggcggagtcgttcgtgtgcagggtggagagaaccaggtgacccgtcagggatgcctggatggcgatctgcgctgttgccatgtctcgcatttcccccaccagaatacggtccaggccctgtcgcaggaaggcgcggagcaccattgggaagtccaggccgatggcttcattgataggaatctggatgatgccgtcaatatcgtattcaacagggtcttccgccgtcagcaccttggaatcaatggtattgatttcacgcagggcggcatacagcgtagttgtcttgccggcgccggtggggccggtaacgatgaaaatgccgttgggcttgtggaccgtatccagaatatattcgtggatatgcgcgggaagccccaggttgtccatgttcaagttgacggaagagcggtccagaacgcggagcaccacggattctccgtactgagtgggaagggaggaaacgcgcatgtccacggaacggtttcctatctgcttgacgatgcgtccgtcctgcggaatgcggcgttccgcgatgttcatgttcgccatgactttgacgcgggaaatgaccggcacggacaggtggacggggggaggctgcatttcatacagggcgccgtccacacggtagcggattttgaattccttctcaaaaggttcgaagtgaatgtcggaggccttttccttgatggcctgcgtaatgacgaggtccacaaagcggatgacgggagcggcggcggagtcctccgtctcattgttgacctgcatgttgttcagctcctgcatcaggtcggacatggcggcggattcgcctccataaagctcattgatgcgttcggaaatctggtaatccggcgctaccagaacatggatgtcctggccgagggcgaagcgcaggtcttccaccgtctggggattcaggggatccaccaggcagacgtacaggccttccggaccatgccgcacagggagcgccccgtgcaggcgcacgagcgtggccggcatcatgttctgcacgttcgggtccggatggaagttgtccagtgtaatgaattccgtacccaggtcgctggcaatcatctgccagatatcatccttgctgccgatgatgccgaagtctgcaagcacttccggcagttccttgccggaggcgatcatttcctccttgatgtcctttgccagggatttgtcaatcattccccggccgatgaaaagttccagtgtgaggttggtgtccataataagcagaatgaatagcggggaaaaatcagttggcgtctcccatggtgacgttcagcacttcttccggagaagtaaggccggccagcactttgcgtacgccgtcttccctcaaggttctcatgcccagttcccgggcgcgctggcgcagctggggggaagtcaggttttcgttgatcatgcggcgcacctcgtcgtcgatttcgaaaatctcaaacagccccatccggcccttgaatccgccgccgcggcaaaagtcgcagccgtggggcgccttgatttggccctgggcaaggcgggacatgtcaatgttcagcgtatgcgcctgcttttccgtcagagtgccgtccaccttgcagcggtcgcacagcttgcggacaagacgctgggccatgatggcgcggacggaggaggcgatcaggaagcgtttgatgccgatgtccgccagacgggccacggcgctgggagcgtcattggtgtgaagggtggagaatacgaggtgccccgtcagggaggcgttgatggcgatgctggctgtttccatgtctcgaatttccccgatcatgatgatgttgggagcctggcggagcatggcgcgcagggcggcggcgaaggtcatgccgatatccgcctttaccattacctggttgatgccggagagttcgtattccacagggtcttccaccgtgatgatttttttatccgggcggttgatgtggttcaggcacgcgtaaagggtcgtggttttaccggaaccggtaggagccgtcaccaggataatgccgtccggcagcgtgatgaggcggtcgaacacagcttcatcatccgagaaaaatccgagctggggaaggcccagcaccagggcggatttgtccaggatacgcatgacgatgctttccccgtggttgctggggacggatgaaacacggaggtcgatttgcttgccgccgatgctcatctggattcgcccgtcctggggcatgcgtttttccgcaatgctcatggtggtgctcattaccttgaggcgagcgatgatggggctgagcagttttttgggatgcgtggccacttccaccagcttgccgtccacgcggtagcggatgcggagcctgttttccatgggctcaatgtggatgtcggaagccctcattttgaaagcgtccgtcagcatctgctgcaccagccggataatgggagcatcctccccttccagcccgtcggtttcttccggaacgctcaaatcccggtaaaattcattcaaccggctttccaccgcgctgtgggtggcgacgctgaaaatcacatcccgccccatcagctggggcaggctgtccatggtttccagattcagggggtcgtcaatagcaatgttgatggaaaaaccgtcgtcggaaatggggatggcccggaagcgcctggcaagttccggcgtaatgagttcgcgcacctcctgggggatgtgcatggagcccaggtccacgacggggagcagggagtttgacgccgccacctgagcgatgacgtcttccgtaagataattggcctgaatcagaaaatcgaccaggtcctgggtgggagatttttgactgcgcgcgtactgaagaatttcttcattcagatatccggcctgcgtaagaagttcgatgagatatgattcgttggagtacacgtcgatctctggatgctattgttggaagtctgccgaaatggagcggcaggatactcccctatttctgacaggttcggaacgtaaagtcaacttagcttccctcaaaatggcattttttttcgggcgtgtccggaggcgggaagaacctccttccctctccgccgcttttcaaaccctgcggaatcttccggaaagcgggattttccctgtactcagggcttctggcgggggagcttggaaagcaggtcttccagctccggcatgctggatacccgcaccaggcgggaacgcatttccttggcgccgggaaatcccttcgtataagccaggattcgtgacctcatatggcgcatggtgtgaagttcgtccccataatggcgggattccagggccatccgggcatgccgcaaaatcagggccgccttttcctgcgggtctctggccggcggcatggttccgtgcagcagataatacttggcgtctccgaaaatccatgggttttccatggccgcacggccaatcatgacgccgctgacggccgtattttcttttacataagctacggcctgcggggtggaaatatccccgttcccgatgaccggcacggacatggcccgcgcgcattcgtcaataatgtcccagttggccgttccggaatactgctgggagcgggtgcgcccgtgaatggtgatcatggaaattccctcattctccagcaggcggcacgcgtccatggcgcacaggctctgaaaatcccagccaatacgtattttggccgtgacggggattctctctcctacggctttcacgacgcctccggcaacggaagccagcaggggaaggtctttcaggagggaggaacctccatttttgccaaccaccttgggaaccgggcagccgaagttgatatcgataaaatccggcttttcatggtccaggataattctggccgcctctcccatgtggttcccatccgctccgaagagctggatgcctatggggcggtgggcattttctatctttgtgtacctgcggtttctttcccatgcctggagaattccttccgcagagacgaattccgttaccattacatccactccaagctccttgcagatagtgcggaaaatggggtccgtcactccagccattggagccaggaacagcgggaaatccgttttgaagaacgggaggggagcgggacggttggaaaaagtcatgattccttaggatgaggctagcacgggttcccgtcccattcaagcatcttgcctgttctggcgaagaagggaaggtgcaagatgccggtgctgtgcaaacatcggagcgtcgaaaatatggcgctcaataaagaggtgcagtagtccgcccggttttccggaggaaattgcaggcgcgctggacagtatcgtttgttttcgggaagaaaaaacggcttcactttttgagtgaagccgtttggcaaaagttgaaagattgtcttaatggttgccgcagccgcaaccgccgtccttatggtcgtggtcacacttgccgtcgcaatcgcaattttccttgtcgcactggccgccgcaggagcaggaggactgggcgctcatggcgcgctggcgggcttcctctatttcttcaggagtgggagcgcggccaaggtcaatggacatgcccagataatgattgatggtgttcaggagttcgtcaatggtctggcgggcttccaaaaagccgcgggccgcatcattcttgatgacgttttcacgcagggcgtcgaatttggaaatttcctcttcggtaggaggcattccggccaggtgcttgttgcgcagttcttctccgtaagcgtttacttcttcaaaaagcttggttgcttccggattttggaaaaagagacctatttttgccttggaggccacaaccttgtcttccttggcgagcagattgcaaagggcttccgtggcggcgcgcaggttgtcgttgagaacgggggtattcatatgggatttatttaatcatgcctttttgtgcagggcaatccggttgcgaggcatggcgcgcatttccttgccgcaggtttgctgcaggagggaaatccggaagaataaaaaggcgttccgcttgacgtggaacgcctttttatggtgatcaacgttttttaatgcgccttgcagaattcttcaaagcggtccagagcttctttcagaatgtccagcgtggtgcagtagctgatacggatggccttgtcattgccgaaggcgatgccggggacggccgcgaccttgtagcgttccagaagcttgtcgcacagattcagggaggtgagtcccagcctgcttgtgtccacaaagaagtagaaagcgccctgcggctccacaacgctgatattcgggatggcgctgaggcgggagtaaacgtactggcggcgcatgtcatattcgtcgcgcatgtcgctgatgaagctctggtctcccgtaagggcctcaatgcctccatactgggcgaacgtgcagacgttggaagtggtgtggtcctgaatcatctggatggccttggcaatggctgccggagctgcggaatagcccaggcgccatccggtcatggcgtagcccttggagaagccgttgatggtgatggtcaggtcgtacagttccggactgagggaggcgatgctgacgtgcctggcgtccccgtatacgaggtgttcgtaaatttcatcagccaggatgaggatgtcttcgctcagggccacttctcccagggcgcgcagttcttcttcggaataaacggacccggtcggattgttcggggtagtgaggatgaccatcttggtgcggggggtcatggcttcctcaaattgttcggcggtaagcttccatccgttttccgccgtggtttccacgatgacggggatgcctccgcacatgcggaccatttccggatagctgacccagtacggagcggggatgatgacttcatccccctcggatacggttgccatgatggcgttgaaacaggcgtgcttggcgccggctcccacggtgatctgggtgaaatcgtattccaggttgttttccctcttgagcttttctgcgatggcctggcggagtgcgggaagaccggcggaaggcgtatatttggtggctccgttgttcagggccgcgatggctgcctgcttgatgttttccggggtgtccatttcaggttcaccgcctgccaaaccgtaaacttcttcaccggaggctttcatagccttggcccggttggtcaccttgagggtcagggaaggggtcaatgccgcaatgctgggggaaatcatgtccattgttgtggtgcagtcgtagattttgatgccctggcggaaaacaggctgttctccgcataggcggaaaaactttactcattgagcgcacccctggcaaggagaatgcttgcggcggccattctttttcttgcgggggacgttcctccctctatggaagggatttttcccgtcagcgtttcaggaatttggcgcgcaccgcttccagctccggcgtcttcagcaggaaagccgccgccaggtaaacgatgccggcgcaaccgcagaccagggatatccccagcaccctggccgggaaggtccagttcaggaagccctggaggaaccatgccttgcctgcccagcacacggcccccagcaatattcccgccgccatgatcctggccagtccggaaagcagcgtccgtccgtctacgccgcccagctggcgtcgcaggtaaaagaaataaaagagaaaattgaaggtagtgaccacggaggtggtcagcgccagccacgccgcgtttttatgcaggatgtagacgaaacagtagttgaggccgatgctgatagccagagccacggcggcggcaatcaggggaacccagcgtttttcaagagccaggaagacgggctgcaccaccttggtcccggcatagcccagcaggcccagggaataggctcccagcacttcccccgtgtaacgcacggcctcctggttgaagcggccccactggtatacggaggagacgaattccgttcccaggatggagaggatgagaaaagcgggtaccgcaaagaatgccaccagccgcaaccccttggcgatgtggacagccacctcttttctgccgtctcccaccatcatgcgggaaacagcgggcagcaccaccatgcccgtcgcaactccgaagagccccacgggaagctgccagaggcggaacgccgtggtcagggcggtgacggagcctttttggagatccagagcgaaccccgtattgatgaagatggtgaactgcgtcacgcctgaagccagcacggagggaagcatcagcccccagattttgcgcacgcggggatcgttccattggaaattgggtttccagcggaagccggttttgctgagtttggggagctgcacggcaatctgggccatgcccccgatggtgacgccgcaggcaaaaccgtacaaagctttggggccgaaggacggatcaatgaaatatccaatcagcaggccgagcaggatggaagtaacgttgaaagcggcggaggccagcatgggcaatccgaaaacccccaccatgttcagcgcccccatgatgagggcggacagggaggcgaatccgatgaaaggccacatgatgcggctcaggtccgtggcgaacaattgctccgccagagagtgatccccgctgtagagggcttccatgacgggccctgcaaatagaatccccagcgttacaatggcgatcatcagggcggaaagctgggtagctaccttgttggtcagttcccacgcggcttcgtctccctgcgcttcccgcgttttggaggctacgctggtataggattgggaaagagccccttccgcgaacagatcccttaacaggttggggatacggaaagccgtgtaaaaggcgtctagggctcccgtggccccgaacagggaggtgtacacaatttccctggccatgcctgtcaggcggcaggcgaagatggcgcctgaggcaaccaggctgttccgcatcagggacatgaaggggggggaatttatttgaacagctggcggcaatacggctccacccgtttcattgccgggttgtccttgacagcctggtcgcgatcatcccggcaggggaaaaggtacagggcgtatcccccgtagccgcctcccaggtatttttttgcaagggcattgggaatttccggaagggggcgcattccttcgtcaagctgcacgctgtagtacagggctacgcctgccgccagagtattgatgttgcgttccagcactccggtgcgggcaatgagggaggattgggagatgcgtacgtagtcccgttgttcatccgccatctttggggtgtcgtgttcttcgcccgtgtatagaatggccattcttccttccaggaagtcgcccgtgcctttgacgtccagtaccggagaactgccggaacgccatacgcacaaccctgtttccgcaatgacggcaggatcctgccagccgacgcccagagcgagttcggacgcgaccggatcgcgcccttccagcatggcccacgcgccgctgcctcccagcccggagcgtttttcatacggccattcgcagagggaaaccatgggggtgatggcgcagttgaccacataggagccttttctggcgtagcggggcacgtccagccatcccccggcaaagtccacgcgaagcggtacggcggacggagccttgatgcggttcaccagcatggtggtggagacgggagtgaatttggggggcgtcttggggagcaccacgtaattggctccgacgcgggcgcacagctccttcttgatatcgctgtaaaggtcatcttccgtcacagccaggatgtccggtttttcctgaagaaactcttcttcaaaatccaggccctttttcatgccggtacccaggataaccttgtcaaccatgcgcaggctttccagcagaacttttttgtgttcgtccggaatggacggcttgcgctgcttgtggtgccacagcacgggttccgaagcgaaagagacgattagatagtcgcccagagcgcgggcttcttcaaagaactggatatggccagcgtggacgatatcatagcagccggagacgaaaacttttttcatgcgtgtaatgatagataattagtctgcaacagtatgccctattgccgtgccggatgcaagagcgagatgaaaatgcgttaaaaaacggcgcggactacagaaagcccgtgccgtttggggataggaaaaatcaacttctgcaaaaacggtcaggaagccatggcctcctggtagcggcgttccacatcgtcccagttgatcaggcggcagaagtcttcaatatagtccgcccggaggttctggtgcttcagataataggcgtgttcccaaacgtcacagacgagaatggggacgagaccgggaatttccagattctgatgtttttccgccccgcagattaccagcgtcttgctgatggggtccacgcccagaatgccccagccggaaccttccacgccctgggaagccgccttgaattccttcatcatggcttccagagacccgaatttttccttgatggcatctaccagaggaccttgcggctcttttttgggatcaggcgtcatgttggtccagtaaatggtatggagaacatggccggaagcattgaaggacaagttacgcacccagttggtggtggcggaagcgtccagtttcccgtccgcaatttcacggagcttttcagccgcggcattggcgccggcgacataggccgcatgatgcttgtcgtggtggatgcgcacggttttttcatccagcatgggttcaagcgcgtcgtaggcgtacggaaggggtggcagtacatatttgccgtcggcatagccgatcgtggaggggtcttgctgtttagtcatcttgtgctgtggttgtatgaatggccctgttgcccgggcctggctgattgttcccagcgccgccaatgaggaaagagcaataaaacgccttctgttcatgtccgcgccatgggaatgcatgggtgtttggacatggattgttttggagttgttcaaaaaacaggaacctcggtgttctatttttcttcttgtagaggcagctgggaaaaagcttttctaccttctggcggctgctgccgggccctgggctccataggcgctgacgcccctgacggcgacagatcctgcatcccccaggaaggatttgggcagggttacgcgggtctggctgcccggcagaaggatgcgcgtagcccactggctgccgtagcgcgcctggacggcccatttccgggagggattgccggacggctgccaggagagggttacggtggaaccattgtccgccacataaaaattctgcggttgtccgggtgtgccggttccgcaccagggcatggcgggcggaacggccatggaggggtacaatctgttcaggtatttctggatgcctccggcattccgcatgatggatttgatgctccagaagcattgcccgggggcggttctggcaaggctgcgggagtagttgacctgcgccgctatttcagaggcggggcggcccgggtcttcgctgctcatgatacgtgccgtggcaatgccgggccacaccgggcgtctggagttctgggcggcccaccattgcatcaatgcgggaaagctctgcttggccgggctgcagcgccagtaaagctggggggccaggtaatccacccacccgcgggaaagccacttgcgggcgtcgcacgccagatgctcgtaggcgtccactcccgcttcaatgccgccgggaacgcccggcctccagatgccgaacgggctgacgcccacccgcacccagggtttggaagatttgacggatttgtacatgtcttgcacgaagccgtcaatgtagccccggcgctgggagggggatttcccgtctccaaagctggcgggagaccaggcgcggccgggagtgggataggggtagaaatagtcgtccaggtgcaccccgtcaatgtcgtagcggcgcacgacgtccatgataaccttcagcgcgtggtcgcgggaggcggaggcgctggggttcatcagcagtacggagccgtttcgcttcatcaaatcagggcgcgtgagggaaatatggttgcggcctacggcatgcttgacgttggccttcgcccggaatgggttgaaccaggcgtgcagttcaatgccgcggcggtgagcctcctgaatggcgaaagccagaggatcatacccaggattgacgcccgggccggaaagccattggctccacggttccagagaagagcggtacagggcgtcggcattcgggcgcacttggagaaacacggcgttcagcttcaactgggcgcaggtattcaggatgttcagcagctccgcgcgctgggctgctccggagaggccggaacgggagggccagtcaatattatgaacggtggatatccatgccgcgcggaattcctgggggacagcgggaacggattctccggaggtctgccacccaagcgcctgggaagccagggccagcagggagcaggagaaggcatggaacaggggaaatctggtcatgacgggaatggagagggatgtttccggaacatttaacgcctattcggcggatctgtccacgacggatgccggaggttccgtcatggacaggcggccctcagctgggccgggatgccaggctgttgatcaggtgggcgttgaaaccggccccgaagccgttgtctatgttgacgacggaaacaccgttggcgcaggaattcatcatggcgagcagggtggttaccccgcggaaattggctccatagcccacgctggtaggtacggctatcacaggggcctttaccaggcctgccagcacgctggggagagctccttccatgcccgccacggccaccagcgcagtagcttggcggatggagtccagatgggaaaccaggcggtgcaggccggcaacgccgcagtcccggtaccggactacccggctgcccagaaattccgccgtcagggcggcctcctccgctacgtattggtccgaggtccccgcgctgacgatgccgacgaagcccgccgttcgcggaacgggattcggagcaatgcgcatgagacgggcttccgggtgcatgtccgccgccggaaaggcgcggttcaggtagtccagagcttccccgctcagacgcgtggccagaacattttgtccggcggcaagcaggctgcgggctatctcttcaatctggtccggcgtttttcctgcgccgtaaatgacttccgggcacccggtgcgttccaggcggctgtaatcaatgtccgtatgggaaggagcgggtacggtgccggctctgattttttccaccgcttcctccgcagaaaggaggccttttttaaactgatgcagaatgaaggtgatgtcgttcatgagggttcgttcatgctccctctggaatatccttccagatccagggtgatgtgccggaagcccagttcccgcagccggcgtgctgcggtggaggcaagctgtccgtcccagaacagtctgcgttccttttccggcaattcaatgcgggccaggctgtctccgtgaacacggacacggcagcctttcagccccagggttctcaggaaagattccgctgcgtccacgcgtctcagcagaacttccgttacggggcggttgtgttccaggcgggtcagcaggcacgcataggccggtttgccgctgactgattccggaagacccagccggcaggccagccggcggatatccgccttatccatggaagcttccagaaagggactcgggatgccgagctcctgcaaagctttgcggcctggccggtaatcgtccaggtcgttaagattggaaccgtccgccagcagggggaaccccatctcagccgctctggctgccagggaggaaaacagggcatgcttgcacaggtagcagcgcaggggaggattattcgcaagggcgggaaggatgggaaacgccagtttttcctgccggacgcccaggcggcggcacaacgccgtgctgtcccgcacttcctcctccatcacgtagggcgttcgcgcagtcagtgccaggcagtgatccgctcccaggatacggacggcggcggcaagcaacacgctgctgtccagccccccggacaaggcgacggcaatgcgtttcctagggagaaggacggcgcgaagccgttcaaacggagtctgtggcgtcgttgtcatgggaaggtgtgggaaaaagccccatcagctggcattgttccagcggcagtccggttttttccgccaggattctgcaatcttcaaattccgctttccggtaatgggggcggccgtgcatgaaagaagtttttacatgaaccgttccatggggagtgtggacgggggcgctttcccggcgcagaatatggcggagcatgccatgctgcctgatgcccggcgtactgctgtgccggaagaaggcttcccgcacgcggtccgtctgttccagctggcacagggcgcaaaccttgactgccagacggcctttcttcatgcagacggactcctgccaggtatccagagcgcctgcctccatcagcttttccgccaggtaggctgtctgttccggcgtcatatcgtctatattggcgcacagctccgtcagcagttccggggaagtttcctcttcttccgtttctaccagcatcacccgcagaatattcggtacgggaagtccctggcggtggccgatcccatagccggttgcggtaatacggcctgccagcggagaggggacgggctgcgccagggcggcaatgtaggcggctccggtgggtgtagtggcctcatgggtggttccattcaaggtggcccggaaatgtttcgccagcaaagccgttgccggcgcaggaacgggcattgttccgtgctggcaggttacggtgccagaccccagctccaccggtccggtgaagacggcgtccacccggagcatttccaggcagatggcagctcccgcgatatcgatgatggaatccaccgcgcccacctcatggaaatgtacttcttcaggagtagtgccgtgtacgcgggcctccgcctccgccagcagggtgaaaatagaaagggccgtccgctttacggtattggaaagggcgcttgtctcaataagctttcgtatatccgccatagtccggtgatggtgcgcatggctgctgccggagtgcccttcttcctccgtcagtacgtcaatccgtgttccccggataccgtgctgctgcgcccggcggcattccagcttccactccccgtgcacatgcaatttggacagttcccgttccaggttttcccggtccgctcccaaatcaatcagggcggccagattcatatctccgctgatgcccgcgctgcaatcatagaccaaggctctcatgatggctcagtgtagaaggaaaaactcctggctcaaggtcaaaatgagccttatcccgggagggggcccggtgcttggcggaccgggtttggcggattgccgtccggttatgagaaagatgccctgtgaaatacattgctagggaactttaaatatgccacaatccctgcggcgctgaccagcgccgcccccgttctatatcatgtccattccgttcttttcgaaattacgatcccagaagcattatcttcaactggttaagccggaattgaagcaggtttccgagtttgttgaagcgcaatcatcatgttttgacccggaagtggccgattacatggaaacggtatgccagtccaagggtaaaatgctccgtccggccctggttctgctggttgccggcgctacaggcggcatcaagcctgcccatatccgcctgggtgctttgctggaaatggtgcatctggcttcccttgtgcatgatgacgtgattgacgaggccgataaacgccgggacgaggctacggcgaatgccctctggggcaacagcctcgccgtactgttgggggatgtcctcttttcccacgccatggtgctgggtacggaattcggcagcacggaattctgccgcaggctggcgaataccgtcaggaacgtatgccagggggaggtagcccagtccagccgcctgtatgatctgagcatgacccgcgaggaatattttgaaatcatccggaaaaaaaccgcttcccttttctccgcagctacggggggggctggctggatttccggagtaaccccggaagtgggggaatccctttaccagctgggggatctgctgggtgtggcctaccagatttacgacgactgcctggacatggtgggagatgaagacgatgccggaaagacgcttcatacggacgccaccaagggcaagctgacccttcccatcttcaatttgctggaatgcggtgacaggaatgtggaagctaccctgcgggacgccattgaaaaccgtgaagtggtggattactctgcctttcaggacaatcccgtttttgcagaggctctggacaaggcgattcaggtagctctggagaaaaacgaggcagcccgcgaaattctgtggctccttccccaaacggaatatcgtgaagctttggcggaaatgaccttttacatggacgagctgcttaacgactgccgtatctcctgacctgcttcaaggagtttttgtccggtcatgtcctccttatgtaatttgtgtcttccggcattttcccaaaaggaaacctaccggagggaatgggaggagcgcatgctggttacggtctgattgttttttcaaaacatggttaacccggccacgcgcccggggaacggcagtgctttctttattccgtttttccgtacctgcgcgcccggaaggagtaggcgaccgccaccacggcggcgagcacggcgtacaggatgaagcggtccgtggaaatggcgttggctgattctccgttggacaggaaaaaagtaattgcggccaccagcatgttgcctgcaaagatagtgaggttccagaaactggtgatgaggctttttaaatgcgccggggcttgcgtataggcgaattccaagccggtggtgctgaccaggatctcagagatggtgagtacgcagtaaggaatcagctgccatgcgatggacatggaggttccttcctccagccggtattgcaggaaagcgacaatcaggaatgtagcggagctgagggtcaatcccgttccgaggcgcaccaggggccttgccagcgttgccaccctgggataaacaaatacggtgatgagggggatgaacaccatgacgaaaatgggattggccgcctggatttgggccggcccgatggatcaggaaccgcccgggagcgggatggaaagaggaatcatcctgctgccttgggatacccaggaagaagccgtctgttcgaaaatggaccagaatgggatgataaaggcgaagatggagaggattttcaggatgtgccgggtgtcttccacggcagaagttccgcagcgctgttctgcgtttttccagcctccgtggaacagaatgatgaaaaggactttccagaagccaggctgcccgctgttccgggctggaggtgtcttgtggtattttttgcggcccagccagaagacgaaagtggcaactcccatgaagaggcccgggacggcaaacgcccaactgtacccgtaacgctgttccatggccggaatgaccaggaaggagaagaaggagccaaggttgatagcccagtagaaggcattgaaagccttggtcattaactgcggggacttattaggaatctggtctcccataaaggcggagacgcatggcttgatgcctccggctcccagcgcgatgatgaacaggcccgccatgagaatgtaacggcgcgcttcaatggtgtggaaaagatccgccgtcgccagaactccgtgtcctacgcagtaaagcagggaaatataaagaatggttttatatcggccccagaccttgtccgccagccaggcccccgccaggggaagcagataaaccattcccacaaaaatatgaagggtggaggtggcccagttgtcgctcatcagcagatggcccgtcatgtacagcatgaggatggacttcatgccgtagaagctgaaacgttcacaggcttccgttccgatgatgtatctggactgggagggcagggcgctcattggatgatgaaaaggagggagatggagaaggagtaataaaaatgatggcctccgggcggaggccatcatggcgaatgcgttcagacggtgttcagggcctgtgagaaggagacgggctcactgacggttgtcatgaaagggaaaacgttagcgttcctggttcaggatgggagcgatttctaccttatattgggtgatgcacgctttcagccagtccagcatgatcatggattttgcctgggctgtcagagccggagcaatttgctgggtagatttgatttggaattccggcgtatcctccagttcgcgcttgacgagctgggtcagcaggatgccgtcccccgtgttgatgggctgagccatctggccggggttgatgacggaagccgcctgaaatacttcttcaggggccgggagctctttgggaggggccaggcgggaattcatggcccgttccagaagagactggagctcttcctgtgttttggcgttttgcaggttgacgctgctcaagagtacgtttggattgacaaagggaccgtaagaggcagttttggcaccggcttttccggcaatggcattgaactgttccacggggttttccgccttctgcaattccgtattgagttccgtggcggccttatttatggattcaacggtcatgctttccagcaggtcggcgcgggcgctgttgcgggcggtttcgtaaggcagggctttgaccggagtaatgccttccagacggatcaggacgacttgtccgttttccagcacctgcatggtgctgatctgttcggctccggtcttggcgcgcgcttcttcaatggccttggcatccgcatccgcattcagggccggggctcccgccagggagaaagccacatccagcagattggcgctgcgtccgtcggaagcggattggttgattgcctggttgatttcctgaggcgcgtttttacgcgttacggccgtgtaggactttttctccattttgcagacgccgggagccttggccagggcttcgctgatggcctggtccatgttcctgccgttggtggcgttcagcggttcccagatgtcattttccaccagattcatggtctccatggtggcgttggaaatgtctccgggcttgggtgcctgggcatcgcctgcgggaatgaaggtgtaaacggtgaagaagcgagcttcctcatttttgtaattttccttgtgcttgtcccagaaggtttttatttcctcttctccgggatccgtcttggggcggaaggcgcttttttccaggaaggcggtgttgattgtaatttgctggctgttggattccgctacagcctcggcaaaaccgggctccacggagatacccccggccagcacgtccttgatgcgctccaggctgatggtgtcttccatcagaccgcgcagcagttcctcctgaagctttttacccatgttgccacgcatggaaatgaaattatcgtatttttgggggtcgaaaacgcctttatcgtcctggaactctggaatattgcaaatggcatcgtcaatttccgcggtgctgggagtcaagcccaggcgtcccgcctcccggcggataatgccgcggtaggccaggaaagccgcattgggattatttgttttcagcagatggcagagttcgcgcaggttttcttccgagctgaaattgtcctgaagcagcggaccgaaggtggaagggaaggagaaagccacggacaggccggtcctgcccatattgttataatccttttccccgtaagatttcccgtccacggaaacgaaagtctgcttgaacatgccggtcagggagccgccgcttacgtccccgccgacgaacatgaggcccacaaacaccagggccatggctgccatgatgacgattgtatgtttacgtaagtaatctagcatggaatgtcaggttgaaaatgtacgtgtagccggccatgagctgacggcagcccgggcagcccgaaccttttacactttttccctccgctaggcaagaacgaagctctccgcttccggcggcttttccagaacatggtggcatgctctttcctgtcatgaagggcttttccggccggggctgaacaatttttgacctcgacggtgatgcaaatacgccttatgttgctcctgcgcggaaggttccgggaaccatgggccggttctgccccatggcattcggaagcctccggtgcatgtccttagccggatattcctttaattgcaaggatttatgctgaaccaggtagtagaactcaaaagagaagtgacggcggtccagatccccagcggggatgtgctcaccctgccggaaggggaacgcgtgtatatcacccagatactgggcggctcctataccgtggctacggaccacggcctggcccgtatctccagggagaacgcggacgcccttggcgctggagcggaggaaccttctccggaagcggctgcgctggatgagaacgccacactggaagaaagggtctgggatacgctgaaatgtgtgtatgacccggaaattcccgtggacatcgtcaacttgggcctgatctacgatgtggccgtcattgagctggagaacggccttcatcatgtggcggtaaaaatgactctcacggcgcccggctgcggaatggggccccatctggtcatggaagccaaggaccgcattgaagcgttggaaggggtggaggctgcggatgtggaaatggtgtgggaccccccctggaaccaggacatggtcagcgaggagggcagaatgaaactcggattgatttgattttccatgccggtgacgttgaaattgtccgacgaggaagcgcgtgatttggcggaaatgctttccactgccgccacggtggctgcctccaaccagcaggacggggcggaggcgcgtctggcggcgtgggggaatttggtttcccggctgatgaaagagctttccgtcacctccaaattgaaagggcgcattgcctatgcggatgatctgggcggatatgccttcacccgggaatatgaagaaagcgcctttttccaggattgcctggatgaataccgggacaactctttttgggcggatctcgtgacgcgtatggcggacaaggccatcagcgaacacctggggccggaatattttgaaaacatgccggaggatgaacgccgccgtactgcggaagccctggaaaaatccctgtggcaggaatgcgccagatacggcattgaccggctgggcttcatcttgcctccgtcagacggataaggagaagaaccgtttaaaaatcctgtggaccggtgcggcccgaatgattcgggcgcggtttgcgtgcatatccccggagaataccagtccatgttgcctgtctgccgggaaatactcccttatatccgccctgtttcaggtatcgggacgacatgcgctctctctggatgcggcaagatgattttgggggagttgttcagtccggagtgcagcggttcaccgggtcggggccttattcctccgcattttccggcagtggcggggtggggctgcccagatattccgtttccttgggggtggagagtactttgtaatacgcccaagcggcggcggccagtacgccgccgatggaaacaatcatggttagccagccggtgggggacataatcagttaatgttctcctgaacaagactggtaacggccttgtcaggcaggaccagcttgatattctggggcaggggacgattttggaacagcttgaaatccgtcattttcgtagttccccccgtctgaagcagcacggaaccatcaggctggatgttcgccatgacgttggtggagggggttgggtcgccggtgaacgttacgctggtattgggatgccatttgccgtccttgtacgcgaagctggggccaaagaaggctccgcgggccttcttggctgattcaaaattacgcatgaaatcttccacgaatccgacggagaaggaaagttccttttccgaggaatgcgttttccatttggaaataagatcccggaacctgcttttattattaaagtaataaccgctgatttccttgaatttccccatttttttgacgcagacgaggaagcgcatgttctccccgattgcccagggatagtccacgaagctttgtccgcctgttccttcaccgccaaaacgtccggagcgcgcatctttgcccagttttaccagcttggtgcgttcttcttccggcacatcattggggttgtctccgtgtgccaccggatcccagatggagaagatgattacttttttaccgttggattgttcctgaaaaccgatatagccgtcgtcaaaattcatggcgcaaaagtaggtgccgggaacggatgttttggctttcactacattgtacagggcgcttgcctgggagggatgcccctgctggttgatatggacggaacggcactggcgcttggccagcagttccgggtcctgcgcatgaaggatggttccggagaacagggcggcgcaaatgacggcggcggaggataaaagacgcatggttttgaatgattgatggttgtctgatttgatgcccggagggtggggggcaggcaaataattaggacagactaattacgtttggcctgggggaaatctcgcaggcaggccgcacttttttcaaaatttttccggcatgaatgtgataaaagaaatacttggctcaggctggttgctcaagattctgaaacggctgaaaccgtaagtccggaaggccgggcagccgcactctctccttccccttcccgctttcagccagccgacgcggaacatacagctttgcctgaatggggaaggccgttctgcgaaaaaatcgggaaacggccttcggaagaatgggggaaaaggatgcgtttgttaccggatggggttcaggaacaggggcatcaggccccccagcacgatgaagatggaaaacgcggccagcatgactccggaaatggccggtacctgcacgggttctgcgttttctgcgggcttgtcccagtacatggagcggatgaccttgaagtaatagtaaaacccggatgctgcgcagacgatcatgacggggagcatccaacccagatacagacccgtattgatgacgtgcacgaaagaaatcattttggcgaaaaatccggccgtcagcggcacgcccgccagggaggcgaacatgatggtgaccgccagcgccagccggggattggttttgcccagaccgcggaacgcggaaatttcctcgctcccgcgctggatgcggatcatggcaagggcgaaaaaggcgccgaaggtcatgaccaggtacacagccaggtagaacggggcgttcggagccaactggccgtccacagtaccgataaacaggggcagaatgaagcctgcctgtgcaatggaagaataccccatcatgcgtttcaggttcgtctggggaatggcgcccaggttgcccaccagcagggtggcggcggccatcagggctacgacgaattcgacgggaggcagcacggcgaatggggccaggatgatgccgagcagggcgaatccggctaccttggaggctacggaaaggaaagctgtcaccggagtgggagctccctggtacacatccggaatccacagctgcatgggaactgcgccgattttgaatgctgtaccgagcagcagcatggcgagggccaggtacatggcgggggctgtctggccggccagggcgtggctgacgatcgtttcattataaatgaatgttcccgtaatgccgaaataccaggccaggccgaaaacgagaaaccccgtgctgacggcgcccagaatcaggtacttgatgcccgcttccgtggaacccaggttccgccggaagtagcctaccatgatgaaggaactcagggtgagcacttccagggagacgaacagttccactaggttggatgccttgcacagggaggtgatgcctacgcaggccagcaggggcaggatgtagaattcccccgttccgtcctgggatttggaatcattggaggaaaggttgatgacggcccggaaatctacggaaagcaacagggtgactgctgtggcgacgagcgccaggatgatgtagatgttgtcatagagcccttccatgtagaagggaagcatcgccagggttcccgccgcgccaatcagcccgaaaataaatttgggcgtttttttgcagaaggtctccgccagaagcaaaagcattgccaggccggccaggatgaattccggaatatacgcttgcatgggtaaaagagaatcaggttagactaggattgtattcggaagggaggaaatcaggagaaaaactggagcaccagcgtggggaagaagccgaagaccgccagggcgatgaccaggaagcagttggccgcccgttcggagggctgcagtcccgtggcgtaggcggaggctttggacaaatctccctggaaaatattgcggtaggccctcagcatgtataccgcgccgatgaccagtccccaaaggcacaggatggtggcgatttgaacggggccgaagccgttgctgaaaccggcgaaaccggagaagaagaccatgaattcccccgggaaattggcgaggccggggaggccgatggaagccatgcccgctaggccgaaaacgaaagccatgcgcggcagcctggtgctcagtccgcccagagagttgatttccaatgtgcctgtttgcttttcaatctgcccgcagagcagaaagagaagggcgattgtcaggccatgggccagcatcagcagggcagctcctttcagcgcccagggattggcttccgcggaaccggaaactaccagggcggcgaaagccaggaagatatagcccatgtgcatcacggaagagttgcccagcagcaggtccagccttttctggttgacggtcacgtaccccacccaaatgacattgcagacgagcaggaccagcaggatattcgtccagggaaggaatcctgtttccatcagcggctggaacatgaagagcccgtacaggccaaatttcttaagtactccggcatgcatcatcgctactggagcgggagcggatgcgtatgcgggggctgcccaggaatggaaggggaagagggaaatcagcgtgccgaacccggcgatgagcagggccccgatgagttccgcgtgggcaagttcgcgcccgctggccatgaagtctttcaggccggagaaggtgaagccagcctgcgtgccgatcatcagcagggctgccagcagcaccatggaggcaagccccaggtaaagcgtggcgcgccaggccgtggtgcggcggtcgccgcgtccatacaggccgatcatcacgaaggtggggataagagccagttcatggaaggcgaagaaggagattatgttgtcggacaggaacgccccggtggcgcctgcggaaatcagaagggcggagttgtaccaggaagcttcccccccctggggcgggttggtgcccaatacggtggcgaaggtaaccaggatggtcagcagcagcattactttggacagggccggagccaacgtgagctggaggtccatcccttcaaaacgggaccagcaggaagaacagccgtcaaagctaaccagggcccagatgccgagggccagcgtcagggaggcgctgagcagggctgtcgggcgtgcgggcgccttgcacagaccgatgagggccgcggcaatcagaggaatgagaacaagccagataagcatggtatgtgattggttggttaggttagcaggaatagaagacggtaaagtagatgaccaggagcaggccaatgccgaagagagccgtataggcggccatgttgccggactgcaggcggcgcagcagggagcctatggcggcggtcaaccgcgccagtccgccaacgatgaggccggagatgatgaactggtccataaagtcgatgatggcggctagaacgccctggactcccctgaccagcactttatcatagaacagatcaatataaaggcggttggcgagagcccgggaaacggcattgccggagagtttgtcagaagccggggagcctgcgtagaaggcagccgccagcaggattccgagcaccagcgcccccatggagacgtagaagggcatgcccatgtggaagctttcggaaacgaatccgttgaaaggaaccagcctgtctgcgatgaacccgtagccggagatgagagccaggacagccagaatcagcaggggcaccagcatgaggccgccaacttccgaggcgtgttccgaactgtggctgcggctcttgccgaagaaaaccacaaagatgacacgcatcatatagaaggttgtcagcagggctacgcccgcgccgatccagaagaagaccgggtttttgcgaagggctgcttccagaatggcttccttggagaagaagccggacgtgaacggaatggcaatcagcgccatggtggcaatgatgaaggtgagggaggtcagcttcatgcgcttcatgatgccgcccattttccagatgtcctgttcatggtggcaggcgaagatgatggcaccggcgcccaggaagagcagagccttgaaccatgcgtgggtgaagaggtggaacatggctgcctccccggccagaagtcccagggccatgaccatatagccgagctgggagagggtggagtaggccaggacgcgtttgatgtcattctgctgggtggccatgaaggcggcgatgacggccgtaatggctccgatgccggcaatgacattgcaggccagggcggggaaggcctcaatgccgatggagtattggacgcgcaccatcatgtaaacgccggcggctaccatggtggccgcatggatcagggcggagacgggggtggggccttccatggcgtccggaagccagacgtgcagcgggaattgggcggatttgcccaccgctccgcagaagaggcacagtaccgtaatgttcagcaggttttcactgattcctgcgggtatttccatcaggctgaaatccagcgtgttggtcagcgcccagagagtcagaatgccgatcaggaagccgaagtccccgacgcggttgcagatgaaggcttttttggcggcgttggcggcagtgtcccgtgtgtaccagtggccgataagcagataggaggagaggcccaccaattcccagaagataaaggtcatggcgatgttgttcgccaggacgatgcccgtcatggagaacatgaaaaggctcaggcatgcgaagtagcgtgttttggccttgtcgtccgccatgtaagccagagagaaaacatggaccagcaggccgatgcccgtgaccaccagcatcatacgggaggaaaggggatccagcacgaaacccaggtccacggaaaagatgtcggaaatcgggagccaggagaaggaatcggatccggtccagtccagcaggcccagggaaaggacgaaggtcgccaggcaggagaaggtggaggtaagggccgcgacgtcaggacgtttggtcagcaggaaccagtcaaaggcggctacgaccagcggcaggaagagcagaagccaggtgtattgaatatcaatattgaacatgttcgtggagtagtgtgttgctcttagtctttcagcgtgttgagatcttgcgtgctggccgtgcgcctggccctgtacagggagacgatgagggccaggccgatagccacttctgctgcggcgatggtcaggataaagatggagagggcctggccgtcatagttgggcaggcccatagtgccctgggcgcgggaaaacgctaccagggacaggttggcagcactgagcatcatttccaggcacatgaagatgacgatgatgtcgcgccggacaatcacccccatcaggccgatggcgaacaggacgccggagaggatcagataatgcgtaagaggtatcatggtgatggctgtggtaaggggttctttattttccggaagggcggcggctcagcacgacgacgccgatggaagccaccagcagggccagaccggcgatgaccaggctccggttgtatttgtcaaacagggtacggcccagcagggcggtgtccgggaattctccgttgtctatctcctcacggatggtggtgccttccggatagaggtgggcggaacattggggggagaggggggggaaaatgacggaaggggcgccgttgttgcgaaggctacaggcgggagtttccattccggttttggagggggctgcgtcctcctgcccgattttcaaatcgttccaggcctgttccgcgctggccatcgggcagcggtgcgtttctttggcgccgggcaaagaatagatgatgccaataagctggccgaggaagaggccggcgatgatgacaccgatagcgacggagaaaggcctgctgaagggggatgtttcctgcttcacattcagcagcatgatgatgaacgcgaagagcaccataatggccccggcgtatacaaggatttggagaatgcccaggaagtgggctcccagcccgatcatgacggcggcggtggctccaaaggaaagagccatcatcatggcggaggagacggggttgcgcatgaagacgaccatcagggacaggaccacggccagggccccgaaaacgtaaaaaagtatgtcgctggcaaagatgttcataacgtacgggaaatggagtgttcgggggttatttgtattggttccacttgttgaccagccccttgcgggtgccgcccagttcgtagagcttggccttgttgtggatggcctgggttttatccgtgggggtgaacaggtagttatggctcatgaagatggcctgttccgggcaggcttcctcgcacatgccgcagtagatgcagcgcagcatgtcaatctgaaattccctgggggctttttccactttgccccactatccttcctgtatggggccgggggtgatggtgatggcgcgggccgggcagatgaattcgcagagctggcaggaaacgcagcgttcacggccgtcttcgcctttcaccagcacgggagctccgcggtaatatttcggcagatgtttgtcccatctggcttccggatattgcatcgtaacgccgatgccggaaccggccagttcttttttgttgcgggatttgcccagcagagccagaacgaggtgcctgatagtgagccaaagaccgccaagaatggattgcagatagaaccgctctccaagggaaatcttcggacgcttgatcgttttgaaggccataatagtaatgttgtcggaatgaagaagggggggattacttgacgaagtacaggatggcggctgtaaggaagatgttgatgacggccagttcaaagaagaccatccagccgagcttcatcacctggtcatagcggaagcgggggagcgtccaccgcacccagacgaagaagaaggcgaagaagagaagcttgagcacatatgcgatgagctggcagatgaccgccacccagttggctacgttttcattgagccagccgtccaggccgaagccgatggaccagccccccaggaacagcgtgatgacaagggaggatcccaccaccatggcggcatattcccccatgaagaattgggcgaatttcatggaggagtattccgtatggtagccgcccacgaggtccgtttcacattcggacatgtcaaacggcgtacggttggcttccgcaaaaatggaggtgaggaatatgatgaaactgatagctacgggcaccagcagtatccagcgctgccagctcaggccctcgccccacacgggaagcaggagccagccgttggcggcctggtattccacgatgttggacaggtccagcgtgctgtaaatcatcagcacagggatgatggacaggcccatgctgatttcataggaaatcatctgggctgaggagcgcacgccgcccaggaaggggaatttggagttggatgaccatccggccagcaccagtccgtacacggagagggaggagatggcgaacatccagagggggcctacgctgaggttggccaccgccatgttgacgtttccgtaagaggtttgaaggtctccggcgaagggaaccacggccgccgtcatcagcggtggcgcaagcaccaggatgggggcgatccagaagtatacgcggcgtacgaaggggggcgtgaaatcctgtttcaggaacagtttgccgccgtccaccatgggctgcacgagaccgaagatggggatgtcgcggtccaggcggaaaaaacggcacaggttggcgattttgccgtcatggggcaacccgaagtagtccagcgtctttttgaacggcaggtcggatttcatgccgaagcggcggaagatgcttaacggaatgccggcgcggttggggcctacgcggtcctggatccaggcggccacccggcgttcaatgtatacgcagaccggaatgaacagaatggtgatggcaaagcagatgacgattttgatcagcagagtgatgatataaaaccacacagggttgctgagcacctcgtcgcaaaaggttagaatcgaatcaatcatggcggattaacaggttgtatgcgtgtgaagtgtgattagcggccctggtttttttcgcgttccaccacgggaatggtgacgccggtttccagaatgggctggcccccgtctccgatggaaccccaggagactccattgagtgcgccgtattccgtgctcatggcggtgaggatgtccagggcggagttgaagtctttcagagcaggattgcctcccagcagaagggtgatgtctctgaaaatctgccagtcgtcccgggcgtatcctatgggctggatagcgcggttcaggcgttgaatacggcccgtgacattaatcatggtgccgaatttttcagcgtaggtgacgcccggcagaaccaggtccgcatggcgcgccgtttcattggcgctgtgggcggtcatgaacaggtagtccagcttgtccagatcttccgccgtgaagcctgcttccggggagatgaggtcttcccccagggagaggatgcccttgatggaaccgctgcgaactccttcgcgaatggcgtccagcctggaaccgggttcgatatccagcaccagcctggccccgttcgtgttcgggttgcgatccgcagaaataagcatgccgtcgctttctcccatgcggggaacgatgtccaccatatccgtgccgatttgggcggccagatggcggaccatgtaaagttcttcattggtcatgcgcccggaggcaatgatggcgagctggttcggagcaatgcgcttgacggcttccgcggcggaagccagagccggttcccaggtggaggggcggtggggcgcttccgcatccgtacggatgacgggctggggaatgcgggtttccgcattgatatatttgtagttaaggcggtgagagtccggcatccagcaggagtttacggcatcattctggcgcggggtaatgcggtataccttgtcttcccttgtccagagggtgatattggtgcccgttccgcagtccacgtcaatggtctttgtttccttcaggaaccagacgcgcattttaaagcggaaatccttggaagtaagggctcctaccgggcagaggtccacggtgttcatggagtagttgctgtccagctcgcggccggggtaaaccgtgatggcgttgaaggtgccgcgttgggacatggtgagcacctcatcgtgcatgatgtcgcgcatgaagcgcacgcagcggccgcagagcacgcagcgttcttgatccaggttcacgcgcgggccaatgctcaggtttttcccttttttggtctttttctcttcaaaacggccttccacctggccgtagtcgttggagtattcctgaagcttgcattccccggcctggtcgcagatggggcagtccagagggtggctggtgagcaggaattccattgcgccgcggcgcgcttcactggccagggggctgtccgtgcggatgcccatgttttccgccaccgtgtttgcacaggagatgatggggcggggcatccactggatgcgctgatagccgttttcatcataggagggtgtctgtcccggagcgagcctgggcggcatcccctgttccaccatgcacatgcggcaggagccggcgacagccagcttggggtggtagcagaagcacggaatgggcacgcccacggaacggcaggcgtctgcaatccgcgtgccgcgcgggaaccggtgccacgttccgttgatttggacgttcaccttgccttccgcggcggcaatgtctttggggagtttggaagcttcttcactcatgatgacggatgggagagggatggttttgagaactggtgttgcgtgctgctgtttagcgggtgaggaaacggttttgctccctgccttcctccgtgtggggcagacaggcgttgaatggatccgtcagggctacgaattcttccttgaatttggagaccatggcctgggtgggccaggaggcggcttcaccaaaggcgcagaccgtttttccttcaatctggttggccacttcaatgagcagatccacatccgacggggcggcttttccttccaggatgcgggtgctgagtttcatcatccacggacagccttcccggcagggagtgcactgcccgcaggattcatgggcgtagaaacggttgatgttgttcatggcccagggcatggagcgggagtcgtccatgacgatgaccgcgccggaaccggacatggagccgtgccgggcgatgctgtccagatccagcggaatgtcgaagaaggtgatttttcccatggtgccgtccggattctgcactttgtattccgcatccgtgcgcatgaccttggaggaggagcctccgggtatcacggccttgaactggcgtccttcccgcgggccgccgcagacgtcatacagcagttcaccgaaggtcatggagccggagacgatttcatagaacccaggacgtttgacgtcgccggaaacgccgatgatgcgggtgccgggggaacgtttggctccttcctggctgtaggcttctcctcccatggccatgatgtgtttcacctggcagagggattccacgttgttgacaatggtggggcatccgtacaggccgatggcggccgggaagtaggggggcttgatgcggggataggggcgatccccttcaagggagttgagcagggccgtttcctcaccgcaaatgtacgctcccgctccgcggtgcaggtggatttccagattatagccggacccctggatattgctgcccaggaagccgcgttcgcgagcttcctgaagggctttgagcatgatttccgcggcgatgggaaattcttcgcgcatgtagatgtaagcctgatgcgctcccaccgcgtagctggagatgaccattccttcaatgagctggtggggatcctgatggacaatgtagcggtccttgaacgtgcctggttcggattcgtcacagttgcaaaccaggtaaacaggcttcgtgttgttcggcggaatgaaggtccatttcacgccggtggggaaccccgcgccgccacggccgcgaagaccggattttttcacctcgtcaatgatggccctgggctccatgccgagcgcctttttcagttcttcataaccgccgtcggccagatagcagtcaatggaggtattccagccctcgcggttgacgtttttcagaatgcggcgcgtttccctggggtggggttctttaccgggaagataggtgatgctcatggcgaaaatctggtgcgtgggaaatggaaagggttaggctgtctgatatttggcaatcacttcttccagcacttccggagtgactttttcgtacaggagatcgttgaccatcatgttggggccaaagccgcagttggccaggcattccactccttccacgctccacaggccgtccgggcttactccaatggggtggtggtggtcgatgccgtttttgtcaatgcccagacgcgtgcagatggcgtcgaacaggctgtccgcccccgccatggcgcaggaaagagtgcggcatacgcggatgtggttttttccagggcacatctggcgcagaccgggatagaaagtcaccacgcccagaacatgggcggcggagatattcagtttttctcccacccaggcaatggcgtcgccgctgatgaagccgaattttttctgtatttcatgcaggatgggcagcacggcggatttttgcttgccttccgggtaatgcgtaacgtattcgctggcggccgcgtcaagttccggcgttacttcaaaggccgggtaaaaccgttcacccgggctgggctggtgggcgatagtcgcgtcgatggcgttttcagcgtaatcggacatggggagaaagtttggtgtttgcgttgaagtggatgaaagtggcgggtgtttaacggtcgcattcgcccatcacgaagtcgaaggagccgagaatggccggaacgtcggaaaccaggtggcctttcatcagttccggcaggatggacaggttgcagaaggagggggagcgcatgcgcaggcggttgggaagtccgccccccttggagtccaggaagaaacccagctctcccttcgggttttccgcggcaaagtaaacctgcccggcaggggcgttcacccccatggtcgtcgtcatgaactggcgaatcagggattccatgtccgtcaggacttttttcttttcaggcagcgtgcctttggtgtccaccatgttgatggggccgtccggcatggtttcaatgacctggcggatgatgcgcagggactggcgcatttcttcaatgcgcacggtaaaacggtcgtagcagtctccgtgttcgcctacggggacgtcgaattcgtaattttcatatcccagatagggggtgagtttgcgcaggtcccgcttaatgccgctggctcgcaggttggcccccgtaataccccaggaaagcgctttttcacggctgatgacgcctacgccctgaagacggtcaatgaagattttgtttttgagcaggagggcttccgtttcatcaagggttttggccgcttcatcgcagaagacgagcacttccttgagcatttcattgggaacatcacgtgtctgtccgccgatgcgggtataggaggaagtgaagcgcgccccagtgagctgttcgtaaaaattatggattttttcacgttcctcataacagtacaggaaaacggtcatggcgcctacgtccatgccgtacacgcctacgcccaggatgtgggaggaaaagcgggaaagttccagggccagtacgcgcagggcctgtccgcggggcggcagttcccatcccagcagtttttccaccgcgcaggcataggcgatgttgttggacaggggggccaggtagtcaaagcggtcggtgtagggaacaaattggttgtactggatggtttcgcctattttttccattccgcggtgcagatggccaaccaccggatcacagctgatgatttcttcaccatcaagttccagcaccaggcgcagcacgccgtgggtggcggggtgggaggggcccacattcagggtcatcgtttctccgagcggttcggatgtattggtgagatagtctgcgttagcggctgtatctgcaatggcgaaagttttggtgctcgtcttcatgtggatgtccgtgcctggctgaacctgataatggtgccggatgattatgccacttcacaccatgcgggcaagccaaatgtcagtttttttggcattccggggaggtggtgcgcgagtctcctcaactgatgaatgttagttctttctaacaataagcttttatatggaacctgccgaatatgggaaaaagcggattaggaatccggagtcaacctacaaatttgagaaaaaataatttaatgcaaatttgctcagttatttccgaatggcgggtgccgggaaaacagggctgccgggccttatggctggacgtgtccgaacgcagcggaggagaatcttcttcctttgtagccggcctccctgcgtagttcttttcgggattcacgctatatgcggattcctaatccgttaggaaaaaaatatgttgaagtcgaggagaattattgtcttttccattgctgtaacattttcagtattatttattttatatattatttcatggttttcccctattgccggggattcctttattcacgacaggacggggtaccttgggcagtttcatatccgccatgtctggaaggcctgcgtggacagttacctgtattggaatcccaggctgggggaaatggctgcgttttttattacttctgctccccggctggtctggacggtcttgaatcccgtgtttgtgcttgcccttgttcttggcctttatgtgctcgctctggggagaatgcccaatctccggcgggagtgcggagcatggacgtggttgtttgctttaagcatgttcgtctcagccggggtaaccgtttattatgtctgcctgacacgcgcaggctccatgaattatgtgtggaccggatgcctgatcgtatggttcatgaatatttacagaaccaggtgggggaagcggataacctcccctcgatggggcctgtcctcaggatgtctgatttatgggattttctgcggcgcctgtaatgagggggcgacgataggaatggcggcggcgttttgcatcatggccgcggtcggcatgttccgggaccgcagggtgggcgcttatgtatggtgcgggtttgccggcgttgcgttgggaggcctgtttctatttgccgcccccggtttgtattcgcggcttggccatgatttgggagcgagtgaagttttgaggaagggcggtttttgcgcctatgcggagtctttcgggatattgctttattaccacgcgaggatgttgtgtaaaatatatgccgtttccgcagtattaacgggatttttgttgttcagcggcacggagcggtgccgggaagtaatcagtaaggaaaaggaatccttcttttatattctttttttattgttgctggggttcatcatgtccgtttgttattttccggtgtgcattcccgcccatcatgtccagttcgtgtcgtccctgcccgttttggcggcgtcaaccgtgttgttctccgtattgtaccggaatgagatcatggtgcgcggattgcgcgcggtgactgtttgccttgccggagctactttgtttttcggggtggtgttcaccctggagtattatcatgtaggctctcaggctttccagagagaggagctgattcataaggccttccaggaggggaatctggaaccggaagttccttccatctctcctcttttctttgaaggaaaagtatcaggaacggatgggaattggggtgggccggataccaaccgccggtttggcatccgcaagctggtagtgaaaaagccctgagggaaaatggctatttgactatgttccggggagtgaagtgcatttcctgttcctcgatgccgaattgccaggtggccgtttgccacatgttgacagcaggatttttccaacggacctggacggttacggggctgagccgcaggggacgggagggagtccatttcaaaattttttccttggcgtcgtaccgggcgtttaccaggccgaagccggagacgcgcatttccatttgcttgggttccaaggagggttcccctgccagggaaatggatatatcgggagtctggtttttcaccacggtattggcggccggataaacgggctgggccggggccgggtaggaattcagctttttcccgctgctgttgccaggggtggccgccggggtttccggagtggagggaacgttgaaattcagggctctggtaaatgtcttagggtctttgccgaagaccatgtagcggtgaatccgccagcggtccgtgtccttggtcacttttttggggattaccgtaaaggccgcctggaatccggcttcttccgccttggagatcatttccggcaggatgaagccgccaggatagcaataggcctccacggaagaaccggggaatttttcctgaaggattttccgggaattgcctatttccgccgttgccagatccagaaccgcttgtgtacctttccgctgggcggccctccaggatcttgggtacaggtggctgacggagtggctgcccagggtggcgccgttattcagcatttcctgaatctgggcggggctcatggcagaaccgcggcccgtgatgaatttggtgtatgggaaaatggtaaaggggaatcccgtttctttcagtatgggataggcgtccgtgtagacgctcttccagccgtcatcgatggtgatcatgacgcatttggccggaagctgcctgtcccccagtttccattccaggaattccttcatggagatgacgggcactccggacgccttcagcgcctgcatctgggagcggaatacatccgtattcatgcgcatttccgtagcgggaagggtgcggctgaaatcatggtaacccagaatggctacgcgggtttcaggctgaggaaccggaacgggggaaaaagccgtggagggaatggcaaggggtgcctccgcaggttgtaccggggcgtgcaggttcgtttccccgggaatgggttccgcgttagggatggactccgccaggggagcggaagagcctgtctctccgggaatgggttccgccatggggatgtattcatccttgcggttggcttcaatcaggtctttgacgggaacgatgccggcggccgggtttcccttgatggttcccccgatgaccgggccgggagcaaagggaaggggagacgccggcggcaggtcgggcggaagctccgcacatgcgacaccggctgcgatcaagaaaacggaaaggaagcctaggacggagcgcatatctgcaactactatttttaagttttctgttcaaccttaaactcaggcaggcatgacagcctgttccgtaccgcgcgcgttttttccggggcatgtctggattttcccgtttgaatgcgttatcactaaaaagcatgcagactcattttccgctcgcggaagaaaggagaggcgtttagtctgtctgcagacatgagctgtatttgtcatttcttcaaagttctggcgcaccgtgcgggtctgctcactgccgtagctgccgccgcttttttcctgggggctcccgccagtgaagcttcggcccgcacggcggctcccgcttatccggccgcggaagtggggggggaatcccagtacagccattttcccattcctcttaatcagtacaatccggtgccgccggatgccagcctgtaccaggtgcttagtgaacgcaacaagcagtccggcggtttcaacctggcagtgacgctcgttttcttcggcgctattatccatacgtttctggccggccgctttgagcgttattcccataagctggccctgcgctataaggaaaagctcaaggaaaccaacttccgcgtgatgcatccggaagagcgcctcccggtttccttcgcgtccgccattttccattttctgggagaagtggaagccgtgttcggaatctggcttatccctttcatgttcgtgtgctggaagtattattcctttgaggatttttccgcttatttgaattatgactgttccttcacggagccgatgttcgtgatgattatcatgattatcgcttcttcccgccctattttcaagctggcggaatatgtcgtgaactgcggcgccaggcttgggaaggccacgccgggcgcgtggtggatttccgtgatgtgcctggctcccttgctggggtctctgattacggaacctgccgccatgacgatcggggccctgatcctaagcaagaaattttacgacctcaagccgaagaaaaccttgatgtacgccactctggggcttctcttcgtgaatatctccatcgggggcaccctgacgcactttgcagctccgcccgtagtgatggtggcggaaaagtgggactgggggctggctcacatgatccagcatttcggatggaaggccgtttccgccatcgtcatttccaatttggcgtattttctccttttccgcagggagttcgcccgcctggcttcccagcagagggagttcgacgagtttgacgacgccgttccccagtcctgggaagaccgcaatgacaagataccgttgtgggtgaccctggcgcatgtctgcttcctggtctggacggttctttttgcccatgagccggtcatgttcatcggcagtttcctgttctttatcggtttcacactggctacgccgcaataccagaaccaaatgtctctgcgcgtacccatcatggtggggttcttcctggcggggctggtcattctgggcggcgtgcaggcctggtggctggagccggtgctaacgcggctgggggactacgccatggtcggggctacgctgctgacggcattcaatgacaatgccgccgtcactttcctggcgtctacggttcccaacctgccggaagccgtcaaatattccgtggtggcgggtgctgtgacgggcggcggcctgacggtcatcgccaacgcccccaatccggccgggcaggccattctgggtaaatatttcaaaggcatcaatcccctgtggctgtttgcctgggcggcttttcccactgccatcgtgtttattttcttcacctgcttcggccattaatggccggagcgtactgtcactcttatgtttaccggactcgttgaaacaacaggaactgtggaagggttgacgcctattaacggcggagccaggctgacgctgaccattccgttcggccgtgaacttgccctgggggattccgttgccgtcaacggatgctgcctgacggtggatgccctggagggtgaacgtatctcctttgatctgctttcccagactctccgcgtcaccagtctgggaaccctcaagccggggatgctggttaatctggaacgcgccatgtccgccatgaatcgtttcggaggccacttcgtgatggggcatgtggatcataccggtacgattgccgctctggagcctgtagggcaggaccaccgtttggaggtgcgcattccggaggaactcacccgctattgtattgacaagggttccatcaccattgacggcatttccctgaccatagccaatttgagcggctctctgctggagttctggattacaccccatactttcggccgcacgaatctgcagaatgccgttcccggccagccggtcaatctggaagtggatatgctggccaagtatgtagagagactgttttctgcccgtgaacaacgtgtggagggatagtcctgcccgtaaggagaatcacatgccgggcatgcgggctggtttttcctgccggacaatgaaagtgcattcctgttttctgtagcaggggtgccgggatgcggagatttttgaactggaagccgggtattgctgttccgatgaaggaagggccgtgagggcggaacaaaaatgcggagcgagtctatttgctaccgggccattcctccctttgccgtaatccatttcccgcgtttgacggcccgttcaaagaacagaccgtgacgttccgctgccgttttcgtttcttcccactgggaagccagaatgccggagatgaccaaagcggcatccttcttcatggcggcgatgatttgtggaaaagccttttgcagtatggttgaaaacaggttggcgacgacaaggtcaccctgctgggattccgaaggtttccatttgaagacgtcttccacaaataagtccagctgttccgccgtaacggcgttgcggaccatgttgtgccgggccacttcaatggccatggggtcaaaatcgaaagccgtggcgtgctccgcccccagcttcagcgccgccatggccaacacggcggttccgcagcctatgtccgtcatgctccatgatgtttttctgcgggatttggcagcgtcgcagataaaacgcaggcaggtggatgtggtagcgtggtctcctgttccgaaagccatttcggcggggacgctcaggatgcagcgcgaggggaactgtttctgcagagcggccagattctccggagaactctgctccgtaatgaccagtgtgtcccttattttgagcggagggcgtttttcccgcttctgggtcgctacccagtcctgcgtcttgatttccctgacagttcctccaaaatattttttcaaggccagggcgtcttcttcatcatcgcagtaaacggtgattcgaaccgttttcccccctttgatttttgtaataacggcgttcggatttccggcgatgcgttcgctccaggcgtcttcccatttggcggcggaaagtttgttccaactccatgtcatgcagaaagtatgggatttttccggcagggaggcaagaatggattgattgtaactgcattcccgcagtttttggggctgtgtggctctattgttgaaaatttgatttatttaaagaaaaatataaaacatcaactatcaaaccattttattttcagtatggttgcgaatttggaatccggagtaaagattatttttttatattcaatggccaacctgtgagaagaggaaggaatcttgttctgtttcaatctttttttctaacaataattcattgattgttattttgttgttttgagtttcgaataacaacggattccaaattcgtacattaaaaggagcgcgtttgatatgcaaaaaacatccaaatgtacagattatcatgaaattatttgcttttgccatgttgtccttggttccttcagttactgtctgttccgttttttccaaggaagtggatatttattcaggaacatatggaaacgatgatgtggaagtattccagccggaggaagtgacgtatcatctggccggaagggatggcgtcttttatgaaggtgcgtttacgtttgataattataatccggacaagggcggcgccggaaacaggcagggtgttttctccggctatagtacgcatttttccagcacggaaggaacgtctctcggctttcactgcaccgggcttaatcccggaaagaacagttccgcttccaaatcttttatttttgtcatggggccatgggaaagcggggaggagtttgtcgctcctcaggttacttttcagaatttgggcgatttgagcttcattgcggataatatggacatgatcggcattaccgatggcgccacggccggaaccggtggcgggaggtacgggaaagctgatattgtttctttcaacaatgtaggaaatatcgaattccgggggctgaatcatgggggtataggcttcagccgtttgaattccttggcttttaccaataccggggatatttcttttacggatatgaagatgggatattcttccaatggcggcgccatttttattaaccaggggggggattcttccctttactccaatcctggagatgggaatatttcttttgaccatacgggaagtattatcttcaggaatcttgttaaaacttcttattacatgagttctgcggggatttttaccaatgaagggagtatttcatttaatgatacggaaaatatcctgtttgaaaataacacgtccaccggaggacctgcggcgataggcattggatccatattcttaccggataaccagccgtctttgtcgtttagcaacatccggggagatattatttttagaaataataaggcttccggagggagcatgccggggatggcgggcgctatcactatttatggatcttttaagctggtgcaaacgggtgatgtcctgtttgaaaataatgtgactgataaaaatacggccggagccatttattgcggcaataatgaagggaaaaggtttggtgggcaatggcttttgtctgcggatggcgggaatatcgttttccgaggcaacttggttaaaggacgttcgggggtctttgcccgcgccctggggatttttgcttatgctcccgaagacgattatacgggtatatctcagcccaatgggaatttaaccatggatttccgcgcccaggccggacgagaaattgtattttatgatggtattgatattgaaagtattactgtagccatgcctaccctgcatattaacagaattccggccgattgggcagattatggaggtattcctgtggagtttggaggaaccgtgcgtttttccggtgcattgacggagtcgtttctagttcgcaatgacggggaaagtgatggtgattacgcggaacgggtggagacctcccgcagggtgaaacttgaatcaaatattattgtggaagggggacggctggttcttgaatacggcatgaacctggcgaatgagagtggggatgtatggcagggaagttcaagagtggagcaggacaaaccggtgtttaacctggccggcggagtgctggaaatgacgtccggttcatccatcagcgcccagcaggtgattgtttccggccatggcagcggcgctatcctgcgggtgggagccgctcccattggttccgacagttgggaggggaagacctatgaactgccttccctttccgctgtcaccattgacatgtcccacgggtttgactgggatctcatgcctttctcggaacggggggacagcggtatcaacatcaccgcctccggggaatttttactggggggaaccattggaattgcggatacgctggatgattacgcctccgccgcctggggaagggacagggagtttgtcatttttaatatggattcttccagcaaacggccgcaaggagggctgaaaggggttatttccaatacgacccagtcatccacggttgattctccctatacctacggcggtacctgggaatatgaatggcgcgacatggatggagatggagaagatgaccagctgttggcaatttggaaacatgaagccggatgccgcccggatcaggtccgtccggagcaggctggagagcttgctctcaattccctttggagttccgcttcaaacgcggcttctcttgggaatactgcgttggcgcagttaaccccggtgcggttgtatcagcggtatgcacgcaatgtatggggaatggggctgggggatttcgcccgccagcgttcccggggcggcgtagatggttatgactatgacgggggcggatattccgttggcatggattccgattttggaggaaagagcgggatatgggggatagcgttcggacaaatgcacggtttcagcaagagccgggattttaatgggaggattacccaggattccctgatggggagcatttattgggggcggatattccgctccggcgagcgttccctgtggacggtgaaagccgatcttacttggggaatgactgataactgcatgaaaagccggttcagcaacggtatggacgctcatggggaatggaacaacagaacgtggctgatccaggcggaagtttccagaagcattcagtatgcaggaggatggactgtgtctccgtttttgaggatggagtttacacatggcacggaggcttcttttcttgaagacggcagctatgccagaaaatttgaaggagcggttttgcgccggttgtccatcccggcaggtgtgagtgttgagagaagtggtgactggaaaggcaggcactggacgcaggtgctccgcctttcctatgtgggagatgctattcaggatgtgccggaggcttccgtttacagcatatacagcgacattttctggagggcccgtggtgtccaaccagcccgccatgccgtacgcgtggagtatgatgccgccttgcagtggaatgaccgctggacggtttatgccggttatggcatggaagcccggggaagctccgtgtaccaccgcataaatgcgggcgtatccagggcgttttaggaaacgtcagcacggatagaaaaaagggcacgttttcgaaggaaacgcgcccttttttgatactgcgggggggatgttccggcagggggggacagctacaatgttttgccgttcggccacatcagcatccgtttcaggaagcgttcgttgttgacggtgatcttcgggaagaggcgtttgctggattccttgagcgccctgatggcgtcttcaccctgcaacggcgtgcggccggattcgtcgatgatggtgcgcagccatgcggtctgcggcatgccgcatgcttccacggccttgaagggcatgcgttccctccagttggtccctcccgtagtgccgggaatattgagccgtttgttgatgccgaagagagcaggccagagaatggccgcataacgggaacgggaacggaacagagcgttgtacatggccgtcttgatttcctggttccagtaggaaagccaggtttcaggctgcatgccggagaaatccgcaaaccatttcagcaggcgcgctccgtcctccgcctggcgcacgatgttttcctgttccgggctggacggcgtttttggggagccgttctcccacaggcccagcttgcgggcgcgttcgattttcgcgtagctgtcattccatgtctgcatgatggtttcgaaatcatgcgttccgaacgccgcaaaggagcattcgtgatattcttttccagacgtaatggttccgtccgccttgatttcccagtggggaattttgaaaccggggatatccagttggcgcatgttcgggcgcacgtagtccggaacgcagcccaggtcttcccccaccacgctgacgccgggggcggcggaaagcagaaggcgcaggtacaggtccccgtccgccaggttcatgttgcggtccgctgcattgtcatccccgcgcggcttgaagccgggcagccttccgcccgttctctgggcagcctgatcgggggaaagcggcaggaagaccccgttttccgtgggtttccacgggaaggagtaaatgcggtaaaagcccaggatgtggtcgatcctgtacatgctgaaaatcttggtgcagtattttacccggcggcgccaccaggcgaagttgtcctgcgccatgacatcccatctatacagcggaatgccccagttttgcccccatttggccgtgaatgggtcttccgcatagctgccttccgccggggctcctccgcaccattccgtgtcaaacaggtggcgttcaaaaaagacgtcggcgctggaaagggaaacgccaatggggatatcccccatcagcttcacattgcgttcgtccgcataaatacggatgaattcccactgtttttcacagagccactggagccagcgggcaaaatccttttcttcctcgtaatcggcggcaatggccttggcccgcgccggatcctgttccggccagtgccaccagatttccgtgccgaacaggtcgcagagaatctggaaacagacaaagtcttccagccagctcccctgttctttcacccattccctgaatttgggcataatgcactcatattccggcttggttttgaaattgttccaggctccccgcagaatccacattttccagaatctgaccttggggtagtccaccagatccgggccggagggctgttcccacggtaacgtgtcccccgtttcattgaatacgcgttcttccaggccgggtatggtccagggttccagggaaaggtacaggggttccaaagctacggagctgatggcggaatagggagaggggcattcgtccctgcccagggcattgacggggagcagctggaggaaccccacatgggcatccgccgcccagtcaatccattggcgcaaggccgtcaggtccccgattccgtggtcattgttacggcgcagggagaacaatggcagaactacgccggctaatcttttctcatccatatcagaacgcattacttgagcggttcccccggatggacctgcgtcagccgttggaacagtaagcgccagaatagcatttccggcaggaaggcggcaagcttaatacgttgtctccgcgccatgctttgcggtttttcctgggaactggagcaggggggacggtaagacaggctgtttattttccgccgcagaaataaacgcctcaccgggaatccgattatttgtccgggatgcagttcggaagcggcatggttttctctgcgggaaacagcatgaaccggagggaaaggcggaatttttcttttagaaacagtctctggcggaaacaggcgcaaattctgcttccatccgtaatccccggcaattaagataatctgcaaatgaaattgctttttctcccttccgctttgctggtgctgctggcctcctgcggtccgaacaagcatgtgaatgcctgggaccgtcagagttctgcgttggatcccgtgggaatcacttccaagaaaatggcggctaaaaacaaggcggagcaggcattttacaaacctggggaagccgttacgttcaagaaggacagaatgatggtgtttgaacagaatccggaaagtaatttttccacaagcggaaccgtcaggggtggggtgaaaaccgggaaggtgctggtctgcggggatttgttcgccaaagtcgagtttgaagacggcagccagggctacgtcagcctctcggagattgttaatccgcaggaaatgatgggtttttatcctgtttccgcttccgatttaattggtccggacggaactttgcttcctttgtcctcaaacatgggcgccgtcagcccggaagccgccgccgcttcccgtgagctggatatatcccggatgaatacctctcttgttcctgttccgaattccgtttctccgtcgggagctgcgcctcaggaagctcctccggaaaacgttcccctgcctgaatccagcgtgaagcagtagggcctttgcagaaaatccggaaagccgggcggaaaacaggaggcaatatacgtcggtctgcgcttcgcctgtatttttgttcccgggttctttccgacaggcacggaagcaattttattccgccgtcaattcatacgcaacggcatccgttacggtgacagtagcgaattgcccgacgggcagcgtcagaggaacggaaacggttccgtcaatgtccggagcatcccattccgttctggcgactccgggagcatccaccagcacgcgtatttgcctgccgatttgctcctggcccgtttccgaagcgagacgcgccagcaacagggtggcttcattgtagcggcgagccttggtgcggtggtgcacctgtttgggcatcttgtaggcttttgtcccttcctcccgtgagaaggtgaaaatgccggcgcgttcaaaacggaattcctcgataaactccatcagttcctgatggtcgtcttccgtttctccggggaatccggtgatgaaagtggtacggatggcgatgcccggaacggctttccggatattccggagcaacgtgcggatatagtctccgtccgttacgcgctgcatggcgtccagcatattatcggaaatatgctggaggggaatgtctacatagcgggccactttggggcattccgcgatggctgcggtcagttcgtcgctccagtgggcggggtgggtgtagagcagtctgatccagaattctccctcaatggcgttcagagcgcggagcagggaagccagggactccccgcgggaggaatccaccgcgctgcggcggtttgggcgcgcatccgtccatttatccatgccgtaataggtgatgtcctgcgcgatgaggcagatttccttcacgccggaccggataagggttcccgcttcacgcactacgtcctgctgggaacggctgcggtggcgtccgcggatcatgggaatgatgcagtaggcgcagccgtggttgcagccttccgctatcttgatgtaggccgtgtgcggcggggtaaggcggtagcgcggtgtgttccagtcaggaacgtacctgcattttccttcaatgaagttccggttctgtatggtccgttccatcacttgagtgataatttccggcagtttggtgatttggtccggaccgataaaggcgtccacctccggaagcagggcgggcagttccttccggaagcgctgggacaggcagcccgccacgatgagtttctggttttccggataagccccgttttcccgggcacgcacgatgtccagaatggcatcgatggcttcctgcttggcctggtcaatgaaagcgcaggtattgaccaccattacgtccgcgagttccggttccggagtcatggtcatgccggctttttgcaggtggccgatcatgatttcagagtcaaccagattcttggggcagcccagggaaatgagtccaacggtgagaggcatggcagtagataagaagcgtgatggcgtcaatccccggagggggagtcgtccttgacgacgacgaggtcgaatggccggatgtccacgacgcgcacaggggtacccttaatcagtatgccttgtcgagagaaaacctcgcatatttcgccatgaatcatggcttttccattgggtttcagctccgtgacggcgttcccgcggtctcctacctgaacgcgcgcgatattgaccgcttccccggcggaacctccgctgaccgtggcgttggtaacgcggcgcatcaggatggaatccgggaggtatttcatcagcagggcaatcagaagggagcctcctgtcaggcccagggccagtttcaggagggggatgcccaggactgccgccagcgtgttgacgtcatcccactgtccgtcccggatgatatggtcccattcccaggagctgaccatgccgccgaacagggccagaaagatgcagacgccgcccgcaatggccgcaatgaatgtgcccgggataacgaagaattccacgcaaagaagggctatgcccagaacgagcagggccgccgtctcatagccggccagattcccggcaatgttgttgccgaagaagaacagagcaaacgcggcaatggccacaatgccgccgataccgaatcccggcgttttaaattccatgtaaatgccgccgatgcccagcaggatcaggatgggggaagcccatgcaatccagaggccgatgcgctcaaaggccgtaggttccgccgtgaccacgggggcatttactttctcctgggccagcagatccgtgacggaggaggctgtgccctgggccagcaggggcctgccgtcttccagacgcgcggcggcttccttgcccgtcagggtcaggagcgcgcctttttccagtttgacggggccgaactgctgttcctggtcggacgggatcatcatggctttcaccacttccgggcggtaacccttttccgtcacgacggagcgggtaaaggcccagaaggcgctttccgctttcttgcgcatgacgggatccatttcctctccggatgaggtgatgatgcccgctgcgccgatggaggagacgggagccatgtagattttgtcgcacgccgcggagatgagcgccccggcggacatggccctggggtttacgtaggcgtaggtgggaatggtgagcggttggatgcttttcatcatcatctcgctggtctcccaggccaggccgccgggcgtgttcaaatcaaatattaccgcgcgcgcctgctcctcctgcgctcttttcaggatgcggttcatgaagccgaagctttgtttgctggtcagggagtcctcccctacggggatgacgactaccctgtcgcggaaggtttcctccgcggccgcccggaagggggcgccggcaaacagggccagcaaagccagcaacagaaggtgaatgcacttcatacggacaggctagcatgttccgctcccgcgctcaatggggaaatgtgttcctccggggcgggaaggcgccggtgctgcgccgtcttttcccagcctgtggaggccttgtttcctcgcatggcgttccgattctgtattcttgtgtacccgtaccccttgtgatagactggttccgccttatgggaaggattgatgaagacagtatccggcgcgttctggaggccactgacattgtagatgtggtgggatcctatcttcccctgaaaagggccggttcccggtggaaggcatgctgcccgttccacaatgaaaagacgccttcctttattgtggaccagagtcggcagaattttaaatgctttggctgcggggaaggagggtctgccatcacttttgtgatgaagatggagaacctggggtttgcggataccgtgcgaaggctggcggaaaaagccggaatctccattgtggaggaggtctatgacgcagcggaggaaaggcggcgcaaggcacgcacggctttgctggtggcccacaagaaggcggctgggtttttccacaggctcctgctttgttccccgaaggcggcggaggccagggcttacctgaattcccgcggatacggggcagacatggcgaaacgctggcaggtagggtgggctcctgactcctcgcgggagtttctggcctgggcccgcagggaggggattccggaccaggtgctgatagattccggtctcgccaaccgcggagaacggggagatttgtacgcccgcttccgggacaggctgatgttccccatcaacaatgtgtacggagaatgtgtggcgttttccggccgcattctgcggcctcaggaaaacgtaggcaagtacgttaattccccggagacggccattttcaaaaagggggacgtggtgtttgccctggacaaggcgcgcggccctatgggaaaaagcggcaaagccctgttgtgcgaggggcagatagacgtcattgcctgccacgaggcgggtatttcttttgccgtagcccctttggggacggcgtttactccggagcatgcccggattctttcacgctatgcttcacggatagtgttgtgttttgacgcggataaggcgggcatggctgcggcggatcgggctttccgtgaactggccccttttggcaaggatatttacctggtgaaccttcctgccggggacgatccggattctttcatgaagagggaggggaaagaggctttttctgggatggtggagcgggcccgttccttctttgaggttcgcattgaacgggccagggagagcggtttgttggatgacgccgcttccagcgccgcttttgcccgtgagatgacggccctgctggcctgcatgagcgacccggtggcccgggatctggctacggctgacgtagccacgcgcatgcgcatggctgcggataatttgcgcggcgccgtcagaatggccggacgccggaaggggcaggaacaggcccagtccgcagagcgtaagacggctgaggaggtttcgcagcatcctcctgtgaaaatggatcgcgccgtggccgtgctctgtgaactggccctccagaattcccgtgcccaggggcttatcgtggaccgcattgaagaattgctggagccgatgcggctgctgcagggcggaggcatcttaaaaaaaattctggccaggctgccttctccggacagccccgcggccgttcaggcttttctggtgtctctgcctcagccggaacgggatgccctgggcatgctgaatctggagcccatacctattcccgatgtggacaggagcgtacaggaagcctgctccggcattgcgaaggccgctttggagaggcacatcgcctccctgatggcggaactggcggatccctccacggatgctgccagaaggctggaattgtccaaacttagtgttgacttgaagcgtttgctgggtacaatgtagtgcctcgatacctccgggtattgatataatggtgaattgtgccctcttcttttcaagatatgtccaaatccggtgacccatccccctcttctcccaagaagacttccgccaacaaaaaagcttctgaatccaaggaaaaaatagcggcccggcccgccgcaaaaaattccaaaaccgctccgaaggcggctcctgtcaaaaaaaactctgccaaggctgccgctccggctgcggaaaaggccgccgccaagcccgttgcagaaaaaaagaccccggcaaaaaaagcgtctccggcttctgcctccaagaaggcggcgccgtccgccaaaaagactccggcaaaggcgcctgaagctgtccctgccaagaaagctccagccaaggctgcggagaagaagccggctgagaagaaggccgccaaacctgccgcgaaggaggaaacgcccaaaaaattaagcgaaatactggaagaggaacgcaagagggctgccagccgcaagatcacgaatccgattgacgctccggaaattcaggaaaaaatccgtgaacttatcaagctcgccaaggaacaggggtatctgacttttgacgatattaatgactcccttcccaacgacattgtcgatcagcaggattacgaggccatcatggaccgcctgcgcagcatggcgtttgacatcattgacgcgtctgatgtggacagctacacggaccgcacccgcatcagcacggaagaagaggacgaagaggaaaagctcgaagccaagatggacattctggatgatcccgtccgcatgtacctgaaacaaatgggccaggtttccctgcttacccgtgaagaggaagtggccatttccaagagaattgaggacgcggaacagaacgtccagcgctgtgtgcaccgcttcggtttcatcgcgaatgcctatctggacgtagcctatcgcctgctcgacaatgaggaacgctttgaccgcgttatccttgacaaaaagatagactcccgtgagcgctatatgaaagggctggcccagctctgcgcccagatacagcagacccatcaggacgcatccggttccttccgcaagctgtaccgcagcaaggaggcggccaagtccgtcaaggcccgccaggccgaattcgacaaagttgccggcgttttggtgaagttcttcggtcgcctgtatttcaagcacaaggtgattgaggatttctgttccatgattgacgaggcccgcgaccgcgtgctccgcatgcagaagaaggttgccctggaaccggacaacaaggaactcaaggaacatctggcagagctggagcttcgcatgtggatgactgcggatgagatgggagaagcctaccaggaactccgcaaatggcttcgcgaagcccgcagggccaaggatgaaatggtggaggccaatctgcgcctggtcatttccattgccaaaaaatataccaaccgcggcctctccttcctggatctgattcaggaaggcaacatgggcctgatgaaagcggtggaaaaatttgaataccgccgcggctacaaattctccacctatgccacctggtggattcgccaggccatcacccgctccattgcagaccaggcccgcaccatccgcattcccgtgcacatgattgaaaccatcaataaattgatgcgcgtgcaaaagcagctggtgcaggagtatggtagggaacccactccggaagaaatcgcggaagaaatccatctgcctgtggaacgcgtgcgttccgttttgaaaatggcccagcagcctatttccctgcaagcccccgtgggggattccgacgatacttcctttggtgactttattgaagacaaggcggcggaaaatcccatggaggaagcctccttctctttcctgaaagaaaaaatcaaggatgttctggacaccctcacggatcgtgaacgagaagttattgaacagcgcttcggcctccgggacggcagtccccgcactctggaggaggtgggccgccagttcagcgtcacccgcgaacgcattcgccagattgaagccaaagccctccgcaagctgcgccatcccacgcgcatcagcaagatcaaaggattcctggaaatgacggaatcctgaccggatttgcgccgcatgccgtgctacgcttcgtggtcatgaagacttgcgtagctgcggtatgcggcatgttcatgttactggtttcctgttccggcagcagggaattcaaaccggcgttcaatcagccccttcagcccgtgatgcagccgggctttgtgtatgtggaccaggtggctccgctggtgaagactaatttgaaatatgccgggtatgacaattttgtagggcgtccgctggacggttaccacggtcggcgcgccatcctgcgcacccaggcggcgcaggcgttgaaaaaagtctcggaagatttgtatcgtcagggttacctgctggaaatttatgacgcctaccgtccccataccgccgtgctggacatttgcaaatggggagctgacgacggggaccaaaagatgaagtcccggtattatccccatattgacaaggccaaggtgttcggagaccactatgtgcgcgatttttcggaacattcccggggcgtggctgtggatgtttccctgctgtacgccaagaccggaaagccggtggatatgggcggccatcatgacctgctggatcccagttccaccacagactccacattagtgactccttcccaacgcagaaacaggatgattctgaaaacggcttttgaaaaacagggttttgccaattatgctccggaatggtggcactatcgcctgttgaatgaacctgaacctaccctgcattattactttcccgtgtgggacggcatgacttccgcgggcaggccataaaagaattttacatatcaaattttgtaaaaatttgtttgttagctgagtggccgaccccgtgctgattcctatcaagcagaatgtagaagatcgtactgacacctggaaaggatacattagagtagaaaaagcagaacggcattatttcctcatcgacggagacgatgttatgactctccaatggcgcgagtcatctatgcggaagccgatacgaagggtgccgagatgaggacgagtgcattggtgatgttgaatcgtcccggcagcacgaaagggaatgcttatcgaaatcccttgttgagtatattgacggaatttggcgaaatcaaagacggtaagaatcctgattgggcctccgtaacaaatcagcaatatgccaaggttgaagtggatgagtacagggatattgacaggctgagctgtgaaaaactggaagaagccagaaaggcgctccttgaggttctgagcggtggcgtgactgttccttatgatgaatttagaacggcagtcactactcccacgccttatgtcactattggcggaactgactttttgacggaaaagcagtatcggaactgtattgtcaaaccagacggatgcgatagtttgtctgtctggcccggtggatctttggatagataaatcattctgaagcatcatcaggcgatcaggtgattgagacttgagccgtctttttgacgaagtgatatctggaggatgaatgcctctcttaaaacgcttcttttctcttgccgcacggttccccttgttatggcttctgacgtgccttctccccttgtcgatcatcctccggtggatgttgctgccttgcgttttcacaagcaggagatggcttttttggaaaactgtttccgggagaatccggataacaaagtaatttggcaggcggactatgaagtcgcattagtgtggagaacgccgaggggagccaattttaacagttatgaatttaaggcttttctgcgccagcaggacggttcattcagagaaataggaagatattctgttatgtccggttatggatattgggatgaaaaaaatatccagttttccaatgaagggtttcagattgttttaattgcggatggaggggcaacgcgtgtaagccatcagttccattatttccaacctgccgcaacctttgttttccggttgggccgggaagagggcagacgttccaacgaggaagtgcagatgggtaatggttgttgatttccaaaccggtttgtccgcaatataggaggggaaaagtgcagtttggacgaatcccggccattccttgacgaagaggtttttttgttgcgggcgtcttggccgcgcgtatcgggggccgtaaatacggacttttgatgaaaaggccgttccgcggtaaaggcggaacggcctgaaaagcgtttatacgcaggagatgttaatgaggcaggcggaagttgcggttaaacgcggaaacttcttccttaagctgggagaagccttccggattcgggcatacctggtcacctacgtacagggccagcgcacgggcaatgaattcagccacctgttccacgtctttttccttcatgccgcgagtggttacggcaggcgtaccgatgcggatgccggagggtttcatgggagaacccgtgtcaaacgggatggcgttcttgtttacggtgatgcctacgcggtccagggcttcctgcgcgtctgcaccgttaatgcctttgttgcggaggtctaccatgaatacgtggttgtccgtaccgttggagacgacgcggaagccgagttccgccattttggccgccatggccttggcgtttttgacaacctgggccgcatagtccttgaattcgggcttcagagcttctccgaaacaggccgccttggcggcaatgatgtgcatgagggggccgccctgcattccggggaagacggctgcatccagttttttggcgtattcctccttgcagatgacgaagccgccgcgggggccgcgcagggatttatgcgtggtggaggagacgaagtccgcatggggaaccggattcgggtgctgccccccggccaccaggcccgcgatgtgggccatgtccacgaacaggtaggcaccgcaggccctggcaatctggcccatgcgttcaaagtcgattgtgcgtgagtaggcgcttgctcccgccgtgatcatttgcggctttacctccagagccagtttttccaaagcatcatagtcaatagcttccgtttcctgggatacgccgtagtgaaccacattgtaaagtttgccggagaagttggcccggtgtccgtgggtgaggtggccgccgtgggagagatccatcgtgagaatggtgtcgcccggcttcagaacagagaagtaaacggccatgttggcctgggaaccggagtggggctgcacgttggcatgatccccgccgaaaattttcagcacgcggtcaatggcgagctgttccactttgtccaccacctcgcaaccgccataccagcgcttgccgggatagccttccgcgtatttgttggtcagcagggagccctgggcttcccggacggagggagaagtgaaattttcggaggcaatcagctcaatgttgttgctttcccggcgtccttcctcctggatgaggcccgccagttccgggtccgtccattgcagggggctaccggaggatttaacgacgcggcgttcatggcgtccgccttcaaagtcagcatgcagccaggcgtccaggacgtcttccacactttcattgtccacataggcggaagccaggcagagcaggttggaatcattgtgctggcgggaaagggccgcagcaggggccgtgcggcagagggcggcgcggacgcccacccagcggttggcggcaatgctcatgccgatgccggaccggcagataaggatgccgcggtcgttggtgccgtcagcaatgctgcttgcgactgcattggcgtagtcggaataatcacaggaatttttggtcatggttcccatgtcggtcacttcatgaccccatgccttgaggagttccgctacggtttccttgagatcgactccggcgtgatccgcgccgatggcaattttgtatgtcgtattcatggtggtgctcattgctgacgggcaaaaatactgccttatttccctccggctggcaagccccggattcatttcgggctgttcgggaggcacggctcccggaattgcctccgtgaaaaagaaccccggtcccctgaatggggccggggcggcaaggaggttcgcgaggagcgagccgttattttccggaggattccagctttagcatatcctggacgatgttgatgccttcgcggagttccggatcaaggccggaggggtattccggggagtcgtccagttctgccgtggggtcttccgccaggtgcatgaattgttcattgtctttttccggatccgccaggggcagctccttagcgttgacgtcatccagcgtcaggcggtaaattttgtatttggttgcgtcttccttggccatttccgcgaagcggattttacgttccttgttgatggatttgcggcgttcttccagggcggagttttcctgttcccggattttcttgttcagggaaagcttgttgtccttgatgcgctgtttcatcatggcgatatcttccctggcaatctggaggtcgcggtctttttccacgcgcttcgcgctggcatctttcagcacgggcagcatggccgcgatggaggagtcctttttgtagttggtgcagggcgtaatctggtcatagggcatcgcgtagtccagaatgtcttctcccagctcgaatgccgccgtagcggtgggaagctggatatcgctttccacgcctttgagctgggtggagccgcccgccacacggtaaaatttctgggtagtgactttcagcaggcccgcacggtctctggccgcgaagaaaggcaggtattggccgatgtccacaggctgctgcacagaccccttcccgaaggtggattcatcccccacaatcacggcgcggccgtaatcctgaagggccgcggccagaatttcagaggcggatgcgctgagtttattaatgagcaccacaatggggccattgaagagtttctggcggttgtgggcggatttgatatccacgttgccgcgggtgtccttgatttgtaccacggggccgtttccggtaaagaagcccgtcatcaggcgcacttcctccagggaaccgccgccgttgctgcgcaggtcaattaccaggccatccacattttccttgttcatccgttccaggatttttttgacatccttggcacagcggcggtctccgccttccatgtctgcgtagaaggagggaaggctcagcacgccaatgcggttcctgccttccggagctccggtaagttcaatgatttcacctttggcaagttcatccttcagaggtaccttggagcgggtcagcgtaatgattttggcctgtccgggggcgtctgccggctctactttcaggcgcatctgggtattttcggctccgcggatcatatccaccactttgtccagcttcatgaacaggatatccaccatttctccggagttgtcggagtcaatggcaacgatgcggtcgttcagcttcaattctccggatttgtcagccggtcctcccacaacgataccggtaattttggtggaaccgtcgtcttcactgcccaacagggcgccgatgccggtgagttccgtacccatggagattttgaaacggtccacctggcgcgcacccatgtaatccgtatgcgggtcatacgtcaaggctacggcgctgagcagtgtttccgctacgtcttccagatccgtttcctgaatattgcgttgaatgcgttcataacgcataagcagtttttcctccgcgggtttttcattggccaggggatcgggcttgttctgttccttggccaggcgcgctacggtttcacggcgcaggatttcggacaggagctgttcctccaccatgtctttccagacctgctgcatttccgcctcatccttgggccacgcggctgttttgcggcgggaacgttcgatagacttgtctttgtcaaaggtgaagcctccctttttcagcaaatcccgcgcataggagatgcgctgcatggcgcgctggcggtaaagggcgtgcatggcctgggccgcatccatcatctggccggacataaggtagtcgtccagctccttaccgtattttcttttgagtgcatctacgtcctgctgggtgaagaatattttgttggggtctaccttgcgcaggtaggtttccaggaatttagtggatagttcatcgctgaattctttgcgggagaagtggaaattctggagcagcagggacatttgcttgcccacctggttgaagtccgtagccgcagaggcgcaggaagtaatggcggctgcggccagggccgagaatgcggtgagtctaatccaacggaatgagtgcatgttcataacggaaaagggtgcgtttttttccatttggggaaaaagctggcgccgggatgtaagtgttactgatttgcaggtgattgtctatcttataaaacgtccacatgacgctattttgctctccttgtttccggaagaggacaagagtaaatggaagccggttcatctggaaatatccggcggcggcagggggaggaaagaagagaattcatgggtggataaatccaccataaagtttgaaattttgtgcggaagtccggcatttgtcatattggagctgcatggaaatggatttcattttacggatgttttttccgcatttcttccgctttttgttgttgcgtgttttctttgattttccgttgctgcatccttcccggagagggaaaagtggcgggatgactgctttcctgtttgcagcggggagggtgaggatggggagaacggacgttttccgaagagacgccgcaggagaggaagcatttcaggattgaggttgcaacggttttctgtacacttcgcgtgatgatgagcataccgaatcgggacaagagtttttccggaagcaagatgggtgttctgctgcagcgttcattcagcaccgtggttttgcttgggttgctggccggggctttgtggtgggactgcgaacttgggtattacggtctggtctgcattttctgtattttggccgcctgggaatggcggcacatgctgctgcgttccggaaaagcctcccagccgaacttgagctttcttttcggagtggcgtaccccgtattgctgtcctggtcatgctgcatcactaaattccgggaaagcgcccttgcggaacaggtttctttcctcatcccccttcctcttctggtggcacttgccgctccggtcctcctggtagtggttgccttcatccgtgagatgaagcacccggtggatggaagcagggctctccgttccgtgggtactacgctgctttcctttatttatcccgtctggctgttctcttttgccattctggccctgcatctggcgtatatgagggcggggtatgtttatccggccattgtcatgtgtgtgctgtgggtcgttctggtaacgaagatggcggacatttttgcttacgtgagcgggttcctgctgggcggccgccttttttcccgcaggctcattccccacatcagccccaagaaaacgtgggagggcctcctcggttcctgggtgctgacgaatgcggcggccatagggctggttttcccgatgttcagaatttccgtcttgtccataacccaggtactggtactgatgggatgcacatccctcattttcctgctttccgtttacggggatctggccgggtccctggttaaacgcagcctggccatcaaggattccggttccctgctgccggggataggaggaatttttgatttgattgacagcccttcctttaccgtgccgtttttctggtttctgctggcctgcatcggctgaatgtccccggcacgaacggattccctgtaacccggtatggttttttcttctcttcccattgaggaaatccgcggagaattgatggaggctctgcgggttccttctccgcgcattttgttgaaagctcctaccggctccggcaagtccaccggcgttcctccgatgatggatgacgccggtctgggagaccgcggcctgattgtcgttgtacagccccggcggatggccgctcgcctgctggcgcggcatgtggcccggctgcgcggggtggagctgggaaaagaagtggggtatgcggtgcgttttgaacggtacatttcctcccgcacccgtatcgcgtacgtgacggacggcatgttggagcgctggctgacggaatggccctccctggaaggggtgagcgccgtggtgtttgatgagttccatgaacgcagcctttccggggatttatccctggggcgtgtgctggatctgcaggaagggccgcgccgggatctggccgtggtcgtgatgtccgccacactggagatatcagggctgcgggaatatatgggaggttcctgccgggttctggaagcgcaaggcaggcagtatcccgtggaagtcgtttaccgggctccccgcctggtcagtgacggacgcggcagggtggctcctccccccatatgggagcaggcggcggatgttgtgcgggaggcggtgagggaggatgactgcggggatgtgctggtatttatgccgggcgtgtatgagatacggaaaacggtggagttgctggcaggaaagccgtggatgagcggccgggacgtttttcccctttacgggtctctggcgccggagcagcagaattgcgccgtggagcggggggatatcccccgtgtcattgtttccactaatgtggcggaaacttccctgacgattgagggagtgcgtacggtggttgattccgggctggtccgccggtccggatgggatccgtaccgggggatggatacgctgcatctggtgaagatttccaaggcgtccgccgctcagcgcgcgggccgtgccgggcgcgtggctccggggcgctgtttccggctgtggagtgaggcggaacaggcccggaaggaggattttgacccgcccgaatgtttccgggtggatctggccggagccgttttgaatttggctgcctggggcgtcaccgtaccggaaaatttccgttggctggatgttcctgcccccctggtgatgcagcgggccgtgaatttgttggctgccctgggtgcgacggaagaggacggaagcctgacggatacgggaaaaaggatgaccgcttttcccctgccgccccggctggcccgtctgatggtggccggccaggatgaacagtgtgccgtggagctggccgccgttgcagccctgatgcagggagaaggtgttgcggtaaagggggggctgaacgatcatttgcgcgattctgcggattacacggatttccaggcggagtggcgcgcggtggagaaggctgtggatgccggttttggggcggcggcgtgtacccgctggggcatctcttcccgcggggcgcgggaggcatggatggcataccggcagcttctgtccgtcggcagccggggaaaagcccgggaaacgccgggaccggattttacggcggcgcgccctgccgtagtccgtgcaatgattgagagttttgcggaccatgtgggtgtgcgaaatggcgtggcagccaatacatgccgcatggccggcggggtgggcggcaggctggcggaaggaagcgtggtgtttcaaggagagcatttcgtagccgcagaggtggcggaattgtccggaaaggcggtggaaacccgtgtgagacgctgtacgcttattgcgccggaagatttgcgttccatttggccggagcgtttttcctgcggggaggaagccgtcttcgatgccgctttgcggcgcgtgcgtctgcaccggaagctgatgtatggagatctggtgctggaggatcgtgaccgcggggatgcccctacggagctggccgccccggttttggctgaaaaagtagtggacggaaccctgaagctggtgaaatggaatgatgccgtggaacagtggatacgccgtcttaatggtttgagcgtttggatgccggaactggagctgccccggttttcggaggaggacaagctggtcgccatttctctggtctgtgaaggggccgtgggttataaggacatcaaggaaagggaaattattcccgtgctgagggattggctttccggctggcaggcgaaggcgctggacgattatgccccggtaagcctcacgttgcccaacggccagcacgccaaggtcaggtacggggaggattcctccccggtgatcagtctgacggtgcagcgcctgttcggcgtggcggtttccccacgcattgccaacggggccgtacccgtgattgtggaggtgctggcccccagccagaggccgtggcaggtaacgggatctctggaaagtttttggcggaacggatacgggcaaatgaaaaaggacctggcggggcgttatccccggcaccgttggcccgaccccggggaactggatttccttccccgttcccggtgataaggagaaaggatttttctgtaacaaaacagtagcaaaatcgaccgtttccgtgtaaagaggcggtggtgcagctcgcggatgccctccgcccaccattcacaagagacagttatggactcaatttactggattatcatcacagccctgctgcttctggcggcatttgacttgatcaacggcgtagcgaatgacgctgtcaacttcctcaattccgccatcggttccaaggctgcacccgtgcgggtgatcctgaccgtagcttccatcggcgtgctggtgggggcctgtttctccggaggcatgatggaagtagcccgcaacggtatttttcacccggacatgttcagttatcatgaagtgatgctgcttttcctgggggtaatgatcagcgaagtgattctgctggataccttcaatactttcggattgcctacgtccaccaccgtttccctggtattcggtattttggggtctgccgtagcgacggccctgttcaagatttccaagctccgcctggttcagtccgtgtgggatttcattaatacggacaaggcttttgagattgtcaccagcattcttctttccgtagccatcgcctttacggtgggcaccatcgtcatgtggatttcccgtctggcgttcacgtttaaataccagtcccggttcaaatggttcggctgcttctggtgcggcattgccatgacggcgatagcctattttgccgttttcaagggcttgaaggagtctaccctgatggagccctcgttcatccaatacattgaccagaatctgggcatggccctgctcacggccttcggcggtttttccgtgctcatgttcctgcttcagcatttgttcatgacgaatattctgcgcctgaccgttctggcgggcactttttccctggctctggcctttgcgggcaacgacctggtgaatttcatcggcgttttcatgggtggtctggattccttccagtacgccagcagcgtggcggcggccggtggctctccctcatccatcacctccatggagtgtctgatgccggggcagggcatgccggtaaaccattatattttgttcgccgcgggctgcatgatgatttttgccttgtggttctccaaaaaggcaaaaacggtgatcgccaccggcgtggaactttccaggcagggtgaaggcggtattgagcgtttcggctccgtcccccccgcccgcgccatcgttcgcagcgccatcgccctgggacgcggggtgaaaaggcttattcccgcccgcatgctggtgcgcatgaaccaccagtgggatcccgccccccaacccttgaatcccaaggatagggtggcatttgacctgattcgcgccacggtgaacctgacggttgcttccctgttgattgcatgggctactggcaggcagctccctctttccaccacgtacgtgacgttcatggtggcgatgggctcctccctggcggacaaggcatggggaagggagagcgcggtttaccgtgtaactggcgtgctgacggtgatttccggctggttcatgaccgggctggctgcctttacgctggccgccgtcatggctaccatcctgcattacggacaggtgtacgccatcttcggtctgctggccctggtggttgtcattctggtaaagtccaccatcatgcaccgcaagcgggaaagcaagctttccgtggagcgttttgaccagattacggaagaaaatatcctggatgtatgcagccaccagattgtggacagcacgctcaagctgcgggaaatttacaatgacaccgtggaaaactttttccagggggacaggaaggccttgaaagaactggcggatgccgcagaacggctggccatgaccagcagcgaacatcacaagtacgatattctccctatgctgtacaagatgcagtcccgttccctggatatgggctaccactttgtgcaggccctggagcatttgaatgaagctacgcagagcctgtcgcagttttccgagtccatcttcacgtatgtggataataaccacacgccgtttacgattgaccaggtggacgatttgaaggaggtacataccgccctcatcaagctgctggatgaatattgcaaaatgctccagacggggacgtacattcagttcgactatacgatggtggcccaggaacagcttcttcaactggtggcaaaggccaccaagcgccagatcaagcgggcccagcgcaaccagacgcgcacccgttcctccctgctttatctgaacatgcttaatgaaatgaggtttatggccgtgcaggtgcgggccctgaccaatgacgaacgaaactttgtagcagcctgaagcggcggttctctgtttttttcacgtaaggaaaaaaattcttgagcgtttaattcgtgaaggtatcctgaatgaacagggatgttcgataagggaggaacgagagcttcccttgtcaccaggaataaccctgatttcataggtagttagttggagcggctacgggagaaattccgtagccgcttttttgtcttcccgggccttgtgtcatacaaaagaaataatgtttgaacatatttgccgtgcgtttgtctcacccataacggttatgatccggatgcagtgaaagagagagcgcttcatccacttaaggactcaaccgtcttcataggtagttagttgaacagcagccccggcgaagggattcgccggggtttgttcatttccggaagatgtattccgcgctgtaaacagctggaagggaggggaaaagaaaaaataggctgcgttttgccacggggtttgattgacgtgtgggacgcgtcagggcatagtggcagggtatgaagagagcgttttgcgtgatagccggtgcatgcagcctgcttggatgggctccggcggacgagacgggcatgaacaatgtgctggaggattggcggatgaggcagtccgactgggaatccgcattgaaaacggctgaaagcggggaaaaaagggcggaattgatgaaaaaccgtccggatgccgttccggtggctcgggaattatggaggctggtagggcgcgaccttcagaaacccgagactcaaaaatcctgccttcttccggctgtcgtctggtttctggatcatccccaggctgtagcgcaggcgttccccaatggagacatggccaggaaaattgtcgtgttctgcctggattccctggaaaatacgctgttccgggaacagggggcgggaaaggcggcgtatgccctgagcaattcccgtgacctgcgctgccgcgttattctggaacagatcaaggattacaaccagttccctgaggaccagggcctggcttccctgggcctggccatggtgatgaaggaaacgacagggatgcttcaggatgacgtcaggctggtggcggcccgcggaaaattgctgaaagacgccattatcaaatgctatgattccagtttcggccctattccggttcaaaatattgtgaaggaggaactgtatgaaatacgcaatctcaatatcgggcagaccgggcctgaaatcagccttccctctaccgcggcggccggaaaagtgacgctcccctccgggaataagcccgtgctggtggttttttgggatccgcaggatatgcgttccgttcagtttttgcaaaaagccgcgtctctccggaaagaatttcccggtttgacggtgatgccggtggctcccggaaagagagagaacatagaaaaggccctgttgaacttgaaaatggatatgccctccctggtggatgaaaaagcggcggcgtttaaggattaccgggtgaggctcaccccgcgggtgtatctgctggaccctgcggggaaaatcctgatgcgcggcacgccggatatgctgtttgacgccaacctgtacgcggtcatgggcaaacttgagggaaaaaagaaagaaaagccggatgggaaaaagtctccctcctcccctgcttcctccaagcctgtttctccgccggccaggattaattacccggatacgcgcgttccctctgtttcccggcctgataggccgcggcccgcgttcccttccgccccctccggtgcggaggaccattctctttccgctcctcctttgaggcccatgcctgaatgatccgtttcatggaggggattctgttgagaaaggccgcggaggacgtggcccgggttctttccggagcaggacacaccgtatattttgtgggcggctgtgttcgggacagattgctgggatattccgtgaaggatatcgatattgctacttccgcccgcccggatgaagtgttgcgcctgtttccggatgcctgggaagtgggcgccgccttcggcgtgatgctggtacgccgcgaaggtttttcctttgaggtggcgaccttccgcagagacggaagctacagggatggccggaggccggaggccgtctgtttcacggatgcggaagaagatgcccggcggcgtgattttaccatgaacggcctctttgaagatccgttttctttgcctccgggccgtgtggtggattatgtaggcggagtggaggatatccgggcccgcgtattgaggtgcatcggggagccggaccgtcgttttgaagaagattccctgcggctgatgcgcgccgtacgttttgccgttaccagggaagttcaggtggagaaggagacttgctcctccattttcaggaacgctccgctgttggcccggatttccccggaacgcatccgggaggaactggacaggattttattgtctcccggaaggaaacggggtgtggaaatgctggtggaaacggggttgatgaagcatgtcattccggaaatatacgatatgataggctgtacgcaacctccccaatggcatccggaaggagacgtatacacccatacgctgatgatgctggacgcgctgggaagggacggttcccccgtgtctttgaagctggccctgggggttctgctgcatgacatcgggaaacctccctgccgtcaggtggatgaaacggggcgcatccgtttttccggtcatgacaaggaaggttcttccatggccagggtcattttaagaaggctgaaatattccaatgccgtggtggatgcggtgtgttccatggtggagcgccatatgcgcttcatcaacgtgaggcagatgaggaaatctacgctgcgaatgttcatgaacgctcctcatttccgggatgaactggaactccaccgcctggattgcctttcctccaacggactgatggacaactggcaatttgtcagggacttcatggattcctaccggaatgcccctctggttcctcctcctctggtgaccgggcgtgatctggtgaatctggggctgtctccggggcctgatttcgggaaatggctgtcccgtctgcaggagcttcagttggagggaacgctccggactagggaggaagcccttctgcagctgggacaaattgtcccggtggaacagaatgcgcttgcagaatacctgaaaaagttagcattataagcgtcaaaatttgattatttcaactcatgcgtcctgtcatttatcaactatttgttcgtcatttttccaatatggagacccatggagttgactgggggagccgggaaacgaacgggtgcggaacttttaacggagtgacggataaagccttacgtgaaatagcacggatgggtttcacacacatctggctgaccggggtgctgaggcacgctacgcagacggcccatcccgggctggccgcccaaccggaatccatcgtaaaaggcctagcaggaagtccctatgccgtggtggattattttgacgtggatccggacctggcctcctccccggagaagagaatggatgagttcaaggctctggtaaagcgttgccggacggtggggctgctgccgatgatggattttattcccaaccatgtttcccgagcctacctggcggactgggacgggcatgacgattttggagaaggagatgatccccatacgtttttttctccggagcaggggtacttttacctgacctccaacagccctggggacggtccacccctgcgtctgccggacggcctgtttgaaggggaaatgacgttcggccgtgtgacgggcaacaatgccgttacatggaatcccggcaagtacgactggtatgaaacggtcaagctcaactacggctataactttatggccggtcttcctgccctccgcctgttgccggggtggaccagccccaagcagcatgtgcccaagacatggcgcatcatggacgatatcctttccttctggcaaagcctgggcatcggcggtttcaggtgcgacatggcccaaatgatccccatggctttctggaaatgggccatttcccgttcccgggtgcgtctgccggacgtgtttttcatggcggaggcatacaacgaccacatgaaaaccacacccggcgatccgtgcgccgcccttctggatgccggatttaatgccgtttacgattccgactgctatcatctggcgctccatatgtacacggaaaataactgggccaatgacttcgaccggcttttccgaagcaatcccatatacatgacccacggcgtccgctacgtggaaaaccatgatgaaacgcgcgtgtgctcccctctttcctggggcggtgtggggcgcgttgttctgccggcggtcatgacgctggtgtatgcctccgggagcggtcccgtgctggtgtacaacgggcaggaagtgggggaacgggcggaggggcccggcggtttcggcggacatgacgggcgtaccagtatttttgactatacctgcctcccccggctccagccctgggtggcggatggccggtttgactcttccctgttgccggaagagtccgcagaactgagaaattttcatcggaagcttcttcctctgatgcagcatccggcgctggaccggggagatttttacggcctgaactgggctaatatgaaaaacaccactttcggcagggaaccggtggaagacacttccggccactgggtatatgccatgctccggcatgatgcccgcgccagggccaccgtgcttgtggtggggaacctttctccaaatatcaatttctacaacctgcgcatttccattccccagcacgctttcggctggtgcggcatccagacggatcgggtacgcgtcagaaacctgatggacgccgagggtgaggacaggatttttgagcggcgggaattgatggactgcggtctgtcccatcccctgaaaccgggacatgtgggcgtgctggaactgtctgccgtttagagaagcgttccctccggagggaagctgcagcctttgccgatattttttactctgctgggcgtttttatgatgacgggcggtttttaattcggtatagtcccggaaattcctatgactagacgtttccctcactccatgtctgccattcagcaaattgccatggcgcttgccgttgccggtattggagccggccaggggctggcccaggagggggcaggggccgcacgccgggcagcagcccggatggaagagcaggctcaggcttccatgctgctgttagggcaggcgcgtcagcaatattccgagggcaagtaccaggaagctctggacaattaccgcagaagcctgactgcgctgcccaaatcccccaacatggagaagcgccgccgtttcctggaaaccagcatcgcggatgccagcgtggccgtggctcaggaatatatcaaggcggggcgttacgatgaggccgtcaagttgctggaagatgccctgaaatccactccggatcatgccctggccaggcgcacgttggaaatagcccgcgacccggtgcgtacgaatccggcattgtctccggaacacgtaaaaaatgtagaggaagtcagccgtctgcttcacctggctttcggctattatgaactgggccagtatgatgcggccctgaaggaatttacgtccgtccttaagacggacccttacaatacggcagcgcggcgcggcatggaactggttaaccgcgccagaaccgcctattttagcgctgccagggatgaaacccgcagcagtgccctggcggatgtttccagacagtgggagatgcccgttcctttgacggaaacaccggaggaacccgcttcattttcccgtcccctggataacccggtggtgaatgtggaccagaaactgggcatgatccgcctgccccgtgtgcagctggatggagcgacggtgcaggaagccgtggactatctgcgcagccaggccaggacgcatgatgccacggccatgactgcggcggaacgcggcgtgaatatttccgtggatcccgatcctgcagacagcgtttccgccagggacgccgccgccaagagaattacgcttaatcttcagaatgtacctcttcgtgaggccctggaatacgtggcgcgcgcatccggccttattctgcggacaaatgcctttggtgtggaactggtatccagttcagacggaacttcctacatggtcaccaagtccattacccttccgccgggcttcttttccggattgtcggaggactctggcgccgaaaattcagatcccttcagttccggtgattccggttcttccggcatgaccttgaaacgggtggatccgcaaaaggcgctggcttccatgggggtgaaattcccggaaggcagtttcattaaatacaactcgggcaactccactcttcttttccatggcacgcccagagatttgagcatgctggaggagctggtagcggccaggactgcggaacagcccctccaggtggtggtcagcgcgacctttctggaagtcaatcagacggacttggaggaattgggctttaactggatcgtcaatctgaacctggatcctaccaagtggttcatgggcggcgcgggaaccgataaaaatgactataacaattccgtgctggacagcgccgccaatgtggccggggccgtcgctcccgcaggagtggtgggcggcctgcgttccggcaaccaggtttttacggaagatagcattgacagcatgatagaacgcggcacttccgccagaagttctgatgcgacctatgttcccggtggcgctcccagcatcgtcactctgcgcggcatgtggagtcacgcggatatcacgatgattatgcgcggcctgagccagaaaaaaggcacagacattatgcagcatccttccgtgattgtgcgccccggtgaaaaagccacctttttcagcggcagggaactgatttaccctacggaatatgatccgcctgaagttcccaacagcacgggcaacaataatgactggggcgacaatgacaataacggcggcggtattccggtcatgcccatgactcccgcccatcccactgcctttgaaaccaggcagctcggcacgatcttcaatgtggaagtgaccggcatcagcgatgacaaatccatcgtggaaatgaccgtagtgccggaaatcgtggattttgacggtttcatcaattacggtacgtcgcttttcgttcccatggtctcccaggaaaaggacgcaaaggaagaagtcgtcatggtgaaaacttcagacaacttcatccttcagcccgtgttttccacgcggcgcctgaccgctccggtgcgcatagccaccggcaatacgctcgtcatcggcgccttgaaaaaatccacttccattacgtatgaggataaaattcccgttctgggggatattccctgggtggggcgccttttccgttccaaggggtccaaggaacagcgcaaggccatcatcatcatggtaaaggcggaagtggtggatccgggcggcaagaagctttatacgccggatacttccattccggacgaggaggtcccggcaggggacgcttctctccccgccctcagcaatgcccagtaacctttaaccggatcaagaccattgaaaaacagcggttccgattttgagtcttctccttcccagggggctgataatatcatgcgtcagctgcatgcgtcggattcccacggagtagaacggagaagggaagtagtagtgcgcccggacggcagcaaggtgatccgggtggaaaagcgccggcggacttacagtgacgaccagcgggacgccaaacaggccatgttgaaaaacaagcgttttttaataggcctttgcattctggttctgctggctgccggtgcgctggcggggacgtatatgtaccgccttacttctttcaatacggaggaatttgccggccgcctgcaagctgatctttccgccgcctggggcggagatgtgaaaatttccggaatggcggtggatggccttaccatgaaggcttcacgcatcagggtatcctttccggaagattcctgcctgtcctttgtggcgatggaaggcatctccggggaaatttccgccgtgcccttattcatggggaaaatcaagggggaaagccttaatgtgtccagggcggtagtcggtttgcggcccggattcgttaaatttgccgtaccgcagacgaaacgggaattgccgttcgttttccggcgatacacagcgccgcgtctggaagtggggtatgcccatgggacggaagaatttactctggagaggaatggcgctcccttttatatgacagcggaagcctacatccgcacgtccgggaacggacctgaaccggaatacgtgctggatctgtcacagcaaaaattgaaaatcaagggctggccgctgatgggggttgattccggttccgtcattctaaacgggagcggcgtcaagcagctcactttttccggttttctggacaaagggcgcctgctcaataagcctacggatctcagccccttcatgattacggggaatttccttctgggtacggatttccgtcaccaggcgtggactttgacaggaaaaaatttcgatctcgcttccctgctgggagatgatttctcttcccttctcaaggtgcagacgggagaacaggaaggggatgaaaagcatgaattgaagctggattttgctttgcctgtaacaactgaacagaagaggccctccctaaaaggatacagcggttccgttatcaaggcgaccatgatcaggctgcctgttttgcgcctgctggcggccatgactgcccggaatacagaaataaggctgccgtactcttctcccgtctttacgtccggttctttcctgctggaaagcgatggaacggaccgttccgcctccctgaaggaaatttccctgtttgagcagggctttctgggagtgaccgggggggtgtacagcaacggtacttccttgacggggaagctggtttttaaaattccttcctacatggtggacagccggaaactgccttccggcgtgacgcaggaagggcatgaaattattcttcctgtgaaaatttccggtactccggagtctccacaggacaactctgccggaatgttccaggaagaggcgccgcgcacgggccgcccggaaatgcataccgctccttcccgtggaatagctcttccagctccgtcaaattcctctccttcccgtattacggtagacggattcatgtgatattgccaggactccatgctgctgctcaatcctattgttcggaaaacatctgaaaagcgttcccgctggtggatcaggctggccggatttggcctgtggtccgtactccagcccatttgcatgagcctgaatatccgttccatcaaggaggagcatgatgatgtttatacggcgccttttctggtagccctttggcacaaccgcacgatggtgccgggttatgcgtggtccctggcccagaagccgctcaagatgagtgtgcttaccagcgccagcaaggacggcgccctggtggaggccgtatgcaggcattttggcctgggtgccgtccggggatcttccggacggcggggggctctggcctacatggaaatgatgcgaaaggtccaggagggggacgtctgcttctgttttactccggatggtccgcgaggccctatttacgaagtgcaccacggtatcgtcaaactggcctcccagtcagggctgcccatcgttcccgtatgcatcgaatatgaaagctgctggcgtttgaacaagacttgggatcgctatgccattcccaaaccgtgttccaacgtaaatattctatggaaaaagcgcctgttcattcctccggacgcgacggatgaacaggtggcggattatgcccgtcttctggccgggctgcttggcgaggggcttccggacttcccgcctcttaaccaatcattattatgcaaatcatcgatggaaaacaagtagcttcccaggtgctggaagaggttgaaagggatattgcccggctcagggaacagggaataacgcccggcttggccgtggttctggtaggggaagatcccgcttcccaggtatatgtaaattccaaggtgaaaaagtgtgcggagctggggatgaattcccgtaaaatagttctcccttccgacgcctcccaggaagaactgctccggattgtccgtgaattgaacgtggatcctgccgtccacggcatactggtgcaaagcccgcctcctccccatatcgacgaggcggccgtggtcctggaaatagaccctgccaaggatgtggacggcttccatccggagaatgtcgccaagctggtgctggaagatgagaccggttttgtaccctgtacccctctgggctgtatgaggctgttaaaggccgccggcattgaaacggcgggagcgaatgccgtggtcattggccgcagcatgattgtgggcaaaccgatggcgcatcttttgatgtccaaacaggcaaacgctaccgtaaccgtggctcattcccgtacgaaaaacctgccggaactttgccgttccgctgatatcatcgtggcagccataggccggcccgcttttgtgacggctgattttgtgaaagacggcgccgtagtggtggatgtgggcatcaaccgcgtggaagatgcctccgccaagcgcggctaccggattgtgggggacgtagcctatgacgaggtggctcccaagtgccgggccattactcctgtgcccggcggcgtggggccgatgactatcgccatgttgatggctaatacggtcaaagcgtgccgccagcagacgggagcctgacgaaaatgccgtgacgtccgtttttcttgtcaaatgaaggaaagtagggcagtattcagttaccattatgtcaagtaaattactcgaaggcaaagttggtgtcgtagtcggcgtagcgaacaagcgcagcatcgcgttcgcaattgccaaggcatggcatgaagcgggcgcaaagctcatcttcaattatcagggagaacgtctcaaggacggagttctcaagctgatccatgagaacttcggcgaggatgttccagtttatgatctggatgtcagcagtgatgaatctgttaacgctttctttgaaagggtccgccagcatacggacaaagtagattgtctgctgcattccgtggcttttgccccgaaggaggctcttggcggcagtttcctggaaacgggccgcgaggcgttcaaaatttccctggatatctccgcttattccctggtagctctttcccgcgccgtggaacccatgatgtccgacaacggcagcattttggcgatgtcctatctgggatccgaaagagtggttcctaactacaatctgatgggagtttccaaagctgccctggaagcctgcacccgttatctggcttatgatttgggccgttcccgcggtatccgtgtcaattgcatcagtgcaggccccatgcagacgcttgctgctcgcggcgtttccggttttaacaccatgttcaaggtgtatgaggagcatgcccctctgggccgttcctgcacgggtgaggaattgggagccaccggcgttttcctggccagtgacggcgcagccgcaatcaccgggcaggtgatttacgtggacggcggttatcagatcatgggaatgtaacgcgttccttgcggaagctttcttcctgttcacaagccgtaccggtttttccggtacggcttgtttatggttttatggagaaggtaaggggggctgggggcttcctggcttctgtcagaaaggcctgtttccccgctgcgtttcaggggacgaacactttcagcgagccggggcgggtgatgcggaccggagcgtttcctgcataatcgccgtccagttcgcaggaggcctgtccggcggaggtgacggttccccccgtcatccggatgtattcaaaactgccgctcctccgggaatgaaagcccccttggactgcggccatcaggaattccccgatgatggaagtaatggaatgcctgaatactactgcgtccagaaggccgtcactgttgtccgcttcagcaaagaagttaagcggcccgccatacttgcgtccattgccgaagatgatggaacggccttccaatacccggccttcatctgtggtcagggtgaggtgcggctgtttttccgtacagacgcgggcgccggcaattacataggcaagggctttccatttttttttcatttcccatgtggtcagttctacggctcgggcatccgcgccaatgcccgccatttggagaaaaacttgcccgttgaatgcgaacaggtccacatttttggaacgccccgtgttcagaatgtgcagggcgtggtcgaaatccgggcggattcctatttcccgtgaaaaaacattcatggtacccgcagggaagggggccagcaccgtttccgtattgcagagagcccttgccgcgattcccagcgtgccgtccccgcctgccacagcaacggcaggcgctccggaattagcctgagaaaccaaatggttcaacatgtcttccctgctttccggttcaatgacgtcaaaaaaatcccggtgccgatccagccagcggcggaatcgtccggctctggcgctgcgcgccgtgttattgaaaaacaggggaattttcatggagcggacacgaagaagttcaaaatctgaaccggggcttccgtgtgtgccacaggttcatggcgcacggttccgtcaggcagcttgaactccagcatgccgcgggaaacattgtccggcaggagtacctcaagaaacttcctcatgtcgtcagacggtccgggtgtaatgccttccgccagaactttcccttcttccgatttgaggacgacgtgcaagggaagccttctggcaccgttttttctctcttccctgatgtccagcatcagccggctgccgggcacatattccggttgggccgccacccattcattcgccagtttcatgtagcggtccgtgatattgacggcggggacggtacggctttccggagggaaagccagcgcgtgccgtttgtcgtcgtagcgggcttcccatatcataggaaaaaaggctcctgaaggttcttttttccaggaggtggcataaatggcgttctccggtttgcggggatccagcatgctgatggcggacatcacccacggggtgtcgaagtccttttcattgtattccagcattttccattctccgtcacaccaggcttccacccagttgtggttgccgcgcacgtggttccaggtaagaacgcccgccatgcgggccggaatgcccacggagcgaagagcgcagattagcaggatgctttggcccgtacaggagaccttgccggattgcagggattccttgactccctggtggggaactcttctctccgtggaatagcgtacattcagggttttctggatccgggaggcgatggcgagggcggcttcccgccccgtcttgcatggggaaacaagcggtgcgaagaggtgatggaactgctccctccattcgtcgcgcggttcgttgaccacggcataagggagaacattattttcataaagttcccacggaacctgggcagcccaggggaattggctccgtgcagccagggcgaggcggacttcccggaccagcctttcttgcgtaaccgtccccctgtcctgcgcgggcatgtgggcacgcagaaactccaccccgtcctgaatggcgtcatgggcggcgcaaatagcggcggtcaggcccgggagaagggcgaaaggcagcagattcatgaacgttgaaattcatacctgaattccgggagggagacaagcttcctcttgcgcaagaagggtatggaaatgggcaaagagatgcgtgtcttccggcggagtgggggcaaagggtgcgtcgttatccagaatatcctcgcaaatgcgcatgaaatcgcgggcggttttcgcccttttcatgtaatggtcaaaagtgtcgggaagtccccgcgcggtataaaccaggtattttttcatgcggtggatgtgtttttcctccacataatgttcctgcatttcccgcgtgcgttcataaaggcggcgaatatagtgcagcacgttccggaaggtaaggtctgctgcaggatggccctgaaagcgggaatgaagctgtgaaaatatccagggattgcgcagggctgcccgcccaatcatcagcccagctggccgggccagccgcatccatgcctctgctgtggctgcatccacaatatttccgttggcgactactgggcatttcagcattcctgcggcccatttcacccattccgggtgtaccggggagcggtagccctcacggacggtgcgggcgtggatgcacaccctgtccggggaatgggaggcaattaccggaagaatccgttcaaactcgtccggcgtttcgtatcccagacggcatttgacggtgaaggctccggggggcaatacgtcccggagcgctcccagggccgcgtccatggccttcagggaccgcagcatgcctccgcccgcatttctccggcatacgatgggagcggggcagcccatgttcagatccacgcctgcacaggcgtgttccatcaggatctgcgcatcccttgccaggtattccggttcatggcccacgagctgtccgtaaatggggcggcctgtaggattttcatcaatggagcgcagaatgtatggcgacatctttttatgatgggccaccgtccggaaatactccgtgatgaaataatccggcagggaattcaagtccttcaatgtgttgaggaaagccagatccgtcacatctttcatgggggccagggccaggagcatgggtctgtgcataccgtgaaaagctccggttggcaagctgtgattgtcttgacgaaagaaggaaagtgtggaagctgggagcatgaatcaggactcaacccgcaaagccagagtgaatgtgagacgggccgaagtaatggagcaggtggaaaaggaaatccagcagcattaccagagtgaattgatttcccacatccgttctgcgggcaatgtgtacaatctgggccatacggaattttttctcgcccgggagttcgggttctgcaacggcgtgcgccgtgctattgatatagcatatgcggcacgcagagtgtttcctgaccggcggatttttctgattggggacattattcacaatccggaagtgaaccggcagctggaggaaatgggcattcgaaaacttccctggaagcagttggattcctcctatgaccgggttgctccggacgatgtggtgattattcccgcgttcggtgttcccactcctttcatggatgcgctggaggagaagggcgtgcagattgtggatacgacatgcggggacgtgatgaaggtctggaaaagagtgaagaattacgccgccatggggattacctccattatccacggtaaggctacccatgaggaaaccagcgctacggcttcccgggctcttggggaacggggaaggggaaaatacctggtggtttacgatttggaggatgcccgtatcctgtgcgactacatcatgggccgcggagaccgtgaggcattcctgaaacggtttgaaggatgctgttccccgggattcgatcccgaccgggatctggaggaggttggcatcgccaaccagaccaccatgttgaaaacggagacgcagacgctccagaagatggtgaaggatgccgttgttcagagggacggggacgatgataatttttatgtgtttgacaccatttgcggtgctacccaggatcgccaggatgccctgtatgaactgctgaaaaatcctctggacgtcatgtttgtggtgggtggctacaacagttccaacacaacgcatctggtggatattgccagggagcatgtgcccacgtacttcattgagtccgcagaatgcatcaagtccatccagtatgtggatgcttttgatacgaagacgcgggaagtgcgccgcatgactacggaaccggtagtgcagaacctgggcaaatccctgaaggtgggaattacggcgggcgcctcatgtccggccaacctgattgaggccaccatcctccgcattgcggatctgcgcaagtagcaaaacgcctccggtttggtgaatgagaaaaaagaagagttctctttcaacggcggcacggccgtttttttcgtgacacggcgcagttgcctgggccgcggaagaaagcatagggaaaactgcgcgggagcgtttcctaaatttccaaatcttccggtgtaacggaacgttgttcccgggatgcaagcagtacggcttgttccacgacatattccgtattggagtcaaaacggtaggcgttgcagttgggacacactgccgtagtcagggatacgatggaaccgcaggcttcgcaaaccttgaagtccccgggacggtcaataatcagtttggctttatccaggcgggattgctgcatgggagtagaaaataaaacaagccgctcagcagaacagagcggcttgccataaagaatcgtcagaaaaccgaagtgaaaactcaggcaatttttgcgatggccttggcggccttgctcttgtagttggctgcacgattggcggggatggtgccaaccttggcggctttgtcaacggctgaggagaaagtgttgtaggcagcagcagcggcttccttgtcggacgtttccaccgcagcggcaactttcttgcggagggtcttcaacttggaggtcacggcgcggttgcgggcggtgcgggttgctgtctggcggatgcgcttgagtgcggatttggtattggccatgtttaaaaaaggttcggtttccgtttcgaggtggcaaaaacattagaataacaggacaaaatgtcaagctcttgatgtattttttaaggcattcctttcctgcacgggctgactgtgggctttaccggaaaaggagtttgtggcactatattctcccgttatgaagaaacgcgtggatttgcctgaaaaaaaatatgaaggatatatttttgatttggacggcaccctggtggacagcatgccgctccattacagggcatggcgtgaagccctggctcgagcgggggctccggaccatgtgttccgggcggatgaattttattcctgcggcggaaaatccgccaatgatgtggtgcgttttttaaatgaacggtacggcatgcacatggatgcggagtccacagctgcggacaagcgccgcatttatttggaaatgctggaaaaggaaggcatgcagcctatccgggaagtggtggaattcgtgcattccctgggagacgcccccaaggcgatagctaccgggagcgccatgccgggagcgtcccggactctggctgctgccggactttcaggcctttttgatgtgattttgacgccggatgaggtggagcatggcaaacctgctccggacatgtttttgaaggcggcggaactcctgggggcatccccggaccgttgcgtggtttttgaggatgccgaacccggcatgaaagctgccgcggccgcaggaatggactgcgtacaggtccggcggccatccctgtcctgattcctctttccggatttggtacggaaggggattccgagattttcctcctttctccatgcccttcttccttttaaggaaaaggcttcacattgcgcccggaatgcgttagaaccttttttcctattgaacaaataaaatattatttgcacatgagcacaaacgacaaaacatcatccgccccgacgaaaacccgcatgacaggagctgaagtgctcgtggaatgcctcgtgcgtgaaggtgtagacgtcgtctttgcctatcctggcggcgccagcatgccgattcatcaggccctgagccatcagcccaagatacggaccatcctgccccgtcatgaacagggcggggcattcggcgcggaaggctatggccgcgttacgggcaaggtgggcgtttgcatttccacctccggccccggcgccaccaacatgattacctccattgcggatgcttatctggactccacgcctctggtggcgattacggctcaggtcatgcgctccttgattggacgcggcgccttccaggaaacggacgtattcggcatgaccgcccctatcgtgaagcacagctatctggtgacggaaccggaagaactgccccgtatcatcaaggaagccttctacatcgcctctacgggccgtccgggccctgtgctgattgacatgcccaaggacgtgcaggaggccgtgtttacaccggactttgacatggagatggatattcccggctacaaccccgtgctgcccgtccctgcggataagctggaagaactcattccgttgattgaaaacgccaggcagcctgtcatttacgccggcggcggtatcatttctgcggaagcttccggggatcttctggaatttgcggaacgttcccagattcctgtggcgaccaccctgatgggcattggcgccatgccggaaacccaccctctttctctgcgttggctgggcatgcacggagccgtgtttgcgaataacgccgtgaatgaagcggatctggttattgccctaggcgcccggtttgacgaccgcgtgacaggcgccgtcaatatgttctgtccggaatccacgatcgttcacattgatatcgacgccagcgagatcaataaaaacaagaaggtggcgtatcccatccgcgcaaacgtgaaggacgccctccgggtgctcaactccgctctggccgcaaaaggctgggagcgcaaatcctccggctacacccgcactcctgaatggttcggcgtgattgacggctggaaaaaacagtaccccttctcctatgaggaccgcaaggggtatatcgccccgcaggctgtcattgaagagctctaccgccagacggcggacaaggaccccatcatctgcacgggggtgggccagcatcagatgtttgccgctcaattcttcaaatttgacaagccccgccgtctggccacttccggcggtttgggaaccatgggctatggacttcccgcttccatgggagcgtgcctggcttatccggacagactggtcgtgaatattgacggggacggttccatactcatgaatattcaggagctggcaaccattcatgtggagcgtctgcccgtcaaatgcattattctgaacaaccagcacctgggcatggtggttcagtgggaagatttgaagtatgattccaaccgggcccaaaccttcctggcggacccgcacgacaattatgatcctacccataaaacggaagatgtcatctacccgaactatccgcttatttgtgccggattcggtgtcaagtgcgaacgtgtgcttcgcatagaggagcttccggcggctatcacccggatgattgaatcccctgaggcctatgtcctggacgtcatggttccccatgatgtgcatgtgctgccgatgatcctggggggcatgagctacaaggatgtgattctggaacgtattgccggggatggttccgccaaaaaggcgtctgaactgggcaaggaaatcccgactgccctgtaagagcgaggcaagcttcttctattgagccttaaacaggagccgtccgtaagggcggctcttgttgcatggcagcgcaagaggaagacaggtcagttgactgccgttagggtggcagcaaggtatgtatatagatacggatagtcctgttttccggtaggtggattcctggttttgtgaaggaatgaggaagatgtttctggacgcagtaaaaaagaacggttatctagacaggaggctggaatagaaggaatggccgtggagagtgttcttaaggcgtgggtatttctcgtttaccatttttgaaaagcaaggtctgagtggcccggcagaaagacaggatgcctcatgcttcgcagtatttgaatcctgggcgggacagggtgccttggacagagggatgggaaacggtgaggaggagcgaagcccccatgctgcatgctggaaacgggaggcagggatattctttcggctggacaaacggagggacggaagacattctaggcgttccatggagggcatacgctattacaaccgctatacgggcagggaggaacgggagcaggtaccgggggagaagtatatgcaatggatttacggcactgcttcggggaaggcggcactgcatgtcctgattaaacgcggcgttttttcccgtttgctgggttggttgaagaatcgcccttccagcgcccgctccatttcctcctttgtggaggagtacggcattaatatggaagattctctcaagggagtgggggagttcaggcatttcaacgattttttctaccgccgcctgaaaccgggagctcgccctttggccggcggggaggatacggccgtttttcccgcggatgcccggcacatgggctgggaacgcgccgaccgaattaagaacgttttcgtgaaagggcagcgttttgacctgccttcccttctggggagcgacaccctggctgagcggtatgcggccggcgccgtcgtcttgtcgcgcctgtgccctacggattaccaccgttttcattttccggtgtccggggtgcccggcccctggacgaagctgggaggcccgctggcaagcgtgtctccgtattgcctgcgcggccgtctggcgtggctatggactaataaaaggaatttgaccctgatccggtcagagttgtggggagaggtcgccatgctggaggtgggagctactggagttgggttgatcgaagagacgtatgttccgggtgttttctccgcaagagggtcggagaaggggtattttgcctttggaggctccacggtaatgtgcttttttgaaccgggaagagtcagtttggcttccgatttgttggaaaagacggaagaaggcttggagctgtttgcccggcagggtgatatgatgggcacggcagcgacatagtttttgggcaggcgtgcctgtcccgcaatgttgtgaatagggctcttccctagagcctgatgacggaatgccggggatggactccggcgtttcagggcggattttcggattttttgattttccgaagtgccaagtggttcatttcatttccgcaatggcgcgggccatatccggagccttgaaggtagaggagcctgccaccagcacatccgctccggccagagcgcactgagcggcattgttttggccaattcctccgtccatttgaatgaggaaggaggcgcggttttccgtgcgccattcggcggctttttccaccttgtccaatacggaaggcatgaaggactggccgccgaagccaggcactacggacatgaccagcagcaggtctatttccgctaggtaaggttctacggtttcaaagggtgtggccgggttgagagccaggccgttttttactccggcttcccggattctcccgagtgtgttgcgaatgtagtaggagtctcccagttccacgtgaaagcagatgaggttcactcctgccctgacgaagcggtcaaagtagtggtccggccgttctatcatcaggtgggcatccagaaagcggtccggccccaccgcttttctgacggcggcgcagatttccgggccaaaggagatgttgtccacaaagtggccgtccatgatgtccagatgcagccagtcggcaccggagttaaaggcccgccgcgcttcctccccaatgcgggagaaatcagcggccagcagggacggggagattatggtcatggctgagggaggcttttcgggatgtcagttggctacaatgttgacgaggcggccgggtacgacaattaccttgcgcacagtgacgccgtccaggaaggttttcaccttggcggaagccagggcctgtttttccagttcttcccgggagatgtccttgggcacttccagtttgtccctcagcttgccgttcacctggatgaccatgggaacggtattttcctccagcagggcttcctcccattcaggccagcttttctggcaaagctgcgtctgggccagagccgggaaggctgtttgcaggcggctgtgtatttcttccgtaaggtggggggcaaagggattcagcagggtcaggaaagcatcatagtcctgaacgtccaccacatccgcggaggtcatggcattggtgcattccatcattttcgcgatggcggtgttgaaggacatgccattgatgtcctccgtcacttttttaatggttttgtgcaattccttgcgtacggcaagcaccccggcttccggagcgttctccaccagtttggagttgatttcccattctccttcctgattttcccggaaggccacgcgccagacgcgggccaggaagcgggaaatgccttccacacctttggttgcccagggtttcacgtccttgagagggcccatgaacatttcatataaccgcagagagtccgcgccatattcgcggacgatgtcgtccggattgacgacgttgccgcgggatttggacattttctggccgtcttcccccaggatgagcccctggttgacgagtttctggaagggttcattggtgctgaggtagcccaggtcaaagagtaccttgtgccagaagcgggcatagagaaggtggagcacggcgtgttccgtgccgcccacgtacaggctcacgcctccgggggtgccggcggagcccatccagtattgttccgcttcccggctgacgaagcgttccgtgttggccggatccaggtaacgcaggtagtaccagcaggagccggcccattggggcatggtgtttgtttcccggtgggctgtgggcgtgtaggctatccattccgcagccttgaccagcgggccgcgggggtctcccgtgggggcgaagtcgtccagatccggctggagtacggggagttcgctttccggcagggcgcggtggcgaccgtcttcccatacgatggggaatggttccccccagtaacgctggcgggagaagagccagtcgcgcagcttgtagtttactttgcggcgtcccttgccgttttcttccagccagaggatcattttttccttggcttccggagtaggcagcccggtcaggaagccggagttcacgctggaaccttcataaccgcagaagccgcgccagtccgtgtcttcactgggcggctgaactacctggagtatgggcaggccgaagacctgggcaaaggcgaagtcgcgttcgtcatgggcggggacggccatgatggctccggttccgtaacccatcagcacatagtccgcgatccagacgggaatttgttttccattgaccggattgacggcataggctccggtgaagacccctgttttttccttggagaggtccgtgcgttccaggtcgcttttggaggcgcactgggcgcggtattgttccacagcatgtttctgttccggcgtggtgacggtatctaccagagggtgctccggggaaagaaccatgtaggtggctccaaagagggtgtccggcctggtggtgtaaacagtgatcgtttctccgtccagggtgaagtccacttccgcaccttccgatttgcctatccagttgcgctgaagcagtttaatggattccggccagtccaggggctccagctcgtcaatgaggcgttccgcgtagtccgtgatgcgcagcatccactggcgcagggggcggcgttccacgcggtgtcccttggatttccattcctccacttcctcattggcaaggacgattacgggtccgggaccagttgacggcagcttccgctacgtaggccagccggcgctggtcgatttcttcccggctcaatccctgttcctccagttcggaaacggggcgcgcctttttcagttccttgttgtagtaggagttgtaaagctggaggaatatccactgggttcaacggacgtattcatggtccgttgttgctatttcccgatcccagtcgtaagagaaccccagcattttgagctggcggcggaagttgtctatattccggaaggtagtgacggaggggtgctgtccggttttaatggcgtattgttccgccggaaggccgaaggagtcccaccccatgggatggagcacgttgaagccgttcatgcgtttgaaacgcgctacaatgtccgtggcggtgtacccttccggatggcccacatgcaggcccgccccgctggggtaggggaacatgtccagcacgtagtatttgggtttggacgcatcaaagccctcttctccggggttatttactttaaaggttttcctctcgtcccagatctgttgccatttaggttcaaaaacgtcaaagggatatggtttcttgcgctcggacatgacgggagggaatgtatactccgcccgcgggtcaatcaagcctaaacccggcggagtgcaggcgcttccaatgctcctggggcatgatgccgtttttcggaaaaaaggggaaaggtaagaagacgtttgcgcgtattttttaactgaaaggtttttgttgattgcgaccatgaagtttacttcctgtattatgtccgccgtttgcggagtattgttcctgtttgccggggcatccgctctgggcaatggttccaacactgtttccggaaagaagcccaatatcatcgttttcctggtagatgacatgggatggcaggatacttcccacccgttctggtccgacagccagggcaacccgaagaaaacctttttgaacaggcgctaccggacgccgaatatggagaagctggcttcccagggcatgacgtttacggatgcatatgcccatcccctttgcactccttcccgggtgagcctgatgtccggcatgaatccggcgcggcaccgcgtgacctgctgggtacgggaacagaacgggacgacggacgccaacagcaggagcctcctgcctccggactgggcgttgaacggccttcagcctataggcactcccgccaggggaacgacaaaacgccccatttccggggaggatatgcgctatcacatgacgcgtccttttgccacggcggctacactgccggagatgctgaagaagtgcggttatgttaccgtccattgcgggaaggcccatttcggcacgcagggaactccgggttccaatccgttgaatatgggatttgattataatatcgcaggtacggagatcggccatccggcggattaccgcggttccaggcattacggaaaggggtttaaccatgtgcgcggactggatgagaataattattaccaggacgatgtatttttgacggaggccctgacgcgggaggccattaaacgcctggaagccatcaggaccaatcccagggaggctggcaagcccttttatctgtacatggcccattacgctttgcattctccgctggatgagcgcgcttacgacaagaggtttgcggatgcctacaaaaacccggaggacggccacaagtggtcccggacggagaaacattattccgggctgatcgaggggatggacaaaagcctgggggatatcatgaagtatctcagggaacatcatctggaaaaaaataccgtactggtgtttatgtcggataacggaggcctggccatctccggcagactgggcaatgaagaggccaattaccctctttccttcggcaaggggtcatgcatggaaggcggtatccgggagcctatgattgtttcctggccgggcgtgacgaagggcggttcaaggtgtgccgtcccggtggttattgacgattttttcccaactcttctggatatcgccggatgccggaacgtagaagttccgcagaagcttgacggcttaagcctggttcctttgctcaaaggaggccggtttcctgaagaccgcccccttttgttccaccagccgaataattggggggaaggcagccggcaggcgcctcagtatacttcttccaccgcattgcgccagggggattggaaattgatttaccgccacctgacccagagctttgagctgtaccatttaaggaaagatatcggcgagaagaaaaatctggcttccagggagccgcggaaaaccagggaaatggctgttgtcatgggcaggttgctccgggagaggaaggcgcagatgccaacctataagaaggacaatgagctgggcgctcctgccgggagttccgttccgtggcccgaccaggtgaaggggaatggtttttgatgatccgcaataacgtttttccaaagttttttcataacccccggcaggattcacatcccgccgggcggaccgggtcgaggctggggtgccctcacttctttttccagtagttttttctgtccagtataggaatggtgtgtgttttcttttccggatgcaggatcatcgtttttcgtgaatgaaggcctcagcttttttcggagcaaggggaggaatgagcaagggaactggttcgggagggataaaaaacgccccgacggatatggcgtcggggcgtgacaagggttaaataacgaagtcccctgaaagggagggtttaaaaatcgtcggtgacagcggcatcatccgttgccgtggtatcttcgctttcagcagcgctgtccgcagagggctcctcttccgttccggcagtatcgtcggcaggagtttcttccgtagcgcctggttcagaaacggacgttgctgcggatttggcagcgggcactgcggacggagcagctcccttgggcggaacaacgactttcatggccggaggggcgggaacgggagtttccagaccgtcagccttgcgggtgctgacgcggagtccgtcagcataagccaggtttttcaggatggcatagcccagggcgggagcccggtccgtcgtgttgaccagcatcttgaagtggttgttgacggacatcttgcgggcgtccttgccattgcggaagggaatgatgcctgtcatgttgccgtcattgtcaatgcagatcgcccagaaagagcggtctacctggatgaagtactgcgggcggatgtagtccatcgttttccattcagcgcccttgatgtattcctccatggcgcggcgcgcattggccggcatgctgccccagtcagcgtaaacccgggaggtcagcgtttcacggccattgtagccgtgcacggatacgtgctgggcagtagcaaattgacgggcatagctctcgggagaggcaggttggcaagagctggtgaagagcgctgctccggcggtcaggatgcaggctgctgcagtagtgaagggatgaatgttagtcatggcaatcgcaatggttacgttataaaagaggaaaatacatcccatttcaaggaaaagaatgcaggaggtaccgttttgtgccgttttttgacgtttccgtttgatgcggggggctggcgggagtggggaaggcgttctcatgcccgtcttgcaggtatgatggtaaattactaaaatttttctcgcaaatcgttctgaatcgcttaggttgtcgttgctttatgtccgcctttatcatcagcctgccggccctggaacgcaacgctcttatcctgagggatgtggcggatgccgcagggtgccgcatcgctctggcgctgaaggggttttcctgctggccctgttttgaggccctgtccccctggctggacggctgctgcgcttccggcctgtgggaggcgcggctggcccggcgcaggttcgggaagcatgtgctgacttattctcccggccatgccccggaggaaatagcggagctggcggagatttccagccatcttgattttaacagcctgacgcagtggagccgtttccgggaggaagtgatgcggcatccccgctttgtttccggtgaattgaaatgcggcttgcgcgtcaatccccaatgttccaccgggcatacgcccatatatgacccctgtgcccccggttcccgcctgggcgtgacgccggacatgatgcagggggcggacctgtccggcatttccggtcttcatttccatactttatgcgaacagggagcggatgacctggcggtaacgatggatgcggtggaacgccacttcggccatcttctgagccgcccggagatttcctggctgaatatgggaggaggtcattggattaccaaacccgactatgaccggaagctgctggcggcacttatccgccgcatccgcgaatgctacggcgtggaggtatggctggaaccgggagaggccgctgccattcatactggggtgctgcggtgccgggtgctggaccttttttccgcggagggggtgaatcatgccattctggatgtttccgcatccgcccacatgccggatacgctggaaatgccttatcggccggatgtgttccagattgcaggagacgcttccctccgttccgcgcagcagcccgccgtacggttggaaggggagagctatgcgctggcggggaaggccggggaaaaagcttatacgtaccggctgggcgcccccacgtgcctggcgggagaccggcttggagattattccttcgcggagcccctggcggtaggtgacgaacttgtgtttgacgatatggcgcattatacgatggtgaagactacgtttttcaatggcgtgcgccatccggacatcgccgttcagagaaaagacggttccgtggagacggtgcgccgtttttcctatgaagattttgaggcccgcctgggctagaatatttgaccagacagattgacatggcagcagctaaagaaggcatcaagcagaaagtccgcgggtggagtcaccatgattccgcagatttgtacggcattgacgattgggggaacggttatttccgcatcagcaaaaagggagaggttaccgtacgcctgaatgacgaggatggaggaaagaaggatgtcagcctgtgcgatttgctggaggggctgaaggagcgcgggactaccgttcccgttctgttccggttccgggatttgctgcgcagccgtattgcggagctgaacgacagtttccggaaagcaatcaaggaggcggggtaccagggtaagtaccagggcgtttaccccatcaaggtgaaccagcagcgccaggtggtggaggagattgcggagttcggcaccaagtatgattatggtctggaggccggttccaagccggagctgatagccgccatggcccatatgcacaatccgaatgcctatctgatttgcaacgggtacaaggatgacgagtttattgacctggcgttgacggcccagaagatggggctgaatatttttattgtgctggaaatgccttccgagctggacgttattctggagcgtgccagaaggatggatatccgccctaatctgggcgtgcgcgtcaagctggcggccaaggggtccggtttatggcaggaatccgcgggggataagtccgttttcgggctgaacgcagcccaggtggtggatgtggtggataagctgaagcaggtggatgcgctggactgcctgaagctgctccattatcatcaggggtcccagattccaaatatttccgtggtgcgcgaggggctgacggaggcggtccgcatttacgtggatctggtgaaggagggcgcccctctgggcacgctggacatgggcggcggcctggccgtggattatgacggttccaagacgaatttccattcttcctgcaattattccattgcggagtttgcccgtgacgtggtggaggttgtgggagacatgtgttccaagtacggggttccccatcccacgctggtgacggagtccggacgggccgtagtggcctattattccgtgctggtgttcaacgtgctggatgtgacgagcgcgccgggcgaggaacctccgcccgagcttccggatgacgctccggagctgttgaaggcttttgcggacacggaccggacgctggccaggaagaatatgcaggagtgctataatgacgcctgttattaccgggaccagttgagagcccagtttttttacgggaacgccaccctgcggcagcgcgggctgggagaggcttattattggcatatcctgagccgcatttcccgcatgctggcggagatggagaccattccggaggatctcagggagctttcctgctccatggtggacttttattacggcaatttttcactgttccagtctcttccggattcctgggccatccgccagcttttccccgtgatgcctctgcaccgtttgaatgaacggcccacgaataaggccgtgctggcagacatcacgtgcgattgcgacggaaagatagaccatttcattgaccgtgaggacgtggcaaccgccctccccctgcatgccatcaaacccggcgaggacgattattacataggcgtattcctggtaggagcctatcaggagaccttgggggatttgcataacctgctgggagatacgaatgtggttggcgtgcatctggaaggcggccgccccgtttatacccatgaagtggagggcgatacggtgtccgatgtcctttcctacgtggagtatgatcccaaggagttgatcaacaagttccgcacgtttgcggagcaagccgtagccgaggggaaaatatctccgtccgaacgccggagagccttggaagtgttccgttccggattgaatggatacacttattacgaactgtaggaaacggtcttgtcttttgcttcaacagggagcgtttgtcccgtgccggcgcgttttcctttgttgcggatcaggagaccggcggttcttccggcggtttcgtttcttcaatgaccttggctggcgtcagggcccagaagcgcgtggccgtttgcggagagatgcctttcatgttcaagtaccgtgtgcggagcagggaggaggagcggtgccccatttccatttgcaacaggttgtagtccttgaagtgcttggcgtggtagctggcgtaggtgtgccgcaggcagtccggcacccatgatttttttcttcctccccagccggcttttttccggattttgcgccacttgattgtccaccctttcgggcagatgggagttccggggccgggtttggtcctgtcacggcagaatttgagccatttggcgagcacgggcaggatggtgacgtgcctggcgcctccggttttggtatgcttggagttcagaatgatacagccgtcgcggagagcgatgttttcccagagcaggcgttccacttcctgcgggcggattcctgcaaagatcatcagcgccgctccagctgcgcagcttccgtcaaattcttccatggccgccttgagaagctgagttatttccttcagcgtcagagcggggatttcctgctcctgcagaaaaggcgtgtctacgcggaggatgggattctcgtcacaccatccgcgtttgacggagaacgagaaaattccgctcaagatgagcctcgctttgtgcctctgccgggatgtggtaaaggtattcatcaggatgttctggcattcctccacgctcaggttgcgcagggaggtgtgttccagttccggattgctctttttaagcttgtggatgatgctcctgatgtccgtcagcgtccggggacggcggtggcttttggaacgcaggcattccacggccgccgtgccgaaactgacggtttgatgtttgtttttaatggcgttcaatcccagggagacgacttcccggcaccgggtaatggtacagatttcatctccaagggcttccttgatttccaataccagccttgcagcctggatcagggtgactgattccccctccagaagtgcggctccgacatatttcaatttgtttgtattcggtgcttttttcatgttcatttctcgtgtttgtccaaacacggttttaatgaaaaaggctatccttataatggggaaaacttatgctttccactagaaaacgcgtaaccgtcaaggatatgttgttacttatgttttctttgaagcggccggaaaatcaaagtttctgatggtgcaggaaccgaaaatgttagaaagcgcggctccctgtgctgaatgtcaagatggacgtgacttgtccggcatgagtatatttctgttggaagaggggtaaaggaacggccggatgaaagtattttacatggccggacgtatgggatatactgtttcactgtatcatgaacatcagaattcattctttcaacgtatcatgtgccggcctttgctgcgtattggggtcttttttcgcggcggacgcccgtgagatttattccctgaacggttcctgggatttcagttttaacgggaagcctgctgaaaaagtgacggtgccccatacatggaacgcagaggatgccgccaatggtgctcagtggaagcgggaagacgccaaatccgtcaacagtgacgcctaccgccgcgggccggccgtttattcgcgcacgcttccggtggagcccaggccgggcaagaggtatttcatccgcggcgggggagccagcattgtttccgaggtttccgtcaatgggaagcctgccggcagccatgagggggcgtttacggctttctgttatgaaataacgccccttttgaaaaaaggctccaatacgatttccgttctggtggacaacacgcagcgtaatcatatcgccccccagcgcggggatttttccatgttcggcgggctgtaccggcccattgaactgattgagacggacggtgtctgcattgatcctcttttttatgcttctcccggcgttttcatcaccgcaaagtctttaagcaaatccaaggccgaggtggaagtgaagacccttctcaattcggacggaaaggccggggatgtggatgttgccgtggaaatcctggacatgaagggcaggaaggtagccgggaagacggtaaaggccgccgccggggaaaagaatagactggaggttcccgtaacgctggcaatcgccaatcccgtactctggaacggagtgaagaatccttacctgtaccaggtgaaaacttccatcaggacggcggatggccagacggatgagctggtgcagccgctgggcctgaggacggtttccgtcaatcccaaggaaggttttgtcctgaacggaaagaccatgcagatcaagggggtcagccgccatcaggatatgaaggggaaggggtgggccctttccccggaagatgaggcgcgggatatcaggctgattgcggatatgggggcggatggggttagaacgggccactatcccgcatccaccaatatttacgacctgtgcgacaaggcggggctgattgtctggtccgaggtccccaatgtcaacctggtgtgggatacgccggagttccgggagaataaccgcctccaggcccgggagatgattttccagcattggaatcatccctccatttgcatgtggggcattttcaatgaaatcggacaccagcccgaggctgccactagaggagtggacatggaagctgagttgacggagttgaacaagttcgtgaaggagacggatccctcccgcatgaccgtgggggccagcaaccaggcgggccgcagaaaactgaacaatattcctgaccacatcgcattcaatacgtatcccggctggtacggaggagggcccgaaaccatgaagggcaacctgaacggctacatccgcgactatggcggcaagatgggcattgccgtcagtgagtatggtcacggcgccagcgcgggcatgcatgagaatccggccaaaaggccgtctcccaccggattctggcatccggaggaatggcagtcccatgcgcatgagatcaattacaggtgcatcagggaaaggccggaggtgtggggggcctttgtctggaacatgtttgacttcggttcctcttcccgttttgagggggaaagccccggcattaacgacaaagggctggtgacctatgaccgcaagacgcccaaggacgcctattttttctacagggccaactggagcccccgtcctaccgtatacatcacatcccgcaggtttgcggaacgtacggaaaaaacggtgcccgtgaaggtttacagcaatggttccgtggtgaagctgagcgtcaacgggaagcccgttgggagtgtcaaaccggatgatttgaagcgcgccgtctggccggaagtgactctcaagcccggcctcaacactattacggccacggcttccataggagggaaaacgtacacggattcctgcaagtggacgttgaaccctgccggaggtgacgggaagaaggattcagagcgttatcaggatccgtccctgaaaaagtataagtaagcaattccatattcattccgagatgaagacggttcgcgcgtttctgttttccgtgatgtgtctggctccggctcttcccctgctgggggacgttccggattgggaaaatgaagaggtgacgggaatcaataaggaggctccccgatcctccgtttttccagcatcagataaaactttgagcttgaacggggattggaagttcaaattttccatgactccggacgagaggcctgccgatttcttcaatccctcttattccgtttccggatgggatacggtcaaggttccttccaactggcagctttacggttatggaacggccatttacacgaatgttccctatccattcaagccgaatcctcccaaggtaatgggggaaccgcccaagaactggccggcgtacagggagcgtaattccgtgggttcctaccgccgggatttcaatttgcccgtttcctggaagggagaacaggtgatgatccggtttgacggggtggagtccgccttttatgtgtgggtaaatggccgtcaagtcggctattccgaagattcctatacaggggcggagtttgaccttactccctatgtcaggcccggcaggaatacgattgccgtggaagtataccgctggagcgacggttcttacctggaggactaggatttcctgcgcctttccggcattttccgggacgtgaccctgtttgcccagccgcagacgcacgtgcgtgacctgttcctgaaggccggactggacagggaggattacacaaccggggtactggacggaacgttcaccatccgcaattccggtaaaaaggatattcccgccggcatgaagctgaattattccatcgacgggatttccaccaaattgaactgggagggcaggaacggttccggccgcgtgcagacggataacaggggaaggctggattccggaacgctggaggttccctccattccctccggaggcgaggtgcagatttccctgaacaggaaatttcccggtgtgaagccatggacggcagaaacgcccaacctgtacagggtgacttattctctgaatggaaaggatacccgttccgtcaatatcgggttccgttccgtggagattgcggataacggcgccgtgctgattaacggcagagccgtcaagttcaagggtgtcaaccgccatgaagcccatcccgattacgggcgcgccattccgcgggaagtgatggaaaaggacgtgcagattatcaaggcgcataatatcaataccgtccgttgttcccactatcccaatcatccttatttttatgagttgtgcgaccgctacggcctgtacgtgatggacgaagccaactgcgaagcccacggcatccgcaatagcagcatggatatttcccggaagccttcctggaagaaagcccatgtggagcgcaatatgagcatggtgcatcgttccaagaaccacccttccattgttttctggtccctgggcaatgagtccggaaacggccccaattttgaggcggcagcggcggctatcagggcttatgacactacgcggcccctccattactgcgaatttccgcacggccacaaggccgtggatatggattccgccatgtatccgcccgtggatcgggtggaaaactgggggaagcagaaaacttcccgcccctttttcgtgtgcgaatatgcccactccatgggaaatgccctggggaatttcaaggagtacatggatgccttcgagtcttccccgcgcatggtgggcggggccatctgggatttcgtgcaccagtccctccgcgccaatcctgccggaaacggcatttacaagcccgcccctttcaagggagtaacacaggcttacggcggcatgttcggagacaggcccaaccaggccaatttctgcgacaacggcattattcttggcaaccggaacaccacggccaagacgaaagaggtgaagaaagtataccagtacatggcttttgagcgcaaggacgggtctctgtccgttcgcaacaaatattttcataagcctttgaaaggttatacgctttatctggtatcccttgttcccggcggcggccatgccgtggagcgcatggttctgccggaggttccccccggcaaatccgcaacggttaatctgccttcagccgctatgcggaccggttccctgatggttctggcggatgcccggttcaagctcccggaagacgtgaaggaactttcctccaagcaactggaacatgtggtgaatgagtgcgaagcttacgagtggttcccggcatctgcagagaaggaggttcccgtgcctcccccgacggcgctgcctgctgtttccgtgcttcagggggattccgtggccgtgcagggaaaaggtttttccgcctccttcaaaaacgggatgctttcctccctccggtatggcggccgggatttgattttgcccggctatccggtggagctccaggcgtaccgttctccggtggataacgatgcctggatcaggagcaaggttgaagggaaaatgaagatgcagaatatgaaagcggaatattccgacgttaaagctgccgtcatttcccccggcgtggcccgaatcacggcacagttccggacgaaagggtccgagcttgccttttccggggaagtcgcgtggacggttttcggcaacggcattatcaatgcttccgtccgaatgtatccctccgccaagggagaagaactcctccggctgggcgtcactttcgggatgcctgccgcgtatgaccgggtagagtacctgggtctgggatcgtgggataattaccgggaccgccgcacgagctgctggaaggacattttccgcacttccgtggacgatatgttttttgcttattcccggccccaggatatgggcaaccgcatggaaacggactggatagccttatccaaacctcaggaggaccaggctctgtgggtgggggccgcctctcccagggctccgctggaggtttccgtcctgcgttatacgccgaaggagcttaacgatgccaagagtctggacaggctgccggagaaaaataaagtgattgtgaatctggacgctttccagatggggctgggcggctcttcctgcgggccccgtccgctggccaagtaccagacattgagcggggccacagccctggggtttgtgctggctccttcgtccgccctgctgaatctggcgcgcacggggctggccgttccccattcccctgtcattgaacgggatggggacggcatggtcagtctgacttcctctacgcccgaggcggagataaagtattccgtcaacaaggggccggaaaaaacgtatcggaatcccttcaagcttcccgaaggggaagtgagggcctgggctgcctccatgaagtccggcaaggttccttccacgtctcccggagagaggaaattccccctcgtcaaggggcagggcgaatggaaaattctaagcgcttcttcggaagagccggataccggtttcgcccattttgccattgacgggaatccggatacctattggcatacgtcctatacgaacggcctgccggggttcccccactccattgccgtggatatgggaaccagaatgaagtttaccggatttatctacacgcccagaatggacaaggacaagggcctcatcagccagtacacgttttccgtttccgatgacggtcggaattggagggaagtgaaaaaaggccagttctcctaccactatatccggaaggatccggctgttcagcgcatcgacttcggcaggcctgtggaggcccgctacttcaagcttgacgcccggtctccggtgaggggcggggaacagagcgccaccgttgcggagctgaatatcattacccaataacggagcggcaggcgttttgcactgcttcccagatggagaagttttccagccgtgcgccctttccggggtgcacggcttgttgttgcgggcttttcagggtgcggaaatgtttttttaatgaaagaaagaacatggcggaatggtaacatacgcatgcgcaagatgatggcctgcatgctgggcgctgccctgtgtttttccatggccggagcggaaacaggcgtttcctctgcggaaaaagcttcacccctgttcgggaggatgatctggaatcgcggctgggagttccggcttgaggacgagcccggaaagagcggctggcagacggttcatctgccccatacgttcagtctgccctactttatgtccgattccttttacacggggttcggctcctaccgcaagaagcttgtcatgccggaggaatggcagggggagaaggtgtttctggattgcggcgcagctttccaggtggcggaggtgaaggtgaatgggaagactgcgggaaggcatgaaggggggtatacggccttccggtcggatttgacgcctttcctgaagcccggcgagaactgggtggaggtacgggtggataaccgctggagcccccgcattgcgccgcgggcgggggagcatactttttccggaggactgtaccggaacgtgcatctgcacgtgtgttctcccgtgtatttgcccgcgcacggagtatgggttcagacgccggaggtgacggcggcccgcgggaaggtccggattttgacggaagtgaagaatgataccgggacagtgaggaaagtgacggtgcggcatactgtgcgggaggagcaaagcggctgcgtggtgctgcggggagagaagggcgcggaactgggggccggggaagattctcgcgtacaggctgacctgcctcctctggtttctcccaggttgtggagccctgcggcccccaatatgtaccgtgtgacgacggaattgttggacgagaaggggaaggtgctggaccgggctgaaaatcccctgggtttccgtactctggagctgacggcggaccggggcatgctgattaacgggaaacctgtttatctgcagggggccaatgtgcaccaggactacgccgggtggggggatgccgtgacggacgccggggcccgccgtgatgtacggctgatgaagaacgccgggtttaatttcatccgcggctcccattaccctcattcccaggcttttctggatgcttgcgaccgggagggcatgtgcatgctgaatgaaggcattttttggggaatgggcgggttcaaggagcatgacagatactggaattgcgatgcctatcctgcggaaaagaaggaccgtattgcgtttgaggaaagctgcatgcgccaggtgagggagatggtgcttcaattccgcaaccatccttccatcgtcatctggagcatcagcaatgaaccgttttttaccaggcatgcgccggaggccagggctttgtgcaacaggctcattaccttggtgaaggagttggacccgacgcgccccgtgtgcgccgggggcgggcagcgcggaaattttgacaagctgggggacatggccgcctttaacggggacggctcccatgtgaagacgcccggcaggcccagcatggtgacggagtatggttccgtgagctgccggaggccgggggcgtatgcgccgggctggggggatatgaagaaggataaggaagcggggatttgctatccctggcgcgtgggagaggcggtctggtgcggctttgaccacggcagcatctggccttccggagggcgcatgggcattgtggattacttccgcattcccaagcgggcctggtactggtacaggaatgcgttgaggaatattcctcctccggagtggcctgtggaggggactccggcacaggtgaaactgtccgcggacaagaaggttatcagcccggcggacggcacggacgacgtgcatgtgaccgtgaaagtggcggacgccgccggaaggcagatatccaatgccgtgccggtgacgcttacggtggtatcggctcccggggagttccccaccggcaaaagcattacgttcacgcccggaacggatattgatttgattgacggctgtgcggcgattgagtttcggtcttattatgccgggaagacagtgatcagggcgtcttctcccggattgaagggggatagcctccaaatcgtttgccggaatgctccggcttacgtagcaggcaggagcgcggaaacgcgggaaaggccctacaagcgttttagcgcaaaggagagggatatccagctggcgcggtacggacggcccgaatccggagagaaagccaatttggctgtattgaggccctgttccgcttcctccggatttcaggaggcgatgaaggcttccgacggtgacgatgtttctgcatggcatccgtccgtggaagacaaagcgccgtggtggcagctggacatggagtttgaattccgcctggaccgggtggaggtgaaggccgccggaagctggaaggggccggctccctcggttcaggtcagcagggacggaaatagctggaaggacattaaagccgttttgcgcaaggatgggacggagctgaccgcaatgtgtccggaagggaccggcgccaggtacgtacgcatccgcctgtctccggggcagggaattgcggaagtggccgtatggccggcggatgcgttatgaggggtcccgtttttccggaacaggaggctttttcctgttactgcgcgtaccggagtttccggcctcctcttccgcccgctggcggcgcagtttgtcccaataggccaggcgtttgttgatttcccgttcaaaaccccgttccggcggcctgtagaactggcggcggggcatgttgtccggaaagtagttttgcccggagaaagcgtccggcgcgtcatgatcgtatgcgtaattctttccatagcccagttccttcattagtttggtgggcgcgttgaggatgtgtgccgggggcatcagggacccgtattcccgtgccgctttccgtgccgctccccacgcggtgtaggcgctgttggattttggggcgcagcccaggtagataatcagttcagcaatcgccagctctccttccggagagcccaggcgttcataggtgtcccacgcggcaatggccatttgaagtgcggcagggtccgccagactgatatcctccatggcgaaacgggtcaggcggcgcaggaggtagagagggtcctcccctccctcgagcatgcgtgcggcccagtacagggctgcgtctgtatccgacccccgcagggatttatgcagggcgctgatgagattgtaatggccttcccggtccttgtcgtaaaccggggctcgctgctggacaattttcagcagtgcgtccgtgcccagcatttcatcgggcttgcagaggtcaaagacgctttccatcaggttaatgaggtagcggccgtctccgtctgccagttctatcagggtggcgcgcgcttccggcgcgagcggcagttcacgctgaagaagggtttccgcccgttcaatgatgctttccagagccggggcgtccagggagtgcatgacaaagactttgcagcgggagaggagggcgctgttcagttcaaaggaggggttttccgtagtggcccccaccagcgtaacggttccgttttccacatatggcagaaaaccgtcctgctgggcgcggttgaaccgatgtatttcatccacgaacaggagggttccatggccgtattccctgcgcctggccgcttcgtcaaaggcttttctcaaatccgccatgccggagaagacggcggagagagctgcgaaatgcatggacgtgcgcgtcgccagaatgcgcgccagcgtggttttcccgcagccgggcggtccccataggataaagctggtcatcttgccggagtccgccatgagccggagaggtcctccttcccccagcagatgatcctggcccatgatgtcttccagtgcggacggcctcaggcggtccgccagagggcggtccgccaaggcggagaacaggcccggggcgtcgtcttttttcatgatgcccatcatacgccgccggtaaaaggatggcaaggggagcctgctggcatttcaggcggcccggcacgacggcacttcgtggagaggatgttgcaccccggttttgacgggtggaagagaagctggggagaaaaggaaagattcctgggaaaaacagtgtatattgaacatgatgttcagacatgtttcccatgtgtttctttttctgttttccggcttatgcggcacggccgtgaatgctcaggatcagataataccccggcccgtgtccgtgaaggtggaggccaagggggcggcaacgcccgtgaagctggatgaaggaatgcgcattatatgcaaggagaaggacggggagttccggcgccaggctcacttgttgcagcagtttttgtcacgcggaaccggattggctctggacggggctggcggtacgggaataatccgcgttgtgaaggacgttgccctgaagcagtacgggccggaggcataccgtttggaagcggctcccggaaatatcgtcatcagcgccgcgactcccaaaggagtttattatgcggggcaaagtctggcgcagatgctgcctgccgcctttttcaacaatgatgcggacaaaaagagcgtaagttggaatgtagcggagaagcctttttccatattggattatccccgttttgcctggcgagccttcatgctggatgaagcacggcatttttttggagaggaggaggtgaagaggctgattgaccaaatggggctcctgaaaatgaatgtcctgcactggcatttgtcggatgatgccggatggcgcatccagattaaaaaatatcccaaactgacatccgtgggaggcaagaggagagatacggagatagagacgtggggaagcggcaagtatgaaggcaggccccatgaaggcttttatacgcaggaacaggtcaggcgcattgtccggtatgcggccgacaggaatataacgattgttcctgaaatagatattccgggccattccgccgccgccatcgtttcctatccggagttgaaattgtccgccaggcctctcgcggaagtgcccgtgagtttcaatgacggagcggcgtttgatcccaccagcgaacgtacctaccagttcctgggagacatcatgacagagctggcttccctctttcccggaggtatcattcacatcggcggtgacgaggtgcggtacaaaaagtactgggaaggcgtgccccacattgaggcgttcatgaagaaaaaaggcattaagacttttcccgaccttcaaatcatgtttacgaatcggatttccggcatgctggctgagagggggcgccggatgatggggtggaatgaaatactgggatccgacgtacacaatgacggcggccggggagctgcgctcggcaagctggatgcaagtgctatcattcatttctggtatgggtccgataaaattgccgccaaggcgatcagggaaggccgccaggtggtgaattccacttcccacatgacttacattaataaagggtatgacaagctccctctgtccaggtcctattcttttgagcccgtttttgcgggattgaacccggagcagcagaagaatgtcatcgggctgggctgccaggtctggacggaatggattgcggacgtggagaaactgcaccgtcatgtatttccccgtattgccgcttatgcggagacggggtggacccggaaggaggataagaattttcaggatttccggaggcgtttgacggggtatgaaaaaattctggatgcccagggcatccggcacggtgaaaaggagtagttgaaaaattcgccgccagggatgaagcgtcctggctgagtcaacagtaaacccgcttgttacttggttaaggattcgggagagttcctgtcaatggcttctttgaggcgttccgcccgctcctgcatgttttccagaattttcagaatataagaacgcgttgtagccgagtgttccgctccgcgtacgaaggaaagcccccggtacagtcctaccgtttccaggcggagattcatatcttctccggacaggtcttcactggagggaggaggataattggaagcggggccattcagggacttcatctgcatggtatccatattaagcaggcagctttgtattccgttagtgaaaatcaggctgccctgatgatgcttgtcctccggccacagcctgtaaatggtaacggcgcttctccctccgggattgatcaaaatggcggggaaaacgtgtttgccgccaccctttttccggacggtcgcgtcaaaatcgcattctccggaaaacctggtcgtgacacgggaggagatgcatacttcaaaaggtacttccggcggcaggggaatcatggtggcggcagacaggggtgaccccggagggagttccggaatcgggaaggggagcgtaatgatgtcaatggcgcagctgatgatgccgatgatggcgaatagcaggatgcctttgttccggagctgggctgacattatttttccatattcctccggataatgcctgcctgcggatggttcctgccgcaggtaatagccggtcaggcgtgaaataacggccagagcggcagacatggctgccagccacgccagggcaaaagccagattttccgctatgggaattgtggtgaaaaagccgaatgttccaataatgaccgccgtcagcaggagaaagacggccaggaaggttatgcagcctaaaggggccgtggagacgggaatccagaaactgctgcgtttgccgagggctctcagaatcagggtggcaatgcaaaaagagaagatggccagcgttgaataaaaatgttgaaacagataatcgagcatggcatgcgggaaaaacttggataggcaagcggggagcgattccatgccggtttcctgaaaaatatccggaaacaagcagttttgcgccgcgaaacgatagaagccgaatgttgaactcctttattattttagcctttttccatccttgcctgcaagattttttgtttacctgtttctttctatttgtttttgatatgtttaaaaagcattgtcccataagaaaatatgggaaaaaatcgactccattttcattcaatgaaaaagatgcggttttctataaacggaggattccaaaatgataaaactgtgtgttatggataagggaaaaagagtattcctgccatggagatgttttttcccgtttatgaatgaaaccgctgcgccggttttcccttcattcttttcaagataccgggcggggagaagagccccggccggatgtttacctgcaagagcgtggggcaggcagctccggccgggttgatgaggaaaaacgcttccctgaagaaactgctaccgctgttccggctttgccggcactttcctgagtttcgcgaagcggggcagggaacattccttttgcatggccgtttctccctggatcaggggaagaacgtaatcaatgaacggctgttccacgccattgccgcgggcgttgatccattcgcggggaacaagtttttccacattggccacttcttccagacctatcaatttagtcttgcaggaataaatgccgttctccgtgattcgttcaaaggctaccattttatccgtctggccggaaacggcggcttccacggcggcttttcccgccatatacgcttcatcgatatccgtcttggaagcgacatgggaggcgcagcgctggaggagtgagagttcaatgcttctgactttagccccggtttgccgcttgacggattccgcaagcatggctcccaggcctcccagctgcgtatggccgaagacgtccctgtctccggattccgcaacaaagcggccgtctgcatactgcacgccttccgagacggcgaccatgcagctgccgttctgcctgtaaatccgatccacatcctgccagaattcctccatgcggaagggaacttccggcaggtaaaccaagtccggacctgctcccgcatacgtggccagggctgcggatccggccagccagccggcgtggcggcccatgatttccacaatggtgacgcgtcccttgtcgtacacgcggaggtcctggtgaacttccatgcaggaggtagcgataaatttggcggcagagccgaaaccggggcagtgatccgtgccgtgaaggtcattgtcaatggtcttggggattccgatgacgcggcattcgtaaccggactgctgcatgaatttggatatcttgttacaggtatccatggaatcgttgcctccgttgtagaaaaagtagcgtacgtcgtattttcggaaaatttccagcagacggcggtaatccgtatcatccacggacggggctgccatcttgtagcggcaggaacccagggcagatgccggggtatatttgagcaattccaattctccggggtcttcccgggccatatcgaacaggcgttctttgagcactccctcaatcccgttggcggctcccagcacgcgcgtgacctgttcgctttgcaaggcggactgaatggctcccagtgcgctggcgttgatgacggcggtggggccaccggactggccgatgatgcatgctcctttcaatgggttcatgggcaataatggatgagagagttgtgttgcgccccctttcaacggagttggaggcagggaatgaaatgatagtcaaccctatccgcagcccggagggatgtcaaacattattggttttccggatggggctgccggggctggagaaagtggggaagaaaaaagagcaggggtgtcagtttttttgtccccagagcttttccaatgcggaggcaaagcgttctcccaggactagaactccatgcgtgcccagatggacggtatccgtgggatagggggtgcggaagtccatgctgcgcagctggagatcgtctgcggggacataaaccgcattgttgacggagagggaggtacgggattcttccgccacatccttttgcccctgccgcactttttccctgcccggaaaacgggccggagcgggcacgggaagaacgctgccgtagataaaggccagaccgggggcttccagatccgctctgatgcgtttaatcaggttgttcaggttggcgccgtaagacagagcgtttttgatgccggaaatgtcctttgcgtctccttccccctgttgccacaccatggctttcaggacaggagcatgtccctgctttttcagggcttccattccgttgcggacggtacggagcaatttgacgtattcttccccctgcttatcctgagaagtttttcctgggttccattgccggaaaaggttgcttccgctccgggcgtgcttgatgatggcccattttttttgcgggaattttttctgcaacgctgttcccaggcttagttccacgccaaaacggtcgggggattcggatgccgggctcaagggaacaagctgttctgccggttctgtccctttgagggagccggaatagtacagaagaatccgtttatccgttttgaagcagggaggaatgttgttgacgtacccttgccctgtggcgtttgactgtccgccgataaggatgacgttgacttcatccgcatacaggggtggcgccggaaagaccgtcagggagcaaagcagccatgaaaagaggaaaaaacgtgcagagcgtggaagtacggaaacaatcatggcggggatatccctgatacgtttccggaaagaagattctgtcttctggaggaattcttctttgcctgctgccaggatatttgactgttgatgttttcctgttcccttgattctttcctttccggaaaaaggcattatgcggaaggtgcgtgcagggaaacggattggccggggtatatttccggaatgacggaaatgctcttgatatttttcccggctgtcagggagcggagcattcgtatgagcttgtgaaccgtttttgtctggttctcttcataataggtgatcgtgggcagcaggcgttccatgaagggttcatacgtcaggctgaccaggctgagctgatccggaatgctcagcgaacgggcttccacccaggaaaggatgggaacgatctggttgccccgtgtggctaccagggcggacatatccggatgttctttaaacgctttggccaggtattcaaagaagagaggcgtttcaaacggggtgggaaccaggatgggattccatccctgttccgcaaagctgaaaaaacctttttgcatgagctggtggcccttcaacggatcaggaggcaggcacaggcctaccgttcggtgccccttgttccaaaggtgctgcgccgcatgatgcgtggtggccgcccagtgacggtccagatagggaaggttgctgctctggtaggaggtgccgcgcacaatgcaggggatgcggtgcgtcttgaaccagagctgggtttgctccgaggaacggtgaagtatccagcagacgcattcggatttggtaaccagcttggcaagcctcttgtccggattattgcctaagatccagggagcttcaaagatacggacgctgatgccgtcttcctccagaattttggagatggtatatatctccgccaatacgctttgagccagccttttgaggggttggggcgtcagaaatccgagaatttcttttttttcctgaaccggatggcagaagatatttttaaccgtttcttcttccgtagttttcaggatgcgccgcggaaccttgatgcgtgggggggcaatccatgcatccctttccagaagggccagggcctttctgatggtttcccttcctacggataacctgtgcccgagttctctttctccgggcaggatattgaccaggctgccgctgagaatcatctgtttgattttattggctactgtttcaaccaatgaagaagctggcaacgaagtcatactcttgtatatacgtatcgcattgcgcgaattcgagccaattgtagggattgcctgccccgcagaatcaaaaaggagagctggtgttgttgcaagttgttgatattctgtaaatcgttttaggatttaagctactggtcttttttgatgaggtaaagtgggcggataatgtataaatgatatagtgttatcaatgcattacattcctgagcggtacggttgcaggtggtttgtaattattttttaattcatttaagataaatattttattgcgtattttgttagacaggtccatttattattctcactttaccccatattcccgccaggaaatgtgcacgtatcggcatggatgacttttctcccgtttccggcactaaatctgcttgatgaaagtgaataccataccgggcgcatcctatgcgctgacttgtacggctgcgtgtactatccatgcgcttcttagcgacgcttcttctctgattatcctggaaacggaaaatcccggacaatatttttttatagctcccactgatacaatagaggtatcagacgaacacgccctggtgacacaaacttttaaagcagccgctccgggatcgtctgcccgcagcggcataaggccgggagtaaatgctgatttaaaaaatccgacggtggaaaaagcggtatgaaccatttcttttttctgatcgcccgcgattaagcgcagcgctcatgagcaatccggtcaaaaggttgtttgtccatggtttttcgaacctttacggggagcgggacttcaccgccagatcattgtctggcgcggactgggtgcggaagtccgtctcattccgtcttggaattgctatggggagtctctttaagaaatgaagcgttatcgactggtaatagaaaaccctgggagcgtttagctaccagggtttattgattggtaccgccggtgggactcgaacccacactcttttggaactcgattttgagtcgagcgcgtctaccattccgccacgacggcacgtgaagcgaaagaattaagaggcaagagggccggagagtcaagaatttcctgtggaatatggtgagttgctgaaaaaacggagggattttcctgcggattccctccgtcatgtttccggatggaaataagtgttaggaatgagcagtgcacggcagcgttgacgctttggttgaccatgtgttccttctgttcctggcggtagaaggtttcggctcccaaattctggagatggtccggttcagagcagcgttgacgattgaggtatggtgtcccggccgaacaccggattccctttttatttcccgcctgtgccgcgaacttcccggaagagctttttatggatgatgaaagcggaaccaacatggcacaaggggggatgatacgcttaatctccggcgttttcttttcctgactaatgggagaaccgctctccgggcgtttcagccttttttcacggtcaggggcagtcccgccaccatgaagtagacttcatccgcgcttttggcaaggagttggttggcaatgcccagcccgtcgcagtagtggcgcgtttccgcatctgactggctgatgcccatgccggtttcagaagaaacaagcacccatggcacaggggattggcggatgagctttttcaaagcttctatttcctcaatcagcgcttcctggaacggctcgtagtccgtggggtccttctgggcgtacagggtattggaggcgagcagggtgacgcattccagaatgacgccgtccacctgatccagcaagccggattccccgacggcagaagctacatgacggggacattccagcgtgagccagcttttaggacggcgttcctggtgcttgcgcacgcggtattccatggagccggctccgggccagacttccgccgtggcgacgtacaggattttttttccgaatccggcggctatttgttcagcgtattggcttttgccgcttctgatgccgcccaggacgagcgtcatgcgtgcggtattggcgtcagtgtttggtgatgtagcgttcatgggattccagcatggcctggtgggagttcaggaagtcatccaggctgaagacttccagcgtaataaggggggagaaatgaaggtcccacatggggtgcagaatagcgtccagcgtagcggcaggcatgtggtgcagggatttgtggtcccgtttttccagcccgtgcaggtggcacatgcgtatgtccggcagccagagcggcagaagtttttccggccgcaggccttctttccagacatggcctatgtcaaagcaacgtgaatggggtgtagcggctaccagtttgtccagatagtcggtcggatggcgttccaaattttccagggccaggcattccggtgcggggaggtggggcgtgatttgttccagactccggaggattcgttccgtttcgcgttccgtaagatgggggcgcatatcaggaccggggatatgatccgtgaccacatgcatgacccaggtgtggggctccagttcccgtgtcaggtcaatggcgcgaatgatgttttccgtataacggcggcttgattcttccgtggcgaagccgccgtccgtaggcaggtggacgttccaggtaaccccggcatctgcagcgattccggccagttcccgtatttccgcaggggtaatgagttcctttccgcattctccggcttccagcaggagcagagcgacatcatccgcgtaatggatgcattccctgatggcgggcacgtagtagtccgggatgatgaaggaggtgcatccgatgttgaggccaggaacgcggcatttgtgtggagttttcataaagtgcagaaggtgagcaggacaagccattccgtacattccacggtacagccgaatacatccccggtaacgccgcccaggcggcggcgcgcgtataggagcaggcccatggaaccggccagggcggagagcagggcgtacagcccgttccatcctgccagagcgcaggcagccagggtgacggctgcggcagccagggcgtgaccggggcgcgttccctgcttgaacgcttcccccatgcctcctggccgtgcgcccggaaagcgcatggcgatgaatatctggctgcgggcaagcaatcctgccagagcgcacgccgtgagcagaagttcccaggagccgtgggccgccagagtcgccagggcggctcccttgaacgccaggttgaaaaacagggccgtgccgccgaaggtccccaggcgggagtctttcatgatttccagcctgcgttcccgggatacttcaatgggaagcccgtctccgcagtccgctactccgtccaggtgcaggccgcccgtgacggctacccagcaggcacagccgataacgccgcagaccaggggggggaagagcagggttgccgtccaggtcaggccacccgcaagcccccccactaccaggccaaccagcggtagccaggcggaaattccgttcaggtcattttgcagcggccacggccctacgggcagccgggtcaggaagccgaaggcggagcggatggtggtgatgacagccatggatacagggaagaaagggtcagcgcggaacggtgatgtccagttccggcagggttttcatttcagaaagtacgcgcgtggcggcgtccagcaggggaaagaacagggccgcccccgtgccttcccccaggcagaggcccagatccatgtacatggtgacgccgatgtgatccataatgagcttatgcccaggttccgcagagttgtgggagccgatgaagtattgcgccgcttccgggcgaatgccctgggcgatggccgcggccgccccggcaatgaagccgtcaatgacgatgggaacgcgcagggaggccgcccccagcatcagtccggccatggctcctatttccggtcctcccaccttcgccagcacgtcgatggcatcggaagggtctggcttgttcagggcgattccctgttcgatgagttttatttttttgcggatgacttctcctctgacgccggaaccgcgtcccgtcacggtttccacaggggtgcccgtgagcacggccacgatggcggaagagggggtggtgttgccaatgcccatttctccggcggccacaatgtccagccctttgtttttttcttcacgggccatgtcaatgcccacttgcaggcattccagggcctgttcccgcgtcatggccggccccttgctgaagtcgttggcgccgtgcatgacttttcttttgaccagccccggcaggtcgccgaagtcgtaattgacgcctacgtccactacggaaaggcgtgctcccgcgttgcgtgtaaaggcgttgatcgtgcctccgccctgaaggaagttgcgggtctggatgtaggtgacgtccgtggatgtcaggctgaggccgtggtcggcgatgtggtggtccgcggcgaacaggactatggctttgtccttcaggcgcggcgcgggattgccggtcatggcggcaatacggatggccacgggttccagttttcccagggcaaggggaggcttggccagaattttctgatgttccagggccgcttttgcggcctgttcgtccaacggggggatatgcagtttgttcatgatgtccagaggcggggggtgaagagaagaaggagagtgaacgccagcgtacccgtggcggcagtcgtccacatgagccgaatggccagggccaggtcgctggcggaggctttggttcgccctgttcctatccaggggtagtttgcaggaattcccttgtaagagaccgggcccccgagacggaggcccagcgctccagcgaaggccgcttcgctccatgcggaattggggctggcgtgggcgttccggaaggcccaccccatggtgagcgccctccgggcggaggttcctttcaccatcagggcggaaaaggaaatacacggtaaaataaggcgtgcgggtatgaagttgagcgcgtcatccgtgcgtgcggcaaaggtgccgaagtgtctgtaccggtcatttttttccccccacatggcatccaggatgttgaaaacacgatgcgccagcgcggcggaagccgccccggaggcgcctcctgccaggcagcctgctgaggcccagaacagggtggaaaaaacgccatccgtcaagttctccgccacgctttcaatggccgctctggcgatgccgtagacgtccatccgttccgtatcccgtcccacgatcatggagacggagtgccgggcctctccggcgttcccgctgcgcagggcgttttccaccttccgggcatgctcggccaggctgcgcggggccatgcagatgtaaatgaccagaacggacggaatccagggtgcccagggggagggtaacagggaaaagggaaggaagagcgccgcgcagccgaaccatgcggcaatgcaggttgccagcgcggccgccattcccgcatgaaaagttcctccccacctttgcctcgccagtgtttccatgcggagcgcgcaccggccgatcagacagacgggatggaacctgttgggcggttctcccgccagaatatccagcaggaaggccgcaggcaggatgaacgggcacgggaacatgggtcagcgtttcagttggagagctcggtaaatggttttcaggtccagatgtttccggaccacgtccgccagacggtccagcgctccgtccaggtcataggcggtgtgcagggctgggttggctttcagccctgaatctttcctgaccatgttgatgaatgcgcggcggaattggtctccgtccagcatgccgtgcagatacgtggcccagatacggcctttgccgtagccgcagggggagccgtcttcccggaacatgacgggggggctggattcttgatggctggtgacgccatggtggatttcataacctgcggcgggaacaggcagcggcgtgcttgcccggcgcacgttgatcagggttttggctgaagagaaggtggtggaaagttccagcagccccagtcctggcgtgcgctcctccggggattccatgtgcagcgggtccagaatgtccgtccccagcatttgcagccctccgcagacgcccagaagccactttcccttttcggcatgacggcggatgggttcttccagcccggcggaacggagagaagccaggtccgcagccacgcttttagtgccgggcagaatgaccaggtccggatttccccattcctcccgtgtccgcacctggcggagccggacgtccggctccgccgccagaggggcgaagtccgtgaagttggagacgtgggcgggcatgactacggccacatccaggcaatccgcatgtttcccgtgctccccgtggccagggggcagcgtggcgcggtcttcttccggaatgttgatgtcccgcatcatcgggatgacgcccagcacaggcttgcccgtacgattccgcatgtagctgtgcgccggggccagcagatccggatctcctcgaaatttgttgaccacgaaccccgccagcagttctttttcccacggggcgaatgtcatccacgttcccagaaaggaggcgtacactccgccacggtcaatgtccccggcgagcaggactctggcacgcgcgtagcgggccatgttcatgttgaccacgtctgctgatttcagattgatttctccggggcttccggccccttccaggcagaggagttcatattcgtccgccagggaatcgtatgctttgcatacgtccggccagaagcgccttttagccgtgaagtattcccgcgcgtccatgcggcctacggggcgccccatcacgatcacctgggagccggtattggaatggggcttgagaagaatggggttcattctggcatccggatcaatgcggcaggcctgggcctgcaccagctgggcgcggcccatttcctctcccagcgcagttacgccggagttgagagccatgttctgcgccttgaacggtgccacgtgatagccgtcctgaaggaaaatgcggcacagggctgccgtgagaacgctttttcctgcatcggagcaggtgccctgaatcatcagggccggtttgggagccttacggataatggaggggccgtttcccgccagttcggcgcgcagagcttccgccagcagggcgtgttcctccggcgtgcggacgccggagcgcaaccagcagcccgtttccagacccggataattggaacagtcgcgcagtgcgatgccgtattttttcaggagccgggctgccaggccatgaggcgcccccgccaggcggaagagcaggaagttggcctcggacgggagtatggcggcgcccggcagggaggagagcctgcggaacaggtcgtcccggcgttcccggttccgggcgcgttccctgtctgcccaggaggagggttgtgccagcacggccttcaccgctgccgtcgcaaaggcattcacgttccaggcgggcagggatcgccgcagccgctccgcgagcggagcggcacagatggaaaaaccgcaccggacgccggccatgccgtaaaattggtcagggagcgcagaaccaccaggttgggaaggagggccgcttcacggagcagcgattccgctccttgtgcgtaatccatgaaagattcgtcaatgatccagaggacttcggggcggctctggacaaccctgtgcagggccgctgcgtccagcaggccgccggacggattgctgggatttgccagaaaaacagcgcttccgtctgcggcctgttcctccagacggcaaagagacgggaggaaggaattccgttcctccgtccggatggaaagaacatccgtgccgtggcgcaggcaggccagcctgtattcggaaaaagcgggttccggaatgacggcctgtttaaggtttaatgcgcgcggaagagcgtgaatgagttcattggccccgtttccaaatacgaagcagccggaaggaagcccgtaatgaaccgccgccagttcccgcagatccgccgcatccggagaagggtagggcactgcgttttccatggccttccacaatgccgaagcgatgaactccggcataccttccggcctcaggttgacgctgaagtccaaaatatcccgttccgggcggcaggcctcctccgccagggattttaaatctcctccatgtgaaaaaacgttcatgccacagtaattggaaccggagtaccgaagggctgcccgcgccggagaaagaaaggaagcgccttgcaagttcggaatcccacatagccggaagcttcgccggagacgggaaatcttccctgttgcgggaacgtgggaacaaggagcgtcatgagcgcatcatgtcctgtatgcgccgggagtgacaagacaaaaatggaaagccccgtgaggaaaagagggatggagagcaatacgctgaaaagggaaaacgactgcaattcatctggatgttcaaagaaaaatttttttgtcttgtcataccggtctctttggtatttcatccgtcccatgaacccttatgggaagggttacagacctcagggacgcccgtagccgggcaggaaataaatggggaataccggtgtgagtccggagcggtaccgccactgtaagcgagcctgcctcgcaagccagaaaaccagcctgtgaggttgtccaactgttcggcgagttaccgaacgtaaggcactacaaccatgctttatacgaagaaagcccttcaaatgggcgcaattgctgttggccttgccgcattcgcaggccagtcttctcttgccgagtccgctaaaaaggaagactccaagccctccgtcaggacggaaaccatgcaggttatgccggaactgactatggcgtcccactttgtgggcgtgccgtacaaccggtctggagtgtccgtttccatcatcaatccggaagaatcccagaaggcgggcattgaaaccctgacgggagccctttcccagacgcccggcgttttcacgctggacggaggcggcacctggcagcgcggttccgtgagcaacaccgtcatccgcgggatgaacaaggatacctacaccctgaccatggttgacggcatgcgcatcagtgatgccaacatgtccggcaacaagctgctgggcatcaccaatctctttacggtgggcaatgtggaagtggtgaaaggagcgcagggcgccgttttcggttccggcgccattggaggcgttgtcgcgatggatactccggagggggaaggcgatcccgtaaccaggatttttgcggaggccggttccttcggctctttcaacagctatgtcacttcctccggcaagatcaagaagctttcctattttgtaggcgttgggtttgaaactacggaaaacgatccgtcaatctatccggccatttatgacaacaggacaggcatgaacgatttccgccagtggcaggaagccgtgcgcctgggctatgacatcaatgacaaggtgaaggtgagctttacctatcgccgcctggattcctactttgaatatcccacgccgtatgtggattataaccagtggccttccgttccggatccccatctgtacaatacggaagacaagaaccgcagcaacctggtgacaggacgtgtggatgcggaaatttccaagctgtgattcaccagcttcatggtggggcattacaacatggactattcctgccatactcccggatttgacttccagcccaacgtgatgcgcaaccgccgcttccaggcggagtggcgcaatgccctgacgtggaacaaggaatggaaaaccatcgccggcatggcctgggaccgttccgactacatgagcgaaaacaattacgttgccaaggatgaatggcagagcacgcttgccttctttgcagagcaaatgtggtcacccacggacagctttgacgccagcgtggccctgcgcctggaacatgattccgtctggaacaatcattttacgtggcgttattccaattcctggaaagtgacgggcaaggattcccccacccgtattttcggttccgtagggtccggtttccgcgcgcccacctggtttgagcagtatgcggccaattacggttatgtaggcaaccctgatctggatgtgtccaagtccctgggcggcgacctgggtgtggaacagcgcctggcggacggccattatgcttccgtgacgggcttctggacccgcattaacgatgaaatcggcaccaagagcgtaggcacctggccgaactcctataccacttacgccaattattcccactgcacttcctacggtgtggaagtggcgttcaagggtcagttcaaggacgcgtggaacagcggctattatgccaattacaccttcacgatgcccaagcgcgattccatcggcaaatacgagaccattcagatggccaataccgcccgccacaccgtcaacgcagaggtttatacctccccggttgaaaagctgacggtcggcttcggcgtaacggccgccatgggacgcacggactacaactatgcccgtctggataatttctttacggcgcgcctgtttgcccgttaccaggcaacggacaatgtgtccctccatgtgcgtctggaaaacctgtttgaccagaagttcatcatgacgaatgattataacttctatccgcgtgaagcccgtggattcggaatcttcggcggtgtgacggtcgaattctaagttcctttcaatattaattgttgattgctcccccatcttccgccttgcggactgtttcaggcgaagtgaacggttccgcgcggaagatgggttttctgttttccgttgtttccggaatcggttaacatgtggcggccatctgagttgtgttgcgctggatatccatactgggggccttggccctttccgtctttctgggaggtgtcttttacttttcccagcgtgagaagaatgtgtggcatgaattttccggacggatggacggcagggggatgcctgccgtatttgacggttttgtggaacgctggaacagggccgtggaacgggaactgcgccgtgaattggctgaaggggagaggaaggaaaaacttctggtcgtttcccgcggggaaggggacggccggcgtttggcggaacaggctcgttccgtggagcgcatcaggaaaaggctgttattgaaagaccatatccgccttcttcctttggaagacgttccggacggattggaatggcaaaccggaatggaagagccggatgtgggtgatccgcgcgccgtcaagggtggaaaagtccggctgtggatcaatactccatttcccggaactttgcgtgctttcgggccgggaagtgaaaattttttcaattactccgccattgacaacgtgtggcttcccctcgtggggcttcatccggaaaccttccgtcccattccgggcctggcggaccgctgggctttgtccgcagacggaaaaaccgttttttatcatctggatccggaagcggcctattcggacggacgcatcgtgaaagcgcaggattttctgttgaacatttgcctccgtacgtccggttttgcccgggatccgttctggactaccctgttccgttccatgtatgatcagattacggtatacggggattccgtcattgcccttacgctgccgtcccgcgggccgctgctgccttacatggcctgtgcggattttcacccggcccatcccggtttttaccatgatttcaacgcgctgtttctggaacgctaccagtggaaagtccctccaaatacgggtggctacatggttgttcccgctaaaatccggataggagaaagcattaccctggcccgcgtgaaaaattggtgggcgaaggacaggaagtattaccgccattcctgcaatgcggaccaggtggaacatgtgtttgtgaacatggaaaacaaggcggttgaaatgttccgccgcggggaactggacatcatgaacgttcgcaagccagaggtgtgggaagcagggctggagctgccggaagtgcaccggggctatatagataaatacagcctggaagccaattacgcctgtcccccgtacggactgtatctgaattgctcggacaagttgttgaaaaatccggatatccgccgcggtctggcgcattccgtgaacatgggcctggtgattgaaaccctgttccgcgggaatatgagaaggctcggttcctacatggaggggtacggagacctgactcttccgctgaaagctccggaatacagcaagaaaaaagccatggaatattttgcccgcgccggctaccgggaaatggggactgacggagtgctgaaaaatgaacggggagaacggctggtggtggaactgacgtttgcggattcatccaccctgatgaccaacgtctgttccgttctccggcaggaggccctgaagtgcggtgtggacctgcgtctggattcccttacctacagtgtctgttcccgtaaggtttttgaaaaacggtatcaggcggctctgtgggcgtggccgctgcagacgccgttcccccggctgtatgaaacattctcttccgaactggcgtatgatgcctgcggaaatcccgtaggcaatacgaataatattatggctgtgtcggacgctggactggatgccgccctggatgcggaacgcaatgcaccggatatcggttctctgaagctggcccttcaccgtgcccagcagcgtcttcatgaactttgcgtctggattcccggctggagggaaccctacacgcatatcgcctgctggcgctggatacgctggccggaatctcccacccggttctgttcccccagaatttacaatccgctggagtcgcacctgtactgggtggatgaagaaatgaagaaggagacgctggaggctcggagcctgggcgtaccgtttgaggaaaagaatcaaataatatatcttgaaagacaggatggtgccgctccgtaataaaaccgggtcaccgtctcctttttaaattgaaaggaggtggtttttcatcataatctccctctcatttaccgtaattaattattaattccataaccatgaaattatcctttttctccgttctgcttctggcagggcatctttgtgcggctgctcccatgcctttgccggaatccaatgacggagccaggcatgtcttctctactaatcaggaaaattttttgatggacggaaagcccgtcaaaatcatttccggggaaatgcattatcctcgcgtgccgcgccagcactggaaggacaggttccagcgcataaaggccatgggcatgaataccgtctgcacttatctgttctggaacgtgcatgaaccggaacccggcaaatgggacttttccggtaatctggattttgtggaattcatcaaggaggcgcagaaggccggcctgtgggtcatcgtgcgtcccgggccctatgtgtgcgcggaatgggaattcggcggatttcccggctggctgctgaaggatgaagatttgaaagtccgttcccaggatccccgcttcctggaaccggccatggcttatcttaaaaaagtctgttccatgctggaacctctgcagatcaccaagggaggccccatcatcatggcccaggtggaaaatgaatacggctcctatggttctgacaaggattacgtgaaaaagcatctggacgttatccggaaagaacttccgggagttgttcccttcacgtcggacggcccgaacgactggatgatcaagaacggcacgcttccgggcgttgttcccgccatgaatttcggcggcggagccaagggcgcttttgcgaatctggagaagcacaagggcaaaacgccccgcatcaacggcgaattctgggtgggctggtttgaccactggggcaagcccaagaatggcggcagtacggaagggttcaaccgagacctgaagtggatgctggaaaataacgtttcccccaacctcttcatggcgcatggggggacctccttcggcttcatgaacggggcgaactgggaaggcgcctacacgccggatgtaaccaattacgactacggctctcccatttccgaaaacggaaccctgacggaccgctaccgcaccttccgccagactattcaggattattacggcgatacgtacaagcttcccgaacctcccgcccagccggaaatgatggagctgcctcccatcacgtttacggaaacagccggcatgttctcccgcctgccgcagcccgtcatccgcaaggagcccgtccacatggaagccctggggcaaagcctgggcttcatcctgtaccggacaaaggtgaacggcccggtgaaaggagagctgaagatgaacaacatgcaggaccgcgccatcgtttacgtggacggcaagaggcagggggcggcggaccgccgttacaagcaggattcctgtgacattgtcattccctccggacttcacacggtggacatttttgtggaaaacatgggccgcatcaacttcggcggccagatacagggcgagcgcaagggcatccggggccccattacgctggacggcaaaaagctggaaaacttccttatctacaacttcccgtgcaagggggtggagcttattcccttctccggcaagaagccggcgggcgaccagcccgtgttccaccgcgggtatttcaacgtttccaatcccaaggatacctacctggatatgcgggacggctggaagaaaggcgtcgtgtgggtgaatggacgcaatctgggccgcttctggtttatcggctcccagcaggctctttattgccccggagaatacctgaagcccgggaaaaatgaaatcgtggtgctggacgtggacggaggttccggcacggtgaagggtgtgaaggaagccatttatgaagtcaacagggaccccgccatggcggatgtcttccgcgtgggcaaacctgtggcccccgctgccggccagctggtgcacaagggttccttcgccaagggggcagaccagcaggaaatcaaatcccgcgctcctgtccaggcccgttacattgctattgtcagtaagaacgctcatgacaacggcccccatgccgccattgcggagctgaacttcctggatgcctccggcaatctgctcccccgcgaacagtggtccgtggtttatgcggattcccatgaaacgacgggagaagccgcccaggcgggactggtgatggacaaccagcccaccacctactggcataccaagtggcagggggacaaccccagtcatccgcacatgatcgtgctggatctgggcaaggtgcagaaactttcaggattccgctacctgccgcgccaggaccgggaaaacggccgtatcaaggactatgaagtctatgcgtctcccaagccgttcaaacctgccaagtaagatcctctgaattgttgagcttttccagggccgctccctctcggctgagggggcggccttgttgcgtccggatgtccggaaaacagtcctcctcttttcctggacaaaagctgtgctggtttaaaaatacgtatcaacttttcgtttcccttgttttctgctgttgtgcgggccggtattccatgcgcaaaaaaaggcggccccgcagtgtaacggagccgccggaaggcagtaaaaacctgatagccgattgttagaagttccaggaaaagcccagcttgatggtgtggtagccgggatcattataaccctgaatctggtagtattcgtagccgatcaggaagtccgcgctgttggagatgctgaacttgaaaccggcctgggccgcccaggaaaacttggtggaggaaatggtgcgggaacggctgccgtcttccaggccatgaatggtggtcttcacgtcgccgtaagtggcgccgactttaccgcccagatagaacatggtgtagtcgccgatgggaaggttcagcgtgtaaccggccatcatcggaatataggtggaacggaggctggcggtataaggcccgctgatgcccaggtcctgcacgctgggatggtgggaaccggccaggatgccaccgttcagggaaatctgatgaacaatgctgccggtttcaatatagttgaaaatgctcagattgccgccggccacgttgggcatggcatctttggtggcgattccgtaagccccttccagggacatgccgaactggccgtcgtacttgtcggcatgataggcgctggcggaagacacggaggccgcaagggccaaacctaacagtatagtcttgttcatatggggataaatggtaaatttaactgtagtccattcttggcagttttctcttttgaagtcaaacatgaaatgtcaaatggacgcgaaatccccgagccgaggagatgaagttgccagaaccctcccgctggggtacattctgcgccatggaacaacaagcgtgtgatttgctggtgactgcttcccgcatgctgggcggagcggaacagtccgttgctcccggggatgcggccgtcgccgtccgggacgggaaaattctggaaacgggaagcgccgcagaactggaggccaggtggaggcccgccgtccgcaggaatttggggaatgtgctgctgatgccggggcttattaatgcccatacgcatgtccccatgacctttttgcgcggttttgcggatgacttgccgctgatggaatggctgaccggacatattttcccggtggaagcccggctgacggataaaatcgtctccctgggggcccggctgggcatgtatgaaatgatgcggacgggcaccacggcgtttgtagattcctacctgttggaagccaacgttctccaggaggcggaacgcatgggaatgcgctgtgtgggcggagaggttgtttttgcctttccctctccggcgtacggcgggtgggacggtgcggaagccctgtaccgggagcaggcggagcgcttttccggccgcggcagggtacaggtggccctgatgccgcacagcgtgtacaccaccagtgacgaagtgctccggcgttccatgaagctggcggaggaactggacctgatgctgcatatccatttgtccgaatccgccggggaagtagagcagtgccgttccctgcacgggggcaggcgtcccgtgggctatgcccgtgatatggggctgctgaatgaacgggccgtgctggcccatatggtggacgtgacggatgaggaactggaactggtggccgcttccggagcggcggttgtccataacccggtcagcaacctgaaactggcgtccggcttcgcccgcgtgcgggatatggtgcgggccggcgttcccgtctctctgggaacggacggagcgtgcagcaacaacagtctggacatgtttgaaacaatgaagctggccgctattcttgccaaggggtacagcggggacgctactgcggtccccgccatgcaggcgttgaagatggcgacggaggagggcgcccgcattttccggacgccggggctgggcacactggttccgggggctcccgcggatatgatcgccctgaacctggatgaaccgaacctgtgcccgattttcaacgaaacgtcccatgccgtttatgcctcttccggcaaggattgcgtgttcaccatggtggaagggagaattttgtatgatcatggaatttacacggacggcctgtatgcggataccgccgcggaaatgcgggatctggtaaagtgggtgaagaactgtgattgagtattggggatgagcgaataaaggcaggttctcaacacatgctttaatctctgggcccttacctctgctatctgtcggcctcccgaaccggcgcatgctcatattccttctttacccgcaaggggggatgcctttatagtaatttcatgcaatatgatcttatcgtcattggtggaggccctgccggctatgtgggcgccatccgcgccgcccagctggggaaatccgtggtgtgcgtggaacgcgaccgggtagggggcacctgtctgaactggggatgcatccccaccaaggcgcttctgaaaaatgcggaggcctaccggatcgtgacggaccgcgccagggaattcggcatgacggtggagggcgtcagcgtggattggagtgaagtgatcggccgttcccgcaaggttagcgaccgcctggcaggcggcgtggggttcctcttcaagaaaaacaaggtggattccgttacgggggaagcctccatcatttcccccggcagggtggaagtaaaggccgccgacggaacggtgaatgttctggagggaaagaatatcctgatctgtaccggctgcgtcacccgcacggtgcccagccttcccctgaacggcactactgtcatcggctccagggaagccatggtgctggaaaagcggccagaaagcatgatcatcatcggttccggagctatcggtacggaatttgcctacatttataattcattcggtaccagagtgacgcttattgaagcgcttccccggatgcttcccaatgaagacgacgactcctgcatgacgctggaacgggcattcaagaagcagggcatcaaggtgatgacgggagcttccgtggaatccgtcacggaaacctgtgacggacaggtcagggccagcgtaaagaacagcaggggacaggaggaggaaatcacggcggacgtctgcctggtggccatcggcgtgaagccggtcgttcccgccgctcccggcctggaattgacggaaaagggattcatcaaggtgaatgaccgctatgcgacttccattcccggcgtttatgcggcaggcgacgtgatcggcggcgtgctgctggcgcatacggcttcttttgaagctgtccaggctgtggagggcatgtttaatccggactaccagccccggcaggtcggcttcttcccgagctgcacgtactgctacccgcaggtggcttccgtaggtaaaacggaacgcgctctcaaggaagcgggcgtggaatacaaggtggggaaattcccattccaggccattggcaaggctgtagccgccggagagccggacggcttcgtgaaaaccctgtacggcgccaaaaacggagaattgctgggtgcccatatcgtggggccggaagccacggaactgattgcggcgctgggcatcggcattcaggcggaactgacggatgaagatatccacgccaccattttcgcccatcccacgctgtctgaggccattcatgaatccatgctggcttccgaggggattgccattcacatgtaacggttttcacgggaagagcccctcaacggggctctttttctccattaaaaaagatgaacgataacctgcgctggaaacaaaggcttcaaaacctgaataaggctttttcccggttgcgccatgcttgcacgttgccggaatacaatgaactggaaatggccggactggtgcagacttatgaatttacgtttgagctgtgctggaaaacgttgaaagataagctggtctatgacggctacagcgttaacagcccccgcgaagccatcaggcaggcgtttggcgcagacttgataggttatattgattgttggctccaggcgctggaaagccgcaatttgtttgtacatacttatgatgattccatcgcggaagaggcagtttccctgattaagggaaaattctttcccatgctggcccaatgtgtggaaaatctgaacatgatggcggagaaagaggactgaacgatggcctgacggccaaggtgcgctcaggcatccgggaaattctttcacagactccgcagattaggaaagccgttttattcggttcccgcgccctaggcacgtggaagcctgcgtccgatatcgatcttgccctggagggcgaggagctgaatttgtccgtccttttgactctccaagcgcgtctcacagagttgaacctgcctgtggaagtggacttgattattcgtaacaaaattactaatcctgatttggagagtcatatccatgcttatggccaggagtggttttcccgttccatggaatgaaggggggtgattccggaggggcctgcctttgagaggtgataaagtgcctatgggctcgctaaaaaatagttggccatttcacggaagttttttcacaaagaccgggaaaccggatttatccggttggacggaatgcgggcgtaaagcccgcaaggcgcggatcaaattcttgtcccatgtagctcagccattagggaaaacggtaaaaggacaaaaaactccatggtttggcccgaagacggccgactgggagcggaagtttgattcgccactgtttttccggggcaacgcgccgaaaggactgatttccgggaaaatactccaaagcaggaaagacattcagtctttcttctttagtctttttcccacggttcctcacagctcgaacaccgggttttccacggcattttttacggtaatgaggaattgcacggcctgcttgccgtccaccagtcggtggtcgtaggaaagggccaggtacatcatgggccgggcgatgatttggccgtcccggaccacggggcgttcctggatggcatgcatgcccagaatgccgctctggggcgggttcaggatgggcgtggaaagaagcgacccatatgttccgccgttggagatggtgaagcagccgccttgcagatcctgcatggacaggtttcccctgcgtgctttttccgccagggaagcgagttccagttccagctccggaagcgttttccggtcgcagtcccgcagcacggggacgacgagacccttatccgtgccgatggctatggagatgtcatagtacaggtttttcacgatgtccgtaccgtctattctggcgttgacctggggcacttcctgcaatgctttgactacggccttgataaagaagctcatgaaaccgagtttggttccgtaccgttcccggtacgctgcattgaattgtttgcggagctccatcacggaggacatgtcgcattcgttgaaggtagtaaggatggccgcctggtgctgggcctctaccaaccgtgccgcaatggtacggcgcaacgggctcatgggttttctgatgaagcgcggagaggactccttttctgttttcccattttttccggaggttgtctgatccggtgaggatgttttcttttccggcttttgttccgggacgcctgtcacaggtgagtagggaccggaagcgggtttctcccgcgtttccagtagtacggagggcgatgcggcggaacttccgtcaaggggagaaatgcggcctaaaaccgcgccgatgggggcttccgccccttccgggacgaggatttccagcacgccgctttcatccgcctccaaatccgtggaaaccttgtccgtttccagcgtcaccagagtatcgcctttggctaccgggtcgccggcattcttgtgccacgcggctacggtggcggaggtgatggattctccaaagttgggagtcaggatgtcgctcatgggagtaagatgggttcaggattgggcacgcggcccgaaggcagcggcgatgagtcttttttgtgcggcggcgtgcagcgctttggccccctccgcagggcaggccatggaggggcgccccgcatagcggaaggaagtggcgaagaggcgtcccagcctgttccgcaggtggccccaggcccccatattggagggttcttcctggcaccagacgaagtcgcgcactttttggtagggcgccagcagataggtaagctgttcctgcgccagaggatagatttgttccagacggatgattaccgtgtctgaaatattccgttccctgcggtaggcagccaggtcataatagattttcccggtacagaagacggcgcgcgtgacctggcccggcgcgggagtatccggatccggcagcacttcgcggaaacgggtggaggccaggaattcccggtgcggggagacggcctccggacgggagagcaggcttttgggcgtgaaaataatcaggggtttgtgcacgttccggtgcacctggcggcgcagggcgtggaaatactgggccggagtggtgggattgatgacctgcatgttgtcatccgcacaaagctgtaggtagcgttccatgcgggcgctggagtgttccgagcccgctccttcataaccgtggggcagcagaagcaccatgcggttcttctggttccatttggcttctgcggcagcaatgaattgacccacgatgacctgggccccgttggaaaagtccccgaattgggcctcccacatgaccagcgcgtccggactttccagcgcgtagccgtattcaaagcccagtacggaggcttccgacagggatgagttgtaaatgcggaatgcggtggtgccgtgattcagtttttccaggggagtgtacagggagccgtcattgaagtcgtgcaggacggcgtgccgctgggagaaggtgccgcgctggcagtcctggccggacaggcgcacggtgtggttttccgtgagcaggctgccccatgccagggattccgccatggcccagtccagcaggcctccttcccggaaggcttcccggcggcgggccaggaagcgtttttccagcgtggggtggggcgtgaagctgtccggaagttccgtaaggatacttccgatgcgctggaacagttccggactgattcccgtccgcgtgctggtgcgcgggaggggcgtttcatccgcatcctgcgcagtggcgggcaggatgtagtccgcggggttttccttcatttgcaggtaggcctgttccatgccttcccaaaggtcattccgaatgtcctgctcctgctgttccgtcaattccccgcgctccctgagcgccattccgtacagggcggcggcggtggggcgcgcctcaatccgcttggtctgcatgggcgcggtgaaggcggcctgatccgtttcattgtggcccagacggcggtaacagtacatgtccagaatgatgtccctcccgaattcctggcggaactggagcgcgaagtccgccgcccacaccaggtcttccgggctttctccgttgatgtgcaggatgggggattgaagcatctgcgccacgtccgtggcgtaacgggaggagcgggcttcgtccgggctggtggtgaagccgatctggttgttgatgacgaggtgcacggtgccgcccgtgcggtaacctttcagcagggagagattgagtacttccgccacgatgccctgtcctgagaaagcggcgtccccgtgcaggacgagcggcagcacacgcttgcgttccgcgtcttgcaagttgtgctgcatggccctggccctgccttccaccacaggatacacggcttccagatggctgggattggaggaaaggcggatatggagttctttaccgtccacatgacgtgtggcggcgtaaccgaggtggtatttgacgtcgctcctgccgatgggggattccggcaggtagtccggcgtgaattcgcggaagatggttttcagcggtttgtggagaatattggcgagcacattcagccttccgcggtgggccatgcccatttcaatgtgagagactccggcggcggggcagcgcttgatcatggcgtccagcaggacgatggctccttcccctccttccagggaaaagcgtttttcccccatgaagcgcttgcccaggaattcctcaaacagttccgccttgcagagatgggacaaggcttctctccggacttccgggccataatccacgccgtttgcccggagctggattttttcttcaatccaggagcggattttaagattgtctatgtggtggtattcaaatccgatggctccacaatagattttttgcagccgagtgatgatttcacggagcgtgaacgttcctccgtccatgaaggtgccgatgttgacgggctgatccatatcctcctctcggaatcccatatcttccggattgacggggcaaccggtctggtccggaggatccagcgggttaaagcgggcgcattggtgtcccatgacccggtaggcccggatgagctggttgacgcgcccgcggcgttccgcgctttccggaggaacggtgtagggggatgtgtccgcggcgttccccgcattttctttttcccggggggctccaccgctccccagttcgtagccgtcgaaccaggcggcccagagagggttcacggacaggggatcgtttttccatgattgatggagcgccgtaatttcctccggcgggagtttggagaagatggaggcattcatgcggcagggcggatggtacagggcgttttcggttcgctgatcgctatttttgcccgcagggcatcagtaactgtgttcgttgagctggacttttccgcggaagacccagtaaatggcagcggaataagccaggacgagcggcacgcccagaatggctatgtatgtcatcacgaccaggctttcccgggtggatgagccgttggcgagcgtcagggaatgttccggattgggcatggagtagagcaggttggggaacatcgctgtcccgaagagagccatcatgcagcccatggtggagcaggaggcgacaaaggcccagcccggacggttcctgtggatgaatatccagatggacgcgatggaaatgaccgccagggcggcgattccgtaaatccagggggagcgttccagggcggccgctacgtgcggtacgtacagcagggtggtcgccccgtgcaggatgatcaggacagtgaagatgatgacgcagggtctgagcagttttctgatttgttcctgcaggcttccctgggttttcatcagcagatagattcccccgtgcatggcgaacagggcgaccgtcgtcagccccagaagaatggaataaggattcagcaggctgagaaatgttccggtgaaattgccatggtcgtccagaggaatgcctttggtgacgttccccatggctacgccgatgagcagagctgccagaaggctgctgatggagaaagtggtgtcccatcccctgcgccaccatttcatgggctgtttgcttctgaattcaatggacacggcacggaagataagggtgagcagcaggagcatgaaggccaggtaaaacccggagaagacggaggcgtatacgtacggaaaggcagcgaagagggctcctccgcctgtgatgagccagacttcgtttccgtcccatacagggcccacggcatttagtgtgagtcttctgttttcatcgcccttgatgaaaagctgaagagctccggtgcccaggtcaaagccgtccaggatggcgtatccggagaaaagcacgccgacgaggatgaaccagatgatttgcaggtctgcgagagtgagattgtccaacatgatttttaaagagggataaagattagtctttaacaaaaggaacctggagtttgccttccccggcgccgtcgtcttcgccagcttcctggtccggacctttgtggatcttatgggtgatttgatagaggaagagggccagcagcagggcataaatgacgaagaacatacccagggaggaaagggcttccgccgcggtgagggtgggggatacggcgtgttccgttctcaggatgccgtacacaatccatggctggcgccccagttccgctacggcccagcccgcctggttggctatttgcgggcccagtacggagaaaacaaagcaccagagcagccagcgcttctggaagagccagcctcttttccatccccacaggcccgtcagaaacagggccgccagggcgcagccgatcaggatcatgagatggaaggagtaaaagacgggcaggatgggagggcgttcgtcctgcgggatgtcgttcatgccggtgatggacgtgtccaggtcgtgatgggtcaggagggtgagcaagtacgggatggagattcccgtcacttcatgggtggacgggttcatccagccgatgagatggaggtcctgaggggcgccggattccatgacgccttccatagccgcgaatttggcaggctggtggacggagacttctcgtgcgctggaatctcccgtgatgcccatgccagccacgccgatgaggccgatgaccaatgccaccttgaagcttttttccgatcctccggtaaaacgttttttcaaaatataccaggcggagacgctgaggacgagcgtggctcccgccagccagcagccggcgagcgcgtgcgtcaggcggtgcacggtggacggattgaagaccacgtcatagaagctggttatatgggcctggattttcccgtttacttccaccagcttgtatccggcgggcgtctgcatccaggagttggccacaatgatccagatggcgctgaaatgggcgccaagagcgaccatgcaggaggaaagaaagtgcatttttgggcccaccttgtcccagccgaaaagcaggatggccaggaagcctgattccaggaagaaggcgaagattccctccgccgccagggggctgccgaagatgtcgcctacgcagcgggaataatccgcccagttggtaccgaactggaattccatcacgatgccggaggctacgccaagggcgaagatgataccgaagattctggtccagaatttggcctgcttgtggtagaggtcattcttcgttttcagccacaggccttccagggcgaccagaaccacccccaggccgatggtcatcggcgggaagatgtagtggaacatgatcgtgatggcgaattggagacgggataataagaccggatcgtccatgattgattggggatgagtggatgtttatggaacaggaggacggcagccaaacaccgataccttcatactttatacatcccaagagaccctttgttcaattattttccttttccgcagataactttttagattacgtctagaaaagaaaggcttaacactggatgaacacgtccatcccttcttccgccagagcaaaaagagccatcatgtccctgggagaaaggcgtatgcagccatgggaagccggggtgcccagcagttccgtatcgttggtgccgtggatgtaaatatagcggctccgggtattggcgttgtgcggttccagtccgtccagccacagaatgcgggtcaggatgaagtcggaatgttcattcagacttttcgggatggcggtgggatagcggcctgccggaaggcgtgagatgaaaatagtgtcctccggttctccgtctccgatttttttgcagatgcggaaatgacctgtgggggttttcccggaaccttctccatggcctgtacctgccttcccgctggaaacggggcattggagcaggatttttccggatttttccagcaccagttcctggcggggcagattaatgcgtatggaaggggaagccatgacgggggaaggagtcaaagatgttgctactcctgttgctccatccgggcaatgatggcctggatggcggttgtcaattgccgcgctacattgttgtaggctgtctgtccgcagccgatggggtcggcgatgccgcggttgcccgtgtagcaggtgaccagcctgaccttgtccgcatattcggggaaattggcaagaagggcggccaggtggctttccgtcatggcgtagacatctgtggcgtttttcatcagttcatccgtaacagggcggctttcatggctggagagattgacgccatgctcccggaggacgtggagcgtttccggactggctgcctgcccgggccatgcggctgttcctgcggaaccggcctgccattccggatggtgtgcggaaagtttccggaacaggccttccgccatggggctgcggcaggtgttgccggtgcagatgaagaggatgtgtttgcgctgtgtcatgagtcggggcgttctcttttggagtgatgggggataggtacttcgttgggttcctgatacaagttgtccgggggcagaacatggccggctccgctgccttccgacgagggtgtgccgtcgtcttcttcatcttcatcctctgcatcgcgggaggggggggagagctgggggaacagactgcacgccagggctacgcacagtactgccgttatgggagtcatgacggggaaccatatatcatgagcggaaaacaggtaccatgcaatgaagggaacgaacaggatacagaggccccaggtgatgaagcgccctctgcgttgaaaacgcaaagcccatacggacagaagcaggacgtccagcacgatgatccattgtacccaggcgggggctatgggaatcaggacggcaggggcaggggcaagcgctcccatgatgctgcggacagtttgcgccgccagaagggattgcgcgtccggcgtgtcggaaagggcggatggttcggaaacgagtaccgcatccgcagaggaaagcagttttctgacggcagtagtatccggcggacgcaggccggacatgacggggacgatcacttccttcgtgtccagaatggtggggctgctgtttgccgccagggggatgcggccgtttttatccagagggatggagcgtttgccgcccagaaaaagggtgtctcccggaatgattctgacatcaccgggtttcaggtccagggcattcagagcggccaccagaggaagagtgggaatgatatccccgccccagcggatgaaaagcggcggggagaccctgttttccggagctggggaaaacagctcgttattttccacgacggttcccagggagggggctgacgtggttatttgcggaggttcccctacgaacctgtccgcgcgcgggaactgatccgtctttcctacgatgttggaagcgggaataatcaagtctttccaatccggcggaaggggcgagcggcgggcggattcgctcatttgccggcccagagccttgtggaggaagcggtctagttcataccccacggcggctttgacgatgctgtccggcttttcttcccaggtcatgggggacatcacgtaaacattcctggctccctgttcatacaggtgccggaacagcactgtgtaatccatgggattgggaggataggaggcgaaactgttcagtgatgattcccggtgcagggaaaccacgggaagctgggccgtctgccctttgttgaagtaatcgtagggctggaggacgatgctgttttccgtattcagcccttccgggcgaacagtccggtattccccagccagcaaatgttccgctgcctgttcataacagaaaatggtaggaggaagaagcacataccccagaatccagcccagccccagggaaatctggaacagggacaggacaagcaggaatttggggggaagcgtcatcagaggggctgggaaaaatcatgctagcatagcagccagcggttctgcaagcgtggagccgggcagaagcttccgcaggtgtcccagcccggcgggaatctgagccagataccaggtttttccctggttgtggccgatattggcgtaagcgcccagcatctgcataatccgctgcagggcgcaggcacggaaaatgcggtgatctatggagtgagcggagatattttcccactccctgagcaattcatccgcctgttccggttccaggcgggcgtagccgtcatagaccagggaggccagatcatattccggacggccgccgcgcatgccctgaaaatcaatcagccaggtttttcccgcgtggatatgcacgttctgggactggctgtcccggtggacggggcattccggaagggccgccagaaactgcgcctgctctttcagggcgggatggttcaggaaggaagccggttccagccccaggtgggaccccaggaaatgttcagcaaaataggactgctcccagcggtacaaggcctcgtcaaaagcgggctggagggggaattcctccggaaacgggcaggagtgaagcagatggagttgttccatagcccggatgtagcgcaggcgcagggaaggccagggttctttccggaaagccagcaggttggcgtctcccaggtcttccaccaaggcggctccgcatccgggaccgagaggttcataatcgtaaatttccggcacgttgacaccgtgggcgtgcagatgccgggctgcggggataaaagaatcattgtccgcacggtcatttccccactggatgccgatgcatgtgcggccgccaaaatggatgcggacgatcgtacggccggaggctcccaaagccaggggacggaaatcttcctgacgcggaataatgtgaaaactccggtgaaccagacgggacaattctttcatggaaaggtggcgtggctgcgttaagagccttgcgtaaggatggcgtatgaaggatgacggcacccttcatacgccgaaaatgaggaaaggcagggcaatcaggcggggaactggtggtcttccccatagccgtaatgctccacgacgtaatccacatccttgtctccgcggccggagcagtttaccagaatggcgcctcctctgttttcccgtgcccacttcatggcatacgcgatagcgtgggagctttccagagcgggaatgatcccctcgtaacgggaaagtttgaagaaggcgtccacggcttcctcgtctgtggcggtgacatagttaacgcggccgatgtcgtgcagataggcgtgttccggccctacggaaggataatccaggccgctggctacggaatgaaccggtcccggattgccgtcttcatcctggagcatgatgctttcaaaaccgtgcaggacgcccttgcgtccataggtgatggaggcggaatgatccccaagcctgggacctttgccgaggggttctacgccatagatatccagcgggtctcccaggaaggcggtaaacatgcccatggaattgctgccgccgcccacgcaggcgcagacggcgtccggcagaagtcccgtcatttccaggaattgttcccgggcttccacgccgatgcacatttggaaatcgcgcaccatttgcgggaaagggtgggggcctaccacggaaccgatgcagtaaatggaatcctgataactgttcaggtaagattcaaaggcggaatccacagcttccttcaagctttggaggccgtgcgtgacaggcaccaccttggcacccaggattttcatgcgggtgacgttcggagcctgcttggcaatatctaccgctcccatgtgaatttcgcattccaggccgaagaaggcggcggctgtagccagcgccacgccatgctgtcctgcgcccgtttccgcgataatgcgcttcttgcccatgtatttggccagaaggccttcccccatgcaatggttgagcttatgggcgcctgtatggttcaaatcttccctcttcaggtaaatttgagaggtgcccaggtggcgggaaaggcgttcgcagtggtaaaccggggtgggacgtccctgaaactgtttgcggatgcgccgcaattcattaatgaactgggcggagtgggctatcgtctggtaggcttccgtaatttcttcaaaagcgggaaccagctcgtccggcaggtaaacgccgccgtattcgccaaaacggccctgggcgtctggaaaattgcgtaaataagtatggagatccatggtctgttgcgttcgtgactgccagtatttagcacgatgccacaattcaggcaaaaacaatctccccggaagcccttttaaaaaagaaaggaaagaaaaaggacttccccgcaacaggggaacggtttctccgggagagaccgggaggaaaaatcggaaatcaggccaaacggcgctttctgatggattttccggtatcggcaagcgtctggcgtgcgtccggatccgctccggccatcaaggctgccagatcccgaacgatgttctggcgcatgcgagctaccagatcgcgcccttcctgggtgatggcgaccatgattttgcggcggtctttggctgcgctcatgcgtttcaggtagcccatttcctgtaatttatccaccatgccggtagcggccgcggtagaatgccccattttctgggcaatgctggacatgctcagaaaatcttcgctggccagataagtcagcaggaaaaactgggggtaggaaaccttgccctcattcaattctgaagaaaggttcagaatgcaggaacgttgcgtgaacaggatgaaatccgccagcttgtttgcttcttcggaaatggagctcatgatcgttgtgaatgtatgggagggttgatagcgatacccgtccggagactcgccggcggttcggccaacctaccgccgcgtccttctacgggcaagtcaaaaatataaatttttattaaaattttacatttgcggataataagcattttgatggtatttgaaatacaatatgttgactgttaatagaatggatatattctgaatatataatgtgaataacatgttaaaaatagatataagctattgataaacggtagtttttcacaaaacttccgggaatccgcagcaaatctggcataaagaggcgttgcagcatgacaagcctggattgaagagggctcttgtgcagaggcttttcatgggaaataaagccttgccggaggaaaattttatacagcgggaagcaatattttcctgcccttgagacggacttggaacttctgcagtcttgacgtgagagtagagaaagggggcgttgaaaactttctttcatggcctccttcctgccgcgatagttgcggttccttgtttacggcggtatgagtctatgacgcttgtaaaggcaggaaaaacctttttaaacggtcctggaaggaggggaaaagaacaaacggaaacctgccccatactgatggagcaagcgccgttacagacccggtctgggaatgacgctctgcttttgggagagaaaaattgcttcttccccaaaagtcaaaggctggcggaagtaatgggggaaaatgctcaaggagccgggaaaagactgccgggggtctaagaggttacctgtaaaactcctattattcggaacggcctattttgaaaacaggccagtggcagtgaaagggccgggcgcatcaaccgcataataaatgctccattacagatgacgcatcatttgttatcggcacggtgtgtaaaagagcaattgcgccgtcctggttcatgttctgaaggtccgttatcaaatgttcacgaccatggaacttacagccgttaccattacatttcaatgatatcggtttgctgggggggcatgattctttttagcatttattgtttacgagtggttcttatgtcattcctcgctattccgcacaacggaaaattgtgtgatccgccggcctgtttcctgaaaaataagaaagacggcgttgcttgccgtcccagctgccgccatacagcaactctagttgcttgcagtattgcaggcagaaaatcatggaataaagcattactgccggcaacatcattgcatgccgccaattttatgcttgtatccgcaagatattttattcccctccattctccgttaagttttttctggaactcttttccggagaatggacggagaacaatagcaacaactagttggcgggaggcggcgtaaaggtgcgggctgacatatccttgtccagaaccagcattccctgtccttctcccttgatcatgcgtaatttgctgatgatgtccttgacgctttcttcctcttccacctgttcagtgacaaaccattgcaggaaaatatccgtggcgaaatcccgttcttccttggcaaggtgcaccagttcgttgattcggcgagtgacttcctgttcgtgggatagcgtttcttcaaaaatttcaagaatattggaccagtttgcatccggagcgtctatggaaagcattgtaacctggcctccgcgggaaagaaggaaatcataaaatttcagcgcatgagcggtttcttcctgatattgaatgcgcatccagtgggaaaaacctgtcagaccggcatcctgcagataggcggacatggccaggtaaaggttggctgaatacatttcccatttgatttgctcattaagagcagttgccattgttgtactgatcatattgtaaaatcctgttgatttttcccacttctacaaaacaaagtccgcaggatcaagataatcctgcggactgtatgacgggaagggggggaagggaaggcgtcaggcttttgcggaaacctcctccggaatattatctccagggagctcttccgccggaacggagggggattcctcagtttccgtaaccactctgttttcttcaggtgcttcctcccgggcggcggccgcctcagaagaagaggctgccttctgtttttctggtgcagcggaatccgttgccggcgcgtcttggcccttctcttccggtttccgtttttccttgggagccttcttgggagaaggagcttgggcggagacggttcttggacggctgacagtgttattggagaaaaccaggatgtagccctgttcggacagccagagcagatcacggaccaaattctgctgtttttccatggcctgggctacttcttcttccgtggccttttcctgttccgggactggggccagctctttaagcatggcatcgacgcctttgccgggattattggccgcccaggtggcaatggacatcagggaatctgataagacggtgccttcttccatggccttggggcgcgccgggccggtgtaatggttgcctttccacttgaaaataggcatatgatgccgggctaacccgtggcaaaggtttggaatcagcatgctgggatggcggcgggtggtgccggataattggatcaggtgcgcccacagaccgggggagaggtgattctttttcacggctccgttgacgaacaccttgtccgtaacgtcatagcactcgtcaaagtggttggattcgaaatcctgttctaccgcggcgggagattccagaagcacttcggaggctccttcccgaacgggcttccaggcggtgcgtttggaaacggcttcctgccatgcctggacagcttcttcgctcttgtccgtcacaatcttggaacggaaagcctcaaaagtcatgttggcaaatttggtgcgatgcaggttcatcagggcggactggtagccgtgccaattaacgggacctaccagctcgttgtttaaggaacatttggcaatggctttgaaatctccttttggagcttccacttcctgttctacggattcgtaatatttgggcatccaggtggactgccagaggtgtttgacggcctcctgtcgggaaataaagcaggcgccgtcgccatgcttgcaatggtacagatccgggccgttttcctgcttcatgaataccaggtcataacggtcgtaggaacccatgaccaccttggcaaggtccagcagggaaatggtgcggcggtgtttctgtacttcctggtgcagggcagccaggccggaatccacggggcgcagctccacgcgcaggccttccgtcggttcctccatggcggagcggggagtttgatcgcggcggttgcggaaggagccgcgcgtgcggtcttcccggttaaaccttctttcgccgctttgaccgtcaacacgacgttccccccggggctggcggccttcacggttgtcgcgccgcggtcggcggtcgcctccctgcctgtcgccggacctgcgttccgggtaggatacaggccgttcctgacgggctcccggtctcgcccaggccggaccaaattgaaagtcggccaagccggaaaggtccggaatctgctgcttggggtctgtggaaggagtttcgtcggtcatcatgtacgggttgtttcaatagcaactaaatgaggtggatggcaatcattttacgtgcaaacagaccgaaaattgttcaaaatgtcatgaaaggcatctggaaatgcaactatttccggtgtgtcctttcaactcaacttctgtcaaatgctctatatggataaaatacgtcaacgactttccgaccttggttacgccatttacgatgctcccgctcccgtaggctcctatgtgcaatgcgtacgcacgggcaacctgcttcacctctccggcggcatttccgtgaacggggacgacaaatactttggcaaagtagggcaggagctgacggtggaagaaggtcaggccgctgcgcgcgccgctattttgaatcgtctggccgttattgtgcaggcggtggggtctctggaaaaagtatcccgaatcgtggccgtgaacggatttgtgaatgccggcccggatttttatgaccatcctaaagtactgaatggcgcatccgacctgctggtggaagcctttggagaaattggccgccacagccgtacggcggtaggcgtatccgccctgccgctcaatgtagcggtggaaatcagcatggtggtggaagttcgtggttaatatttaaaaaccggaagggattcgtgcttgaatcccggcggcattcctgtagagtgccgtccggtcaatgcccccgtggcggaatggtagacgctgcagacttaaaatctgttgtccgcaaggacgtaccggttcgagtccggtcgggggtactttatcgagattaaatcttgtaaataaaaagcccgctgtttgcgggcctttttgttttgcttcaatatcatttgctggctgattctccatcaataatttttgttttcccggatgagtaaaacaaggatggtggtgtttcgtggctattcttgtcatgaaatgcagaaagcagagagaagaatgttgagtggaaacagttctgaaaaaagagtttataacagggcgcctctggctgaaaaatagaaatacggagtatgaaattgttgggtatcttccggtctggaaaatcagatggttcatggcgccctggaaaaaagggaatgttgctggcgttgaaaatagcaggaggcatgtttgcgggagcggttgtggtatgcgttgccgcagaatggtacatttattccgtttcagagggcaggattgttgagcattccagggatgttcccgttcgtgctcctgttctggtgttaggatgctccccaacattcatggggagccctaacggatatttccataacaggatggatacggcctcggaactttggaaagatggaaaagcaacggttttcatcgtttccggagataatagttctcatgcttacaatgaaccggaatggatgaaacaggctctggtggaacgtggcgttccagaggaacggattgtatgtgactttgcgggattgcggactttggattctgtcgtgaggatgaaggaaattttcggcgtttcgacgatgattgttgtttctcaggaatttcataatgaacgcgccctggcaatcgcagcgcatgaggggatggcggcctgggccgtcagcgcgccagatgttcccaaccgccgttcccgtataaaaagctggttcagggagcgtgcggcccgcgtatggatgatgctggacttgtgggtttggagccgtgaaccccgttttttgggagaacctgtggttttgccggaaataaaagaggaaaaatgaacaatacctcatgcggcagggctcgtcataagatgtctttgatgcggtacggcaacccagaaggagggtgtgcccgcgcctcgaatcattaaatgctgaatggtccaatcatgtcggctacgtgggatgatttgccatgaagatgaacaaggccagaaagcctgagtgaacaattcgtcatgaagacggtcggaggtggtggccgtacgtttcattgtccttcatggaagaaacaggtgcaatccttccccttatcttatgcgtatgggtgggcaacggttgaaaaaaggatggttgggaaacatcagcaagctgatgctctggtcggaataagcttgcctccatgtcttgggaataaaacactccggaacaggttctgttgcgttttgatgcggctgacgttccctgttggaattccgtatttgattaaaaaggggaaaggatacggtaaaaatcattgactctttccgggaaagtgctatgcagatttcagcggcttgtgaaaagcgggctgttttattccggctgtcatgttcccttcttctagcggtcaggaaggccgtctctccaacggcaaaggctcggttcaactccggcagggaatgccatccggcagccatgttttgtttcctgccgtgaaaaggcggtaaattgcatcaggaaaagcaagctacgggggagttatgatggaaacacgctttcaatgactttccccgtccattccggtagtggctttcctccgaataaatgaagaagcatgggagcggtattggtggtattgtttggttcggaaatcaggaaatttctcttaatgcccggacctgaaatcccccatggaactatcatttccgctgcgctcgtccccccgtggccctttccgattcccccatgatccgtcagaaatagaaaatgcgtatcgttgaataagtcttcctgcctcaatttctgaaaaaagattccaatttgctgatccgcctcttcaatagattgaaggtattctctggacatccagccgtatttgtgccccgcatgatctgtatgaacggaatagagaaaaaccacagtcgggttgtagcggtgtttcttgacgaattggaaagcctgatggtaattggaagcataggcgtcgtttgccaggtacttgatttcatccaggtatttttcgttgaacggataggcaagaggtttccaattatagtaaaaagctgttttgcaggaaggctggcattttttcagggcctggaatacggagggataatatccgtcttcgtctctccgtacggcggggtaggaggaatttgccggcgtccagttattattgaagactccgtgctgttccgggccgctgccggttaagtgactgatccagttaggtaacgtgacggagggcatcacaacccgcgtatccagagaaaaagctccctgtgacatcattccttttaaagagggcgcatgcgccttttgaaaaccttccacacaaataccgtccagggaaatcatgatcactcttttggcggaattatcggaagttctatctggtacggaatttctgggaatgccggaatcatattgtgtagtggcaagggctgtattgcccgttgtcattcctgctgccgccaggcctaattgattcaggaaattccggcgtgttgtttgatgataagagttttccatataaagtacatactgttggcttgaagtatttttatcaacgcttctggatattcgggaagctcatttcatcgtatagttttttacggacaggggccgaatccgggtttcaaagcaatttttccaataatttgttcctttcctgtgataggatggttttatagagaaaggatatcatcatttattgtattcaaatagttaagtgggtgtgacaatataggaatgctccgcaggctgtctcatctgcgatttaggcaaagcatcttccatacgcttcaaacgagggggcatatcatatttgttacgggccgtatcctcatcaatgttggccagaatgccgggcgggagcggggactctcaatctggacgttttacacaggatgacattttccgcgagctggagcagatttttcaaggaagtgggtgttacgcgctgccgtgtggtgcagtcagctccctgaagaaagatcagccggaggcagacagatgtccctgatgttattcctccaacaagacgggacaagcccggcaggtgtgggtgtttgccagccatcacgatgctcgcgccgccattattaaatcagccaattagcataatgataccatgagagagatacaaatacagttttccaagcccggtaactggagggaattcacactgacagccatctaccaggattcggatggatatacccgcatagaccgctataaacagaatgatataccgtccgggcaggccccggctttgagcgcggctgtagccgtcattgcagacatggaagaggactggcaagccgtccaggtatgggcaaggctgggaaatacctctgttctcaataattccgcaggagacgatgaggccgttgagtttcgtgaagccgttctactgacgattgaggctgtcaatagcctcgggggccgccgtatttttacccccggtaattatgcgcagttcatactgatggattttgcctccatatcgtttttcaagtattttaccatcagaaaataataaggatatcagcaaataagattgttggactgactgcatgattgcggcagactgggggatatgtgatgcagtgtttttttcccggacaaggcgtttccggatttgtcgatgcattgcaacagttttaaatggaaaagatgttcctcccaggcaggagcggatcaaaaacagggaatcaatgacagtaaccccatgagtgacgtaaagcagttcttggtcaacgttgggaacaggaagggcctggtctgtcgtgatgcctcaaaaattgcagattcccttatgctctgatgtttatcggaaaacttggatggagtatcgtcatgcggctttaaaaatacagtacattgtttctaaaagccgttatcatgtactgcggttctataaaaacaacaaccgcaagcattctatttcaaacgcttgcggttgttttgaaatggtggaggcgacgggagtcgaacccgtgtcctgaaggccattgatgacggcatctccatgttcagacgcatattgctgctttcgcggctgcttcgctatgcgtcaactaggcaagctcgctagttgcctgtggaagtctcgtgcgttgcgcggcaaccccgcattgcaccagcctgctgtgtcttcgtcgtcccctctagcaggcgttgaggttctgacgcggctgaactaattaggcagccagagcaaggtcgttagactctgcatttatttttttaatcggctttttagaaggccagccgattaaccttcacatgcagccagcaccgcagacttccagtcgaaaccatggcgcccccatatgtatttaccagtagagacaaaaaatcccgccgtgacgttcaggcaggaatcattttatttgctggcagtgatgcaagtggcacgcccgtagggattcgaaccccaaaccttctgatccgtagtcagacgctctatccaattgagctacgggcgctttgacttgcgtcgtgtaccgcgtaagcggtgacggaaatatagatttttcttcgggaaagtcaagatgtttgtaagatgatttgagaaaaaaattcatttttctctttttgggagaataaattttcagaaaaagaaccgttaattgaggggtggagaaaaaggggaaaggcgttgcgccatggaatggcctgtggcacactaaacggagaaaatgagcgagttcaaggtgatcaggtcgccgatggaggcattgaagaagtacttcggcttttccggcttgagggagggccaggatcaagtggtggcttccattatggaaggccgcaatgtattggtcgtgatgcccacgggaggaggaaaatccctgtgttaccagcttccctccttgtgccgggccggggtttgcctggttgtcagtcctctaatcgctttaatgaaagatcaggtggatgctcttgtcgccagagggattcccgccaccatgattaacagctccctgagttttcctgagcaaaaggaacgtttggaaggaatgaaaaggggagcgttcaagctggtatatgtggctcctgaacgttttggtcatgaagggttcatgcatgctctggcggaggtggatgtaaatatggtggctgtggatgaagcgcattgcctgagccagtgggggcacgatttccgtccggattatctgaagctgggaaaagctgttgaaatgatggggcggcctcaggtggctgctctgaccgccacggctactccgcgggtgcgggaagatattctgaaacatttggggctggatgatccggtgacgatcgtacgagggtttgcgcgggaaaacctgcatttccgcattactgcgtgcgatacgcacaaagacaaatacaagaggctgtacgaattggtgaagcgttacaagacgggtattatttattgctccacccgcaaaaaagtggagcaggtatatgaggctctttccgattttggattgagcgtgacagcctatcacgcaggcatgacggatgaacagagagaggaagcccagaacgctttcatgaaccgccatgcggatattgttattgccacgaatgcttttggaatgggtattgaccgtgcggacgtcaggtttgttgcccattttgagattcccggcagtgtggaggcctattatcaggaggccggccgagccggacgagacggggaggaggcttattgcgaacttttgttcaaccatgcggatttgcggacccaggaattttttattgaaggagtgaatccgggaattccattgattgtggagctgtacgagttgctcagaaagcattgcagcgcggaaacccacgatgtcatgtggtctctggaggaaatggcggagcgtctcaaatgccgcaatgccatgcaggtgggagctgctttatccgttcttatacgcaatggagcgatcagccgtcatgacgttccgggacaacgcgtgaagcttaccagagtgacggatccttccgtaagcggcttgaagattcctctggatgaagatgccctgcgggaaaaggaagtgagggaatgggaaaaactgaaggcaatgacggagttcgcttattcctccggctgccgtcagcaatggattttgaattatttcggggaggaagatggagtgccgtgcggccgttgcgaccagtgcctggctctgggcgttgaggaaggccaatccctgggagaagaagagactttggtggtgcggcaggcgttgagcgggattgcgcgcgcatccgtgcgtttggctgatggttcctggcagggaaggtggggcaggacgaaaatcatccagatgctcaaaggggcgaaaacccaggagttgttaagaacatccctgatccggctgagtacttatggcatcctttcccgatggagtgaggacgatatccgccagttgttccgtgctatgcagatggcgggattgaccagaatgagcggggaggcggaccgtcccctgattaccctgagtccgaaaggaaatgaagtgatgatggggcgcaagaaggcatctttggtttggccttttgcccgccggggaaaaatatccgtatctatggagcaggccagagttcggtctacgggaaatttggctgccctgggagagtttgacgaggatttgtttttgaagttgaaggagctgaggaatgaactggcacgggaagccgggatgccggcttatgccgtgtttcataattctacactggaaggtttggccaggttgaaacctaccacccgccgtggtgctatgaacgttcacggcattggagagcagaaagctgctcgttacttggatgatttcctggaagtcattgccgagcattgcggggtgtgaatttgtctttccgatttgctccaatcaggcgtacgccgtctctggaacgtggtgttcatgctgaactgaggaactatttttcatgaattacggaaaaaatgttccatgctttgcgaatatatttgccgggaaaatgcgtatttgtttgaataaattgttcatcaacatcaagttgtggatattttgactctttccagaaggttgttttcctgccctcatgggacaatcaaatgaatggctgtctatcccgatccagtagggtcgagaagattgcctgatcaatatttttgactgtattatttatgtattgacttcattttgggaagcgtgtagtctcctttccacacattacccaagacggagcggtggctgagaggctgaaagcactcctttgctaaaggaacgtactggcaaaaccggtaccgagggttcgaatccctcccgctccgccaaaacctttcttttttaagagcctgcactttaacggtgtaggctctttttctttgcaaaccaggggattagatgctggggaattatttgctggtctgattgtcttattttagttttttattttttcatttgaaattgaataacttaggccaaaaacgccggttaggatgcatagccagcgttttttctaatatccttattataggcatcaggataattataggtgcatttggaaaaaggtctggactggaggctgtccctgagggtatttgtgtgtgtgaatgatgatataaatttttgaatgtaagttagttgttgcaggagatggacaggataaaactgccgtggctggtaaaagtggagagtgcccggaattgaatggacacgaatgtggttcatgcgctggtctcggagtggttcacggccgcatcggatatgttaacagcttcaggatgtgtgggaaagtatggaacagccactccagaatgggctctgtctttttttaatctgcggaggatttaacggattttggaataatctggtgttatcaatggtcaagaccatgaataacaatattaaagaacatcctatccaatttgaagcagatatgattcgggcattgctgcaggaatacagcactcccggcgagcacaaaaatcaaacccgccgcacgtgcggcctgaaccagtttaatgatctccctgaagctttgaaagaaagagggtgggagattcaggaatttatagaagagtccggctcgtggctggctgttttcgaggaaggaagcggaaagttttcagatatttttatcccgtggattgaatgtccctacgggaaagttggcgaccgtttgtgggtgcaggaggagatttgccataatagccgttctggatggctttattctgctgatggcgtttgtttgccaatgtcatatccagacggatggatatcaaaaaatgcccgcaggcagtttattccttcgatccacatgccgcgttgggcttcccggattttactggaaattacggaaatcagagttgagcggcttttggacattacgacgaacgatgcacggatggagggcattgaatgcgtttggcacgatgaagaaacggatgcctgtttatggagggattactcgggaaaatctgcggggttggcttttgcccggttatctttcttctctttgtgggaaaaaataaagggaaccggttccgctgaactgaatccgtgggtatgggttattaagttcaatgtgttaactatcaacggaaatatcaaataaagaatgttaatgccctttgtgaagaacaaaataagaatatgtcttttacagagggttcgcccactaagcggagggaatagcctccgttgcaattcagataaaatccgcgtgatgtaatcaactccgttttatcatgaaaaaagcgccttccggcaagggaaggcgctggatatgaaaaggtgaaaaagagggaggttacatccccttgtttttcatggcttccgccagggcggctcccatctgagccggtgtcttggcaaccacaataccggcgttcttcaaggcttcctgcttagcggcggcagtacctttgcctccggcaacgatggctcctgcatggcccatgcggcggcccttgggcgccgtggctcctgcgatgaacgcggcaacaggttttttgcagttgttcttgatccattcagcagcttcttcttcttcagaaccgccgatttcgccaatcatgatgaaggcgtccgtgttcggatcttccgtgaagaattgcacggcctgttgctgggtcatgccatggacagggtcgccgccgatgccgatgcacatgctctggccaaggcccatgttggtaacctgccagacggcttcataggtaagcgttccggaacgggagacaataccgattctgccgggtttgaagatataggccggcatgatgccgatcttgcagttggcggaaggattgacgattccggggcagttcgggccgatgagggttacgtccttgtccttcaggaaggttttcaccttctgcatgtcctgcacaggaatgccttccgtgatgcagacgatgagtttaacgcccgcgtcagcagcttccatgatggcgtccgctgcgaagggcggaggaacaaaaatcatggaggcattgcagtccgtagcttttttggcttccgccacagtatcgaagacggggactttgctttcaaagagctggccgcccttgccgggggtcacaccggcaaccacattggtgccgaagtccatgcagtttttggcgtggaacgcgccggcgcttccggtgatgccttgcacgaccagacgggtgtttttgtcaatgagaggtgtcattgtcgtaataaatagtgagggttatttaactgccgcaaccgctttctgggcagcttcgtccaggttgtcggcagggataatggagatgccgctgtctgcaaggattttcttgccgatttctacgttggtgccttccagacgtacgacgagcgggattttcatatcgatgtttttcgccgcagccacaatgccctgggcaatgacatcgcaacgcatgatgccgccgaagatgttgaccagaagggccttcacgtttttgtcgctggtgaggatgcggaatgcgttggttaccatttcttccgtggcggagcctcctacgtccaggaagtttgcgggttcgccgccgtagtatttgatgatgtccatcgtagccatggccagtccggcgccgttcaccatgcagccgatgttgccgtccaggccgatgtagttcaggtcgtacttgccggcttccacttcgcgggggtcttcttccgtttcatccctcatttccatgatttccgggtggcggtacagggcgttgtcgtcaaaattgaatttggcgtccagagcgcacacgcggtcatccgtggtgactacaagggggttgatttccaccagagagcagtccagagcggtgaaaagcttgtaaacgttggtgatgagcttggtggtctggcggagcaggggaccggtcagtcccagcgccacggcgattttgagagcctggaaaggcaggatacccagcgccgggtcaatgtgttcgcggataatggcttccgggcgggtggcagccacttcttcaatgtccatgccgccttccgtactggccacgataacggggcattcccgggcgcggtcctgaagaatggcgaagtagcattcctttttgagatccacggcttccgccaccatgattttgctgaccagcttgccggtttccccggtttgcttggtgaccagaacctggttaagcatcttgccggcgacttcttccacttcctccacggacttgacgacgtggacgcctcccttaaaaccgtttttgaaggtgcctttaccacggccgccagcgtgtacctgtgccttaactacgtattgggagaggcccatgttccgggctgtttgtgctgcttcctgagctgtggcggcggcaatgcccttgggggtagccacgccaaaacgctcaaagagttgttttgcttgatattcgtgaatgttcatgacagtgggccgtttggccaaatgtttgcggaagaaaggctaggactatttttgatgtcggtcaagggagaatggtttggtcttttgattttttgtccggaggtgccgtgaagccctgttggaaatcaaagaggacagaaggcttgactgcgtgcttaaagattgggaaacttccttcccgtttttctgtagagactttttatgaaaatttaccgtccttccgatacctgctttgacgaaatgaagcgccggatgaaccgccgcgccctcccggaggattccgtaagggataccgtgaacgctattatccaggatgtttccgcgcgcggggatgaagccctttttgactatgcctccagatttgacaaggtacatcttgattcttcctccctgttcgtgacggaggcagagctggcggaagcggaggccatggtggaggggagtgtgaaggaggccattgccgtctctctggcaaatatccattatttttcagaccgcagccgcaggcaggactgatccggcgtaaatgcgcagggcgtggaggtggcggagcggttccttccgtacgaccgtgtgggcatttatattcccggagggaaagcgcccctggtatccacttccatcatgacgggcggttttgctcaggccgccggcgtgcgggagattgtggccgctacgccctgcgggccggacggccgggtgaatcccgcacttttgtatgcgctgaaagcctccggcgcgacggaaattgtcaagatagggggcgctcaggcgatagccgcccttgcactggggacggagagcgtgaaaccggtggaaaagatttttgatcccggcaaccgttttgtggtggaggccaaacgccagttggtgggggctgttgccattgatttgctgcccggacccagtgaagtaatggtgctggcggatgatactgcggatgcagagtttctggctgccgacctgctggcgcagggcgagcatggcccggacagcgtagttgtttttgtcactacatcagaggcgttattggagcaggtggatgcggaagtggaacgccaggccgccctgctgagccgcggatccatcatccgggaggtgctggacaagcatgcctacggttttctggtttcttccattcaggaaggggtggaactggttaatgcctttgcgccggagcatttggtgcttgttactcgggatgaagaggccgtgcttaatggcatcaggacggcgggcgctatttacgcaggctccctttctactgtagcctgcggggattttctggcgggtcccagccatacgctgcctaccggcggcgccggcaagtctttttccggcttgcgggcggaccagttccagcgccgcaccagcgtggtgcgcatgaaccgggatgccgtgctgaactccgccccgtatgtggcggagtttgcccgggtggaggggctggacgcccacaaccactccattcaggttcgcgccgcccgcgtgaaccggtaatcccggaattttcctcaatgctctccatgatgaaacagcagggaatcagggaacggttgcccgttgcagaagatctccttgttgccggacattgctatatgggcgtttcccggcatcatgggggtggagtgggggccgttgctgagagcatggtagtcggcttgccgacccgtttgcgagatttgtcgggatggaacgctcatcggatgggcggtttcatccatttgctcggaaatcccgcgtaatcgtttcaccgtattcctcatgttcaagtccctcatccgcacgtttgccattgtggcggccttcatcgcggggtacatgatgcccggcctgcatgtgtacagctggacattcaagtggatgctggtagtaatgctgtttgtaacctttctgggcatccgcttcaaacgaatgaagccggaacgggctcactggctcctgacgggggctaatctgatggtcgccctggcggcatggggtgtgtgccgccttgtttttggggatgggtatctggcacaggccgcttttttcgtaggcatcatgcctacagccacggcggctcccgtggtgatggggctgctgggaggctgcgtggagtttatgctgaccgcccttttgctgattaacggtattatctgcgccttgctgcctttcatcctgccggcggttgttgggcggggcggttttgagatttatctgaacgtggcccagaatatttccttggtaatgttatttcccctggctctggcattggcggcgcggcgcttttatcctcgcgccatcgcgtggcccaggaagttgaaagacgtcacttttggcatttgggtggtgattctggttttgatagccgcaaacgcctcttatgatatttcctcccgtgagggcatttcggaacgtgttttggaacagattggcgtgattgccctgctggtttgcggggtcaatttcgggttgggatatttgctggggggacgcacgcgcgctgcggagtgcagccaggcattagggcagaagaataccaccctgtccatttatctggctttgacgtatgccagccccattgccgctctgggccccacgttttatgtactgtggcataatttatggaatgcctggcagttgtaccgcgcgtccgaacgaaagcgcagggatggatgaggaagggggcatccggtgcggcggaagtccccggcagaattatggggatttccatggtcggaaaaacgggagggagggttcttttgagccggttcccagtgacggccggcagactgttgaaggttcttttttatccactttcaggaacggcagaggagttctccccgagcaaaaagcttgaaattcggggaacgcccggtaacgttatgcacttgttatgcaggcgtcttctcctttgccccctctgtctccgcgtaccaagtggctgattgccctgtgcttgtgcgtgcttgtgatgctgctggagttcctgacgtaccacatggcgtaccgcatcggctatgatgaagggatgctgactactccgccggtggtggtgcagaaaagcgatgaaaaggccatgcagaatttgtcccgcttcatggcggatgtttttgcttcgcgcgagagcctggccggcattctggacaaccgggaggaacgccttgcatggatcagggatccggaactgcggacagaaacggcctggggcctcacccgggagctgattagccggggtggcgtcgttcctgctcttcctgcggccagggaattaattgacgccggatacgccgccgggcgctatcaggtatgggctccccgtgcggatgccgtggcaaaggctctgttggcggagcaccagtacacttccgcctacgattatttgaaaaccgctgaggagggatatgagaaggaaggaatggctgagccgctggtgcggacgctccagaccatgagttccattgaccagatgctgaacaggaatgaacaggctaatatgttgctccagcgtgcggtggataccgctgcacatctggggccggatgccctccctgtcaggtccaggcttttagccgcccagggaaggctggcacgtactacggggcgcattccggaatcgcgcgagtatttcaagaaggctctggctctttgtcctcagccggacaagaccactggagacctggccctggccagcatcagcatgggggaggccatgttggaagccggcaggaaggatgaggcacgggaattgtttttaaagggcctttccggctcggaaaatgcctcttacctgttgaatgactgcctcaatgccctgcgcggcctggcccgtatttctacggagcaggggaattatgaggaggccctggcttatctttaccaggcggaaggcgctgcccgcggcgtactgccggcggaccatgccttttgggccgggttgtatgatcagagagggtgggtcaacatcttgcgcaaggcctctccggaagcccgggcggattttttaaaggccattgccaacagctcggcttctcccgtcatttccgcccagtcccgcgaagggctgggcaaggcatggctggatgccggggaggggggcaaggccagggagaacctggaaaaggctcttcagctgcggaagtcccatttcgcctcggatcttctgtccctgggccgcgtatattattccctgggacttgccagcgatatggcgggggacagggagggcgccctgactgcctatgccggagcggtggattctctgctgaaatgcgtggagggggcggaacgcagggatttgctggttcagtcttatttgtgtaaggcgtacgctctgtgtgacggagaacaatggaaagaggcggcagaagcttttgaggcggttcttcccatgctggagggggaacagaggtcggagaattacaaacagcttggacgctgttatgacgaactgggcatgaaggagaaagcggatgactgctggaaggaatccggttttccccgggtgcgcatggcatcccccgggcgcagaccctccgtgaactccagatcttcacggaggtaggatgcgaggggcttcgtaagacgttgcgaggcgtttattttgcttgatttgtgccgtctttttggctcaatgcctgcatgagttccgagcgccatttttccagtaagccctaccgccccgcacgcaagaaaaagtcttattggaagccattcctctttttggtcctcctgggaggattctggttcggctacatccagtactggcctacgatagaagggtggttcaagccgaccattcatgaggtgcacagccagacgcaggccatggggcatttgcaggatatgctggcttcatggaacggttccgatgcagagctggcgcagatggcatcctccgtggacaagcaggtggaatggatgaattctcccgaagccagagattcctttgcatggcttttggcggtggaaatggaccggcgcggcatgctgaaagaatccgaacctatgctggctgctcttctgggaaaaaagctggctgcttcctcctccatgacggcggaggacaatacccgccttctgggcgtcagcctgaactgggcgcgggaattcgcccgccgcaagcatgatgctgtggcggaaaagctttatgaagtgattttgaaaaatacgccggaagaccaggtttccatccgtttagcgtgcttggagccattaatccattatgcgtacgaccaggccaggtttgagcgtttttccgcgttgtgcaagcaggctgtttctcctgtcatgaggagcatgctgaataaaccggaggatgtgaagagcatggtgaaaatcctgttgcttcaggatactctgccagacaggaccaccgggttgcccggtggcacggggagtgcgattgcccgggagcttcttactaaatcccgcctgaccgccaatccggacatgggccgcattattctgaatgaactgaagatgccgctgaacacgcgccggaagtattcccaggaggaattgaaggccatggccgaccagctggaagcggctctgatctgcttccgagcagctgaaacggagatggactgcacgccggagacaatgcttgctctggcacgggtaaggatgcagatgggggatttgagagaagcctcccgcctgctgtcccgtgcagaaggggctgccatgacgcttggcgtggatgctccccgtattttgagcggctccagcctgagccaggatattgcgtccatgcggtcccagcttgaaaaatacagccaggcagaggctttggtgaaacgggcttatgaagatgtgaatgttgccgcagctttcctgaaggcgcgggattacgatcaggcggtaaagtatctggaacaggcaatgaaagtggctcgtgaaaataccacgtttgttcaggcacttcagccggtcattctgaatcttcaggcggagataagcgccggcagggaacaatgggctctgtcggagtcccaatatggaaagttgattgcggagtgggatgcgttgactccggaagataaggaaaaactccggaataatctggcctccatccagttgggagagctttacaatgaaattcaccgcaactgggctggtgtgtgcctcaagcaaaaacgaaccacagaggcccgcagggtgctggggaagataggagaggttccggctgaagaaccggagaggcctgcctcgcgccgacgccgcagatagcagacccttccttcagttaggccgttccttttttggaaaggaaaagttatccattggcagatgccggaggggctcagagttcccagaggctccggtcgggagcttgactaaagcgggatacctgcggtcagctgcgtgaggctgaaggggctttttaaggaaatgtgccgctttaatcccttgacgtcatcaaagagctttggcacaggttccgtttccctgtatcgacggatacccggcattccggagagaaagaatggattttaggccttcaacaagttatttgtctctttttggggcaaatgtaacgtttccggtatgattcatattctcaagcagagctgaaaaacagcttctgcagaaccttcagctgcggactttggctttctgtcttacatggctgagagcccttttcccatgaaccattttttcacggcggtcagctgcggattgacggcgggagcgcacagtatattttgcgaaaatttggctaaccgtaaggttgccctgttcgaaaagtttgaaaatattatctctcaccctcatggcttcctgaagcgctgcgtcagcgcccccgtattgagaatcggagaaataacgggtgaataaacgcttgttcttacagatcgccaaccgatagccctgaaaggccgttgtttcgtaagtgtaacgggtgatgtttttacaaggcatatgaacagaagttatgggaccgggtgatagaagcagtgataagcttctattagaataggttccatttcctgcaaaatccagaaaaaacacaatttgttagattgagtgcaaaaaatgcactactagatgcttgtggacaggttattgtggcgtgtcatccctgacataaaaacaaccgtcggaaacacggattttcaatttttcccctgcatgcacctggtttgtctgccggataagctgcttatcctggttttccaccagggcatatccgcggcgcagggtctgttccgggctgtgtgcttcaagacgtgcttgaataagagtgagttgtgaagataaatccgtcatgtgggcggcggctgcatgggataagccggcctgaagggaagccagaagctgtgtgcgctcccggtttctgtgggcggggtggcgcatttgcaactgatgttccagtttgttaatatgcagcgtattatgaaaaactctcgttgttgccgcattctgcagggtttcttccatatcgtccaggcgctgggaataaggagagagcagggaatacgcatccaacagcttcccccgcaggtaaacatccagtttcagcttggaacgcaagagggaatgccgagcggatgcatgaagagcctgttccattctggacagcttgcggagccattcagggccgtccggtgtggccagttctgcggctgcggtgggagtgggtgcgcgcagatccgctgcaaaatcggcaatggtaaagtccgtatcatgacccactgcggaaatcacgggaacggtacattcgtaaatggcgcgcgccaccgtttcctcattgaaatcccacaaatcctcaatggagccgccgccgcggcctacaatgagcacgtccacgggcgggagaccgttgaagggcgctccggaccaagcgcgcacggctgcggctatttcgtgctccgctcctgctccctgcacgcgtacgggcagcagataagccttcacccacggggcgcggcgttccaatacgtgccgtatgtcctggatgacggcgccggtgggggaggtgacgatgccgatggcgcgggggaacgtgggaattttctttttgtgttccgcgtcaaacaacccctcgcgctggagtttggctttcaactccaaaaagcgagtctgcaaatctccctgtcctgcagcttttacctgcctgatgaccagctggagttgcccccgatccgggtatacggtggcgctgcccaggacatggactttcatcccttcctggagccgtatggggcatttggaagccgctgccttgaaaaaggcgcagaaaatttccgctccctgttccttcagggtgaaataaacgtggccgctggtgtgatgcttgacgttgctcagttctcccaccacccactgggtgcccacagcgatgctgaccgtgtccctcaggcggtaaacgagctgtttgactgtgatgggtttgggcgcggtgggcgtttcctccgggaattccataaattacggttcaaaggggatgttcagcgcttcatacgccagcatcctgcattgcttgatatccagcttgccggatgggagcaccgggatgcgttctacgggaataatctccttggggcaccagagggccggcagcccctggtcaatcaggccgtgcctgatgagggttcgcgcctggtgcacgtaatccgtcaccagggtggtgagcagggctacggcctccccttttacggggtccggaatggtgacgacggctatccgccgttcttcgtccgccggatccagattccaaatgttcataatggctgcttccagggcttcatgaggcaccatttccccacctattttggaaaagcgggaaatgcgtccttcaatcttcaggaagccgaattcgtctgcggaacctatgtctccggtttttagccagccgtccacgaaaatatcgcgatccgtctccggaccgcccagatagccgggaaagatgttcgatcctttcagccagatcatgccagaagtagtgatgggaaccacgcgtcccgtgtgagggctggtgatgcgtatggcgattccgggaaggagggctcctacggaactctttttcatgccgggaatgaagtctccggcggcattggatggcgccgggtcaatgaagttgacggaacagacgggagaggcttccgtcaggccgtagccttcgcatggaatgatgccgaatttttcccggaaagcggcggaaaggtcttccggcagtttttccgcgccaacgatcaggtagcggacggttttaaaggtgtccggttcgcagcgtttcatgaaaccgcgcaggaaggtgggcgtggtgactaccagactgattccgtactgcttgataagggctcccagccgtttggcctcaagaggggatgggtaggtgaccatgtcgtacccgccgatcatcggataccatagcccgatggtgatgccgaagcagtggaatacgggcaggcttcccagaaacctgctttgcggttccagcgtaatgcgggaggaacattgagagatgttggaaagaaggttgtggtgggtcagcggcacgcccttgggttccccggaagagccggaagtgaacatcagcacggcttcgtccgcgcctgtaggcgcgtccagccccagttttttaatcatgaaccccgctgtcaggaatttgatggcgaggccccagcgtttggcggaacctttaagcaggggaatttcccgctccatgaggatcagatcccgctgggggggccacgggaaattctggagctttcgcatgaaggtatccgcagtaataaaccagtccacgccggattgctttacagagctggcaaaggctccttccgaggcggaataattgaaatttaccggtgttttcccggcgaacaggcagcccagattggctatggccgctcccttgcccggcggaaggatgatgccgacccggcgattcgaggtgatttttttcaacctcttggcaaaggctacggaaatggccagcagctggccgtaagtcagcgtagtgtcgtcaatgccgtcgatgacccggcaatcggaatgaagtttgaggctgcggaaaaggagggcggacagggaaccgtggagctgaggcagcgtggcgtatgcctgggcggaacattccagccacgcggaggtcaggcgtgccgccatctcggccccgggggccagtttggggagaatatgtatttggatgtccgcctgggcgtccgtatcggcctccgcatccagcacggagttcgtgtaaaaaccggcatagacgggtacgggggaaatatgcagggcttccagggccttgatgacccgcggaggaatttggctgatggaacctttcacatgggagacgggaccgggcagaaatactactcttctgccttcgttaatgcgttccatgatggcggaacgcagcgcgacagggtcgctgcctccggcctggaacaggatgccgtccgctttagtggattccagatgggaggcggtggccgtatccggggggagaccttcttccaccaggtaggtcatgcggtccctgcccagttctttttcgaacatcagtagggttttataagatactttgttgaagatcaacagatcacctgagtcggataaattggaggaaccaaaaatggccatgggaaaaggataaaaaatttgcttgaagcattttagcaacttgaagagccgggagcaaggaggaaaggtgcattcccggttgcttttcctttatccggaccggtcttggaagtctttcccctctcggtacgttttttatgggaagagtgttgtttttcatgggattgcctggatttggcgttatctcctgcgaaggcgtttccgcaaaccagctgttccgatatttacttactgatgaatgggcctggtgggcagcaacatcttcggacgagaagcgctggcggaaatccgagtaaacgcggcgcaggacctgggagaccggaggggggaaacgaacgtctctctgctgggcaaccccggctttgcgcaaagcgtgaggggggcgaaagtgggaacgacggcgctgcagctgggagccggactgagcgtgcctgtaggaacgaagggaaccatctacgtgaacgggaacgcggacatccgggacggggctgctcagtaaacgggacgtatcagctactgctacgatttctggtctttgctccgaacttgctgcgggcaaacaatacaccctctttttctatgtatgaaaggtgaaattcacgaaaggtgttattttgctgcatcgtttgttcaggaatagggaagggatgaaaaataatttttgcgtccatttttattttcatgtgaaatgttgcattgcggattagcaatccgcagaagcattatccagaaaatagaccagaatcagatatttttgatgtttataatgaaagagatatggaatgtttttttaaaaaaattctgaattggatattaagaagatgatgatttcctggtatgcaacatgcattggatcaatgttgaatattgacggcggattgctaattcggtaatagctatatattgcaaacagccaatcaggacggctggatagctttattatttacccatatttgcaagttatgaagttacgtctaccgctcaagttgttgtccgccttattgtcgttttatgccatatcctgttttcatgtgttcgctgctacggagtgggacggcagcagatattccggtaatatctatacgtgggtagggagttcgtccaatgattttcataacggcggcattgtcctgaccaatccggatggaacatactatcctgtcaatacgaattggggttccgtttcagaggagggaagtatttggaacctttttgccaatgaaacgggactgtcggaatataacacattgcgctttgtcgcatcaggcacggaagtgggcgatgtcaccgtatcggcgaccaataaaaatccatcctgctcctttacgccatttaccatggggggattgattgtggaggaaggggcatcagggttctcccttgtcccgaacaataatgcccagaggactcttatactggggagagcgggtacggaagagccggtattatttacggttcgtgaagatttttccctgggttcttcctccaatgcatggggcccggttaatgtgaatgcagactggaatgtccttgtggcaaatggcaagacgctgaatgtttacggggcactgaattcttccggacggaccattacggtgggcggggaaggattcagcggtacgttggttttaaacaatgcggccaatgcatccatgactgctgaatgggtcatcacctccggctctactgtaaggtgcatgaataattccgctttgggaagcggccttgttacgctggatggggggacgcttgattttaactcgcaaacgatcggatcaaccattacgttgaacatgagcgggatcgggacattgcagaatgtgacagttgatggagcaattttatcttatacgtcttcatcgggaaatgatgggattactgcttcaaataccacgtggacgtccgggaagatagatattgggcgtttgttgcagggatttagtgccgaaggttccaataccgttgatttgggagtggagcttggcgagggctttagcgtactaggcttagatacagggcaatatagaatagaaggcagcgtgctgacgatagaagacggggcgatatccagcgtgacgtgggtatctgcgggagaaggaggggaattggaagaaacggtcaagaacgcctttacgctggctcttggggaggggagtgcggccaacgtcagcctgggatatctgaacgggatcctgacgaccagcggggacaaagtctatcaaatcaccaacaccggcggaaccaaaatcaacctgtccggggtatacaacagcggggcgaccctgccgtccggcaacctcaactaccagggggacatctggatggacatcaacggaggagcattcggcatcatcgccggaggtgtcaccaatgaatggggcaccaacctccagaccagcacgctgactggggacacccatgtgcagctctctggaaacgccacggcggaacacgtcatcggcgggaacaacaagggagcaagcactaccctgacgggaaacaccaacgttaccgtcaaagataacgccatcgtggcgggagccatcatcggaggaagcacctcctcccacaatgccgtcaccaccatcacaggaaacacgagcgtcctggtcaccaacatccagcacagcaacagcgcgaccgtcaacctgggagacttcggcaacgtcacagcccaaaacttcatcacgggcggaagcgcgtggacggccaaccagacttcaggaacgaccatccagggcaacacctcggtaacgattaatgtaggcgatgcggaactctccggcacggaagggcacaacaacttcgtcaaaaacatctatggaggcagttacgcaaacacgaaatccgagggcaacggagccgtacaaaaagtggaaggaaactcaagcgtctccatcagcggaaaagaaggaatcaccttcacgggagacatcatgggcggctccttctggaactggggcaacggcacgacgctgaccaccaacggaaacaccagcgtctccattgacggaggctccaccttcacgggcaaaatcgtgggcggctcctggagaggaagcacatggacggcggaagatcccacagccctgcccgtcagcattggcggcaacatcaccgtcacccttggacagggcacctacctgggagacatctacggggcgggcaactgtggcacggtaggaggcgaggtccacgtctcgctgacgggaggaagcatctttggggaggaaggagaagaaaacggcatcaccatcggcggaagcgcaggagcggcggtagaaggaaacaggacgctggaactcaagggaacctttggaaccggggacttccaaaacgtcaccttcacccggtttgatgaaatcaatatcgcgcaagaaggagcctcggccaccatctacgcgctgaccgacagcccggccctgaccaaaacgggagcgggaaccctgacactcggggcggacgcggcaggagcggaaaccatccttgacggaaccacggaaggaatcaccatctcggaaggcagcctgaacctctccggcgccggcggcagccatatgaaaggaacgtggaatatcgcctccggctcccgtctcaccggagtcagcggaaccgtaaccgtaggagaaggaggcctggacggactgaccatcgccctgggaacggaaaacatcggccaggacacgcaggcgtctggcgccgtcatcagcaacggcagcggaacgggaagcgacccgaacctgtccataaagggggaagggctgacgctggacctgagcaacgacgccgtcgtcaaccttctgctggaccacaaaaccgacgactcctccagctacctgaccctgaccagcggaacgctgaccgtcggcgacctgggcgacatcgccttcactaccgaccttctgtccaactacggcatccgggtcaccggaacggacggaggcagcctggtgctcagcggagcggccaccggcctctaccgcgtgcaggaggaaggaggaaacgcccatgaagtcaactcctatcaaacgctctccggctacgccggcgtcgtcatcggcggcggccagaccctgacggtcaacctggccggagccccgggcgaatccgacggacagggagctaaaatcaacaacctgatgggagccacgggcagcagcctggtcgtcaacaacaccggagacggcacggccgtcgtcatcctcaacaacaaacaaatgacgacgggagaagacgacatcgacccggccggccaggacaccgtcatgggcggcagcatcacgggaggcaacaacgtcgccttcatcaaggaaggaaccgggacgctgacggtcggaggaacgatggacgtggaaaccctcgccctgcgtgaaggaaacatcgtcctcaacggcgcgtcaaacaccctggacaccctcactctggaaggaggcggcctgaccattaacggcaacgccgaagtcggaaccatcaccggcacggaagccggaggctccctgaccatccagggaactctcaacctgaccggaacaggcgaaataaacgacggctccatcaccggaaccggcaccctccgcatccaggaaggagcggaactggccctgggcggagaagcccggctggacggaacctcagtcaccgccgacggcacgctggccctctccggaacggaatccggcaccatcagcaacctctccggcagcggcaccctgtccatgaacggaggcagcctctccatctcctcggcaacaacctcctccggaaccttctccggcacgctggcaggcagcggcaccctggacatctccgggcaagccacccaatacctgcaaaccggcaataaggactacgacctcgccgtccgtgacggaggcgtcctggtcctgaaaggcaccgcggacgcccccgcgctgaactacaacagcatcaccgccggaaacaacggcaccctgcgtattgaagccaccggggacgcccagggcagcgccaacaccacgctcaacgtggaaagcatcaccttccagaacggctccacgacggaactgatctacaacttcaaccaggacgccccctttggcgcccccatgctgacggcgggcaccatcaccgtgcaggacggagccggcttcctcctctccaacatggaaggaaacgccgccatgaatgcggggagcgacctccatgacgtcgtcctgatgagcgctaccggcagcatcagcggcctggaagacgggcaaagcctcgccgcccggatatccggcctcttcgccgtctactaccaggacgccacactgagccgcgacggaaacgacatcctgctcaatgccacactccggcaggaaaacctcttcgcctccgcggccgacacgtggaactccgccaccggagccagcctgctctgggaagcccgcaaaaacctggaccccgactcccagctggcccaattcatgaacggcgtcagcaccatgatcaatgacggcaacctctccggagcctcccgcgccatggcggcggcagctgggagcacggtcaacgcgctggggacggcacagagggacgccctgcgcgaccagatgggctggatcaggaaccggaccaccctcatgggcgtcaacccggcctacgtcaacgacgacctcccccgcttccacatgtggatggaaggcacgggctcctacgccaaactggacacccgcggggatgaaagcggctaccagctcaccacctggggaggcacggtaggcatggacgcggacctcagcgaccgcctcacggtgggagcggccttcacggccaactacggcgacctgacggccggcgcggcggacagcgccgacgggcacctggacagctactacgccagcctcttcggccgttaccaggacaggcgctgggcgcacacgctcatcctgacgggagggtggaacgacgcgaaactcaaccgtacggtcaactacggggaaggaagctacgggacgcagggaagcaccagcgggtggggctttggagcgatgtatgaactcacctacgacgtatacctcaacgaaaaccgcagcagcgtgctgcagccgctgttcaacgcctcggtggtgacgacgcggatggacggctatgaggaaacgggtgcgggcaacgcgggcctgaacgtcggcaggcaggactggacgacggggacgctggcgctgggcggccggtggatggggctggtgggcagcaacatcttcggacgagaagcgctggcggaaatccgcgtgaacgcggcgcaggacctgggagaccggagaggggaaacgaacgtctctctgctgggcaaccccggctttgcgcaaagcgtgaggggagcgaaagtgggaacgacggcgctgcagctgggagccggactgagcgtgcctgtaggaacgaagggaaccatctacgtgaacgggaacgcggacatccgtgacgggtccagcgcgctgaacggaagcgtcggctaccgctacgacttctaacaagagaaaacacaaggagggggcccccacccccgaaaggctttcctcctgaccctccagagccgctccggaattattccggagcggctctgttgcttaggggaatcccgctaagccgatacggtgcggggaggtagtttttacaatatattggaatgatttttattaaaattgtttttttcaccgcaatcgcttgaattcgtaaagcggattaaaaattcgccgtgtaatgggaaccgggccaatataccagagttgccccgcctgtttgcttatactgataaggatagaacgatggatgtccctgattccagaccagataaagcatgaaaatactcttctggatgatgcgcaacacctacggaatcaatgtttaagcttgtaggaggatttttaatccgctaatgatggtaaaaagcctcctgtcagtttcgggaggaattttcacgtacgcccttttaaaaactatgaagttgcacctccctttaagtcttttgtcctccctgcttgcctgcatggctgctgtttcctcaccgcatgccgttgcggaaacctatacatggctgggggggacggtggatgttcatttgaatactaactggactccggattacggcagcagcaactggtcggcaacatgggccggaacggcgacaaacagcatgcgttttgatgcgggtagcatgacggggcaggtcaaggctctccaggcttctttcaatacgctttcacttgggggaataaccgttacggataattccgatggattcagtgtttccaaaagcaacggctccaaccgcaccgttaatttacgtgatggaggagaagggtatacgctgtttgacataggcggggatttttctctgggagttgccagccaggtatggaacggagttgttttcaactccagcgccctgtttaacattgcctccggcaagaccatgaatatttacggtggtctgggaatggctggaacgggagccaggacgatgacggtgggggcggacggttttgcgggaacccttatcctgaatacggctgcccagtcttccatgacggctgattgggtcatttcccatggggcgaccgttcaactgaacaatgccgcggctttggggtccggatcggtcagcttaaacggcggcaatataacggcccagcacgatgctgtttataacaatgccctggccgtgagcggttcttccggcatgaacgtgaatgctgccacgcggtttgccagtgtcagcctttccaatgccgctgtcctgaacatgaacggagggacgcttggcattgcgaatgccggcgttttgacactgggttcttcaggtaccattacggggaatttgacgctgggaaacgcgtctcttctgaatttttccgctcttccggcttccggagcatatttgcttaatgtaacaggaacgctgaccgtgggcagtgaattgcttctggggcagggaacgatggaaggcgtagcctggacggagggttcctacagtctggttcatgcgggttccgtagagggagtccctgccagctctttcgttctgggcgacaatcttctgggttcatggagcacggaaaacaataatcttaccctggttgtggagcaggtagctttgcttgaatggaaaggcggcgacgggatatggtctgtaactgctccggcttcttcaccgtggaaaaatgaaggtgtgtacaataatgcttccggagtggtcatgggagatattgacggaagttctctgcaaacagtaaccattgatggagttgtctctccctcaatcatgatggtccaggcggatacgacggattatgtgtggaatgccgcagatgaaggaggtgctctggaaggcagcggtaatctggagaagaccggcagtgccaagctgaccattaatatggataatgctgattatgccggaaaggtcattttggggggtggaacgcttgaaatggggaatgatgccgctttaggcacaggtgatctggcatttgacggcggtaccctccggtatggaacaggggtaacggcggatatttccgggcagatttccacaacgagcaaaagttccgtgaaggtggataccaacggtaataacgtaagctgggcttccgcggatcattacaaggctctgaacttggaaaagtccgggaacggtgtgttgactctcggcggcgccgtgtatacggggggcctgacagtagatgaaggaggcgtgtccattacttccggcagtgttcaaacgaagttttctgcgggagtcacggtaaatgcaggagggacgcttgccatttccagcaccattaacggaatatcgaccggagacaacgccaatatcgtcatcaacggcatgagcggagcggggcggattgagctggacaaccaggctgccaaatcccgtttttatatttccggagataattcttcctttaccggggaattggtggcgaccggactgaacaataatccgggaaatacgaatgatgcacgcgatcttcagtttgccactgctgccagtatgggaagaggaacggtaaccctgaatggacgcgggttctggctgggaaccgccaattcggcggataccgccgtcatggcagcaatcaatgttctggagaaaggttcctatctgaacgggggaagcggaaattcctattactttggcggggcgtttaccggttccggcaccatgaccacggctctgggcaatgcgttcgcatatttgacgggagatatgaccgggttccagggagcattctcccacacgggtgattccctgtttacctgggcattcggcaacaatacggaggcagttctgaatgatggaaagcttttcggggatggagtggttttgaaggctgacggagggacaagccagtttaaattctcctacaccaacgatattatactgatgaacgccactgtaggcgcagaaggggccttgaacgccagggtggaacaggccggaaccggaacgctggtgctaacacaggacaatagcgcgacgggaacgctcaccattaccagcggcacggttcagctgggcaatggagaggtttccggctcctggacagggcagattaccggagcaggggctctggtggtggacaggtctgcaggttcctctgctctggaactgaactccgccaacgattatcagggtggaactacgctgaacggcggcactgtgaaggcgttgggcgccggttccctgggaactggcgatgttttcgtcaacggcggttccatcctggatatgaacggacaggcgattgccaataatgtcgctattaccaaaggagggctgcaacatgccggggcctacgccacgtcgggcggcgtaaccgtaaatgcggaggctgattccggggacattgacctgggaggcctgtccggcgacaaagtgggaggcatcaataccaccacggcgggaacggccattaccggcctgacgggaaatttgacgctgacggggaataatgccctgcatgtgggggtggaaaataccacgtatgcctctgacggagaccagaaaagtctgattcagttcaatgatgcggctacggggactgtttctttaggcggagattcttccgatctcacgctgcacatggatattgatacggatatcctgattgccatgcgcgaactggattctgtcggtatcctgctgacagacgggacgattaccggattgccggacagcggtctggtggcgtggctcaaccagcatcttacgtttaatgccacactggaaagcctggggttcggcatccagggagtggatggaggaaacattatcatttccggaagaacggaccagatttacattgcttccgtagacggttcctcagtgacggaaattccggctttgaattcctatgctcaggtgattgttgataaggatctttctctgaattttgatgttcccgcatctaatacggacaagaccatcgttcgtcatctttcctccggcaccagcgctactggcaatctggcagtgaatgtcgccggagaaggttccttgaatattgaactggccaacgatttggacgattccgtttttaacggaaatcttatcgtaaacggaaacggtgcggacctggtcaaaacaggagaaaagacgctggtattgaatgggagtgtcagtacatccaatgcagtgattgccaaagaaggcacactggttctgaacgggagcgtcaacaacatcggcacgctggctttggcctccgcttctgcagatgcaattgcgcgtaccgtgattggtgggactgtcacagccactctgtcggatgaagatgaaggcggttccttggagattgctgcggggggaacactcaagaccgccggagattccgtcctggaccaggcgacctccatttccggagcagggagtttgaatattcaggaaggttccgccctctccctgacggggaaagccggcctgtccggaacttccgtgacgctgaacggaacgctgggtctgttcgggactggggaaaaatccatccagtccctctccggttccggaacgctggcgttgaacggcggcactctgtctgtcacttccgcttccgccagaaacggttctttctccggtacgctggatggagagggacgtattgacgtatccggcagcgtaacccaggtaatgcagacaggaagctctacgtatgacctgggcgttcatggaggggggacgctggtattaaaaggcacttctgccgcccccgcgcttgattaccgtaatgttgcagtaggttctgccggcaccctgcgtattgaagccattgggcatgacgccggagactccaatacctccttaaacgtcggcagcattgattttcaaagcggctctacgacggaattcgtttataatttaagtgcgtctgatcctttcggctccgctatgctgacggcggattccatcaccattggaaatggggcgggattctctcttgccaacatggaaggcaacacggggctgggaacgtatgacaacctggacggcgtggtgctgatgacagcggacacgattgacggactgacggagggggaatccatgtccgtggggacttccggcctgtttgccgtttattacaaggatgcgaccatgagccgggagggcaatcatattgtgctgaatgccacggtgcagcaggacaatatttttacacctgcggtgaattcccataattccggagcaggttccgaacttctgtgggaggcaaaaaataatctggatgccacttctcagcttgggcaggcgatgcattccatcagcaccatgattacgggagataatcccgacttggcgggggcatccagggctttggcagcagtggcagggagcacggtcaacgcactggggacggcgcagagggacgccctgcgcgaccagatgggctggatcaggaaccggactaccctcatgggcgtcaacccggcctacgtcaacgacgacctcccccgcttccacatgtggatggaaggcacgggctcctacgccaagctcgacacccgcggggatgaaagcggctaccagctcaccacctggggaggtaccgtgggcgtggacgcggacctcagcgaccgcctcacggtgggagcggccttcacggccagctacggcgacctgacggccggcgcggcggacagcgccgacgggcacctggacagctactacgccagcctcttcggccgctaccaggacaggcgctgggcgcacacgctcatcctgacgggagggtggaacgacgcgaaactcaaccgtacggtcaactatggggaaggaagctacgggacgcagggaagcaccagcgggtggggctttggagcgatgtatgaactcacctacgacgtgtacctcaacgaaaaccgcagcagcgtgctgcagccgctgttcaacgcctcggtggtgacgacgcggatggacggctatgaggaaacgggggcgggcaacgcgggcctgaacgtcggcaggcaggactggacgacggggacgctggcgctgggcggccggtggatgggcctggtgggcagcaacatcttcggacgagaagcgctggcggaaatccgcgtaaacgcggcgcaggacctgggagaccggagaggggaaacgaacgtctctctgctgggcaaccccggctttgcgcaaagcgtgaggggggcgaaagtgggaacgacggcgctgcagctgggagccggactgagcgtgccggtgggaacgaagggaaccatctacgtgaacgggaacgcggacatccgtgacgggtccagcgcgctgaacggaagcgtcggctaccgctacgacttctaacaagagaaaacacaaggaggggggcccactcccgaaaggccttcctcctgaccctccagagccgctccggaacaactccggaacggctctgttgcctgaggaaaacccctgggggcggcccggatgggtcaaaaacaaaacagcggcaagaaaaaaaaatacgccgtccccacgaaaaccatggccctttttcccctcgtcccctcccgtgaaacgcctcatcctctcctcaaatctgtaaaaacgcgccaaatgtttccggaagccctctccgctgtccggagccggaaaagaacggaacgcgagcaatagggacttttttatgcgatttcagcggttttccattccaataccgcttccgcccgcagttcatctccgtgcatgaggtggtgggaggtgagggagtcccggaagaacagcagggatttcatggaatctcccgcatgggtttcttttctgaaatgcaggtgaattcccgtcagttggtggttctttagccaggagtccggaagggagtccagagcccagaccaggtaggcggcattgttgatgtggcggttgaaatccgtatcccggcgttccgccgtccattccctgatcatcggcagaagtcccgaaatgtccatggataccggagccaccgtttctttgcatggggtatccgggaaagagctgatatgcctgtttaatggcacaggacgcctgcggcgtatgtcaatgacagcccacagacagcttgctgcaacgatgcagttgccttgggcatccctgatttccaggttgcggcgcgccagcagaggcgtttcctgggccgtccaggttcggagttccaccgtttccttccaccggggaaggcggctgacggccgcatccatgcgcacttccacccaagccaggctgcgggacgttacgaaatcatagccgaaacccaggcaggaggcatgggcttccgctatttcctgaaaccagtgcagaaccgtttccggtttcatcaggccattcgcaccgctttcgtaagtgcggacggttgcctgaacggaatagatttccttgttgctggcatgttccataacatcttatgctagcggagccgttctttcggagccagtcaaaaacgggtaatatccggctgtttggcatgccgcctccccggtaaatgaatggccccgtaatttccgggctgtcggcatgcaattgaaatcctttcagcagccgctgaggttgacttaccttatttctagagaatgctccggaaataggcgatggtcttttccaaccctttttccagcgtaatatgaggcttccaccccagtttttcttttgccagccgaatatccggtttgcgctgggtcgggtcgtccaagggcagagggcggaatactgttttggaagaagagcctgtcatttcaatgactttttccgccagttccagcatggtgaattcctctggattacccaggttgaccgggccggaaaaaccttccgtatccatcatgcgcaccatcccctccaccaggtcgtccacgtactggaaactccgggtctgtttgcccgttccgtaaatggtgatgtcttcccccttcagcgcctggacgatgaagttggagactactcttccgtcgttagggttcattcgcggtccgtaagtgttgaagatgcggatgatgcgaacgtccaccccgttcatgcggcggtagtccatgaacagggtctccgcgcatcttttgccttcgtcatagcaggagcggacacccacggggttgacatttccccagtaggtttccggctggggatggaccatgggatctccgtatacttcgctggtggaggcctggaggattctggccttgcaccgtttggcaaggcccagcatattcagagcgcccagcacggaggtcttcattgtgtggatggggtcaaactgataatggggaggagaggcggggcaggccaggttgtagatttggtcaacttccatgacatagggaacggtaacgtcatggcgtattacttcaaatccgggataatccgtcaggtggaggatattttgtttgctgcccgtgaagaagttgtccatgcagataacttcatggccttccctgagaagccgttcgctgagatgggagccgatgaagccggcgcctccggtaatcaaaatccttttgctcatgatggcatgtccatgcgtttgttcgttccgccgcgccggaagggaagcaagcggaaagttttcccctgtccgtgcgttgcggttcaatgtcacatatccgtcacgggaaggcaagcgcatagcatcccggacgggatattacagggatgtccgggaaaggcaggggaggaaccaggaaggtttttccgtacgggcctggaggcgaattccggttggttcccggctgtcccgctggcaggttcaggatttgggaatcgtcagcagaaagctggctccccccagggtgccgaattccagtttcaggtctccccccagggaacatgccgtatcccttgccagcgccagccccaggcctacgccgggtttccggctgttggtagcgtcttttgtgcgccggaagggcttgaagacaagcttgcggtttttcggggaaattcctgggccgttgtcgcggaagcggatgacgatgttgtggcggtccgcctggacggtgagctggactttggcgttttcccccttggcgtatttaatggcgttggaagtcaggttgtccataatctgctctacggaaacggcatccgtatgaataggaaggatgcggatgggctgggccagggcaaaggagaagctgatgtccgcctcccggaggcggcgttctattttttccgcaatgggttcaaaaagctcctgacaggtgagcgtgtcccgcgcgcggcgaatagcgttccgctgaagccgggagtaggagagtacgttttcaatcaggtgttccagacggcggcattcccgctgcatgttggcatagtattccggctttttctgttccggcaccatgccgtcttccagcatttccgtgtacagggaaaaggacgtgaggggcgtccggagttcatgggtgacggcggagacaaagtccccgcggcgctgttccaggcggaaggttcccagcatgagccagatgaccccagccgcacccagaagcaccatgctccagatgagggtgagcgtccaggtcagcatttttttgtggtcctgaagaggaacggctccggtgtctcccggaaggaaaatcaggggggcgttggcaaaggggagtgcgcccgcctgccgggtttcctccgggggcggggaggacgggtcgaaggttgccaggcggctgtggggaagcagcatctttacctggccgggcaggcgtctgttcaggttgtccatgttcatcagggccccctgcaaataaatgccgcagctggtatgcacctggcgcaggatgtaaaggttccctccgtcttccacgggaacgaaggaagtgacagtttccacttgtgccggaacgccagatgccgttggctccggttccggagattcatgcagaatttcattccggatatccgtccagaggtttccgctggacggaacggaggtaagggaggagaccttgccgttcagccgctggtaaaggtccttctgttcattcagccgcccggcaagctccgggggaagagcggggccggttacgcgcccggcaggggaaatctgaatgaaggctgtaacgtagtccggcaggtaggcggcgagattggaaccacgggttgcttctccgggggccggggcgcccatcctcaggtcataggggcgtttgtaggcgtaaacaggctggtattcaaaatagccgcgggcctgttcgaatgtgatgaaggaggtcagaaggcggtgcatttccagcttggcttcatgggccagggcttccaccctgatacgctgttcggaatggcctgtttcttccgcctgcaccagcagaacatgggtgagccatccgagcgtgccgatgaccagcagcaggctgattgccagcagaatgatgcgtatgcgccggttcacggatcaggaaacgaaggatgaatctcagcggtagccctggcttctaagcgtctccaggggggaggcggaggcggccccgagcttgtcccggagacgcatgacggtcatttccacggagcgcgtatccgtcaggcgcgggtccacgtcccatacgcgccggagcagttcgtccctcgtgataacgcggttggggtgggtggccatataggtgaggaattcgaattcccgcgcggtcagggaggtttccctcccgtctttaaaggtgatcaggcggttggcgctgtccagggtggcgccggggatcctgatttcccggagctggcgcggccgttccggagacctgcgcagaacggcctcgatgcgggcgagcagttcccggatgctgaacggcttgacaatatagtcgtccgcccccagcttgagcccctgcacgcggtcttcctcctctccacgggccgtgagcatgatgacaggcgttccggggcgttcctcagacatgacctgcagcacctggaatccgtccgcgcccggcatggccacatccagcagggcgaggtcgaaattgcgttcccgcacggcatggatggcggccaggccttcttccagagccagcacttcgtagccggatgcggtcagaacgtccgtcagggcatgcctgatgctgtcgtcgtcctccgcaatcagaatggtataggctgaatcactcatcgtttgattctataaaaccacaatatttcccctgttgtatagagaaacctgcgccctttcagtaacaatgccataacaggccgtcttcccgggggggcctcagtgatgccggagttcccggaaggggggaggaaggctgccggagggaatttcaatggcctccatgggactggggacaattccttcaaagaacggcgtgcctttgtaggaaaggatgattttggaatgcaccatgccgcccgtagtctggcgcaggaaatccgcatcccggaagaccaggagcgtctttccgttttccccgggtacaggacggcactggaagtcgccaagcggtgttccgtcagccgccgtcatctggacgggcagtatataggcttccgaaaaagaaggagcgtaaacaccccagaaggaagtgagcgccataacgacgacgatcacgatgccgacaatgattttcgtggaggtggacatgcggagggcggtgttctgacccgtacgtccacctccggtacggtggccgtgcggcgtcagcgttgttgaagccattcggcggcctggggggcgtaatacgtaaggatcatatcggccccggcgcgccggatggatattagagtctccagaactgtttcccgttcatccagccagccggaagctgcggcggacttgatcatcaggtactccccgctgacatggtaggcggctatgggaagggtcacctgcttccgcatggcggccataacgtccagatacaatgtggcgggtttcaccatcaggatgtccgctccctcagcttcatccagctgcgcttccctaagggcttcccggatgttgccgggatccatctggtaggtttttttatccccttccttgggcgcgctctccagagctccgcggaacggcccgtacagagcgctggcgtacttggcggtataggccatgatggagacatcgtccagggcttcggaatccagggtggcgcggatggcggccacgcggccgtccatcatgtcgctgggggagacgatatccgccccggcatccgcgtggcacaatgcctggcggcagagaacctccacggaatcgtcgttaaggatttccatcgttccgtcggagcggaattccaccaggccgtcatggccgtcggaattgtagggatccagggctacgtccgtcatgacggtgatgcccggcacttcgcttttgagcgcgtaaatggtgcgcgggatgaggccgtcagggttgcaggcttcgcaggcgtccggcgtttttttctcatccggaatggctggaaaaagatccagcgtccggatgcccagatccatcaggcgcttagcttcctccaccagtcccttgacgctccagcgcgtgcagcccggcagggaggggatgggctggttcccggtcccttcatggacgaagacgggatagatgaggtgttccggggaaagggaggtttcccggataagaccccggatgttggcggattttctgttgcggcgaggccgtatcggtagattcatcatggtgtggtaatgaaaaggtttttaggaaggcatggcgttccgggacggatatggtcagggagccttgggggcctccagttccagcggctgttccgcatcggccccggcgagcatccagccgccgtctgtttggatgaagtgcaggttgttgacggagaattcatttccaactgctgtacgcacgccgatggtggccttgattccggcgcagccgtctctggcggcgggaatatacgccgctttgacttcgggaacgtctttttcccttaccctggtgtgcgggatgggaatccttcccatgactgttttcaattgggagagcgcgtcttcaaattccttcacggaggcaaagttggacggggccagcatgcgcatcatggccaggctgtcccggttcgccagggcgcggccggcggcggttacggcctcttccggcgtgggaaaggacagcggaggatacgtccgatggaaatccgccatgatgcgggcggtggtggattcgtccggtttcagattccaggaagcgaaagcgtccgtcaggttcatcttgaagacgggaaggccgtctgtgggatccttggttttttccagcgcatagcggtaaatgagagcgggtttgtctatgtccggcatgctcatgcgcggcggcaggatggtcatggctccgatgctgtggatgtccttgccgttcttcttcgcgttgtttttattggcttcctcctgctggtcttcttcacggctgttcggggccatctggtcgtccggatgggggctcaggggaaccaggatggtattcggaaaggtcatgaagctgaggtgggtaggctggatatagcggttttcctcccttctgtcctggaggcgcatggccttgaccacgggaatgaggcgtgcgctctgggtaatagcggattccgtataatacggggaaacgagcagggcggcgatgagggccgggtcatcccccttcacggcccggatgagcaggttcttgagttcgtcgtccgttgttcccctgacgttttcctggcggaaacgcttgatatgttccagggcggctttaacggcggctatggagtactggtgggcgaggccgaaaattttcttcttggcctccgaggatatttttttcgctttctcacggatgccgtcctcaaagggaagaaatgtgttgtcaaagcttccgggagtcagggaggccttccattggccttctttcttcaccagggccacggcggtggccgcataaacgtacgggttggccttgtccggcagcaggatgtaggccatcgccaggtcgccttcggcaatgatggagtcttcatccacaaagggcggacgttccggggccgctccggtgacatacccctggaccgcctccatgcgggaaaggatgcttttcagtctgagttggcttacaaagggggaagtggcgggcaatgacttgtacggctcgtgtttccagtccgttttttcctgaagggcgctgagcagcagtttggccgcgttcaacggcgtgctctggtccggaacggggcccgtggacggagccttgtttcccgcagcctgatccatattgatccggaaacggacaggagcgccctctggcggctggccgccccgggaaaacccgcagcagaggcagaggcagaaaagggagagggggaggatgttcatgaccgctggccgccactatggcataaacggctgcgggtgtaaatcattcgttgggaatgttgacgcggccgttgccgcagggcagacaaccctggactccggggaaaagcgaacaaaaaggggggaaaggatgcgttccggaagaagaatccgaaagccggaggaaagggctttcccgcggcgttcatgccttgaattttcgggaagaaggtctttttgcatttgccaacagcgtttaagagaggtttactgatgcgcgtatgtccgaacacaaggaaagaaagactcttgaagaacgccaacagatgtctgatctggaacggctgcgccactcctgcgcgcacgttctggctacggccatttgccgcctctggccggatgcccagctggccggcgggcctgccgtggataacggtttttattacgacgtggagctgaaccaccgcatcagcacagaggattttgaacgcattgaggaggagatgaaaaaagtggtgaaggaaaaccaggttttccagaaggaagtcatttcccgcgcggatgccatgaagatggcggaatccggggagctgggcgccctgggcccccgcagcgagccttcccgcttcaagattgacctgctgaacgacatcccggaagacgaggagatttccctctaccgcaacggggattttacggacttgtgcgccggtccccacgtgggccgcacgggcaactgcaaggcattcaaaatcatgagcgtggcgagcgccttctacaagggggacaaaaaccgccccatgctccagcgcatttacggcacctgtttcccgaaccgcacccagcttgacgaacacctggaacggctggaagaggcgcggcgccgcgaccaccgcaaactgggccgcgaactgggcctgttctgcattgacgaatccgtggggcaggggctcatcctctggaagcccaagggggctctcatccgccgttccctgcaggacttcatcacggaagagctggacaagctgggctactcccaggtgtacacgcccaacatcggcaagctggacctgtaccgcacgtccggacacttcccgtattatcaggaaagccagtacgcgcccatcccggaacgggacgccatggaaaaactcagccaggagggggcttcctgcgcggaactgttcaacggcctggccaccggcaccattgagggctatatgctcaagccgatgaactgcccccaccacatcaagatttacgcgaatgacgcccactcctaccgggaccttcccgtgcggctggcggaattcggcacggtgtaccgctgggaacagagcggagaactgggcggcatgacgcgcgtgcgcggtttcacgcaggatgacgcccatatcttctgcacgccggaccagcttgccggggaaatccgccagtgcctgggcatcgtgaaaactattttcggcacgctgggcatgacagactaccgcgtgcgcctttccatgcgcgacccggaaagcgacaaatacgtgggttctccggaaaactgggacaaagcggaacaggctctgcgggaagctgcggaatggctgggggcggactacagcgaggaagcaggggaagccgccttctacggccccaagatcgacttcatcgtgcgcgatgccatcggccgtgaatggcagctgggaaccgtgcaggtggactacaacctgccggaacgctttgacctccattacaccggagcggacaacaagccgcaccggcccgtgatggtgcaccgcgcccccttcggctccatggaacgcttcacggggcttctgattgaacactttgaaggcaaattccccacctggctttccccggaacaggtgcgcgtgcttcccatctccgacaaggtgacggacgtggccgccgcgcatcgaaccgccctggccgccagaggcgtgcgcgtcacggtggatgaaacgccggacaaaataggcgccaaaatccgcaatgcccgtctggaccgcgttccctacatgctggtgctcggccagcgggaggcggaagacggcaccgtctccgtccgccaccgggacaagggggatctgggcgcgatgccctttgagcaattcgcggacctcgtagcccgggaaatcgcggagcgtcatatttctcccgtgatttgagttgccaagttattccttttagtttagtagtatccggacgtgccaaccaagccaacgaagaataatgacggaaatcgccgccgtgaccgcggcgatcagactcggatcaatgaacggattcgtgcgccccgcgtgcgggtagtgactgccaacggcgaccagctgggcgtcatgaacacgcgcgacgcgctggaaaaagccaaggctctgggtctggacctggtggaagtggccggcaatgccgatccgcccgtatgccgcgtggttgattacggcaagtacaaataccagcaggccaagctccagaaaaacaacaagagccgaaccgtcaagctcaaggaaatcaagctccgcatcggtacggataccaatgactataatgtgaaaatggcccgtacggaaagcttcctggaccatggccacaaggtccgcttccagctccgtttccgcggtcgtgagaacgcccaccaggagcttggctacgacgtcttcaacaaagtcatcgcggacatgaagaccatggcgcaggtggaccaggccccgcgcctggccggcaacaccatgcacatggtgctctccccgctccccgcccagcagcgcgtgaagaaattcaccgcccacctggataaggacttcgattccgaagactccgcctttgacgcggaggatgacgagtaagacggcatttttttctttttcaggctttccacccttataaggtggaaagccttttttacgggcagatgattttccatggctcttttctataatgataccagggaattttccccggaggcgctggaggaattgtttctttcagttcaatgggaatccggaaaccatccggaacgcttggcgaaggcattgcgccgttacggggcagtgttctccgcttgggatgggagcagactggcggggctggttgccgccatggatgatggaaccatgacggcttatgtccattatctgctggtgcatcctaggtaccagggatgcggtgtcggttccgtggttgctgggtatgtgcaaaagacgctatgccgggtatttgcgcatagttctcacttcctgcagggaaaaggttcctttttacgaaaggaatggtttccttccggcccggacgcaggaggctatgcgtttgattcctcctacgttcggagaaaccgggattgaacagtaagaaggagagtaatatctcaatttttctgggaaatccgcttgcggaagggctgcatgcggcacatggtggcggtgcgccagagccattccagggggccgtacaggaaatggcttagccagaggcggcaggcccaggcctggaggaggaagacggcaacagccgcgcacaggcatggccacggccccatgtcctgggccaggcccagcccccacccgaagaagaggaaggtgaagaccagcgtctgggtgacgtagcaggtcagcgtgcatttgccggcgctgctgagcagtctggcaggcaggggaaggccgggatgggtgaacagcaggacggcggcggagacgaaagccgcggtataggccaggttttcccattggtgcagaaggtgtcctgcatccacttccagcgcggagtccagccgggaggggagtaacaggcgcgccgccagcagagccaggaacagggttccggagattcccagcatccacaggaacaggcggcgtttgtcgggcgcgtcttcaaaggtgcgccatctgcccgccagcatgcccaggatgaagaggcccagcgtttgccagaggcggccgctgagcaggaagaaatgccatttgcccgtctgtccctgcgtcaggttccacagggccgcctgtccccagctgccgtgggcgtacaggaattcccgcgtggggcccgcagccggggaggtcgtatggaaccagccggaggagtggggccaccagtccgccagcccggcatggttcagcaggtccatgagcatgaccggctggagcaggcacagggcgcagagggtgatgagcaggggtgtcccgcatttgtagagcatgactagggcaaagcccagaatgccgaagagggtgaggatgtccccgtcatagaacagggtatgcgccagccccagcaggaacaggagcgtcaggcgccacatgaagcgtttccggaagtcgattccctgctgctcccgcctgtccagctggatgaagaagctgaggccaaacaggaaggagaagagcaggaaggatttgctgacaaagagatgttcatagacccagtccgccgcactgttggccgcagcctgccattcttccgccgggggcatgggaagatagaggttgaagtggtcgtgcgtgtggacgatgacgatgcccagcagggccagggcccggaggatatccagaatggtgatgcgcgcggccgggggcggcgttccggcgggagtccaggcggtcatggcgtcagcaggggcgggaaaaggatgggagcagctccgccgcgcgcctcctggcccattggtccgcttccagaatgggggccagttccccgcggggatccgccggggtgtggtcgtccatgacggcctccaccagtttccagatgccggggaaagagatttggccgtggatgaaggcattcaccgccgcttcattggcggcgttgtaaacggctgccagggtgctgttgccggctccggccctgcgcgccaggtccagggcggggaagacgtccgtgcggggggcctcgaacaccagccggccgatttccgagaaattgagctgtttcagggagttgggaacgcggtccggccacgtgacggcgtactggatgggaaagcacatgtccgagctgctcatctgggccagcaccgtgccgtcccggtattccaccatggagtgcacgatgctctgcgggtggacgatgacgtccactttttccatggggacgtcaaagagccagcgggcctcaatcatttccagccctttattgaacagggtggcagagtctatggtgattttgcggcccatgctccaggtggggtgcttgagggcctgttccagcgtgacgtgttccagatcttccctgttccaggtgcggaaggggccgccggatgccgtcagaatcaggcgggagatggcttccgggccgccgtggctgccgttcaggcattggaaaatggcgttgtgctcgctgtccaccggaagcacctgcacaccggcccggcgggctttttccatgacgatttgcccggccatgaccaggatttccttgctggcgatggcgaggtctttgcctgcttcaatggcggccagagcgggtttgagcccggcggttcccacgatggagattaataccatgtccgcctccgggagctgcgccaggcggcacagcccctcttctcccgtttccacctgcgcgccggggagggaggccgctagaccggcagctccggacgggtcataaatgcatacgttgcggacgttgaattcgcgtgcctggcgggccagcgcctccacgctggttcctgcggccagccccacgatttccattctgtccggaatgtcccgggcgactttcagggcgctggttccgatggaacctgtgaaccccaggatgacaacgcgtcgtttctgcataacggagaagcatgatgcaaaaaatacggcctcttgacaagccgggggatgaaaatcttccccgtgccgcgtggaccgttttttccgtcagtccggcttcattccggtgggccgggaggaaggccgccacgcattcgtgccgcaggcggcaggtgccgtggggtgagacgttcctgctggcttgtcaggcagggccccccggaaaagagcgggtttggacgtgaagtaaagttccgccgcatggaaaagggttgtattttcctccggagggcgtataggatggcacgaatgaagcgcatcgccgtgtatgccggtagtttcgaccctctgaccaacggtcacttatggatgatcaggcagggggcgaggatgtttgatgaactgattgtggccatgggcgataatccggacaagcgttatacgttttcccatgaggagcgcatggatatgctgcgggtggcgctttccgacatgccggatgtgcgcattgccgagttccacaaccgctttctggtggattttgccaatgaacacggggccacgttcatgctgcgcggcatccgttccacgcaggattacgagtatgaacgcgtgatgcgccatatcaatgcggatatggcccccaaggtctgtacagtgttcctgatgcctccccgggatacggcggagttgtcctccagcatggtgaaagggttgattgggccggaaggctgggagagccaggtgagccgctatgtcccccacaatgtattcgccatgttgaaggagaaataccgtgaggtttttccgcgttcctagcggagattccggatttccgttccgttattcgctgtccggtggagagggggcaggggcggaacgcctccgcctccttctgtctttctgctttctcatgcgctggatgacgcgggctcttgcggcgcatcggcccgtttgcatttgttccacagcatcgcacagttccctgcgcgccagaaagcggttgagttccctggatctgtccgcatggcatttgacgacgatgcccgtgggcgtgtgcctgaggtaaacgcagttgttggttttatttactttctggccgcctcgcccgcttccgcggacaaagctttcctccagatcctgttcacggatgcccagggcctccatccgttcccggagagctgccagtttttcaggcctgaccatagccggaggattgcagggtgttaacgcgctgccggacagcatgggccagcatgtcccggctggcggccgtcatggggcggaggctgacggcaacggttgagccgtcagccaggcggaggttcagccgtccgccttcccggtccgcagagcgaatctgctgccagaagaaccattgcatggtgcgccgcgttctcaggaagggcaggatttccactcccaccggggtgacgatgacggccgcgtgtttcaggcagcggctccccgcagccaggcagagggcggcgggaacaagcgccgcggcctgcatggcccacaggggggcgggcaaatacggggtaattgtatcatatcccgtgagctggaggaaagcggcagtggctgccagaaggatccccgccgccgtcaggatggcgcctgaccggttccgggtgaagcgcagctcccgtttccggacgggaatgtgccggatgtcctccacgcccagaccggcctgaaccggacggggcgcggaagcgggaagatggcgttcaggctccggcatagacgcccgggaggatttccttcgtttcgtcggagtcgttttccatcagcaaggtgccccggagaacggctccgtcctggaagtggaagcggccgcgcagggtcagcttgtccatgcctatcagggagggcaggcccagcccgtccagggaatccaccagcttgtacagtttggaatccaggtgcaccaccggggtgttgccctgccgttccggcgccagggccacgttgccgtgttcatccacggcgatggcgtccgaacggagcaggaacaggtcggaagtggttttgacggggaagaaacgggaacgcgggacgttgacggccctggcgccggggaagcattcgatgcccgcgcccatggccgtttccagttggtacaccggggcggattccggatcgcgggggttgagcgtctttttattacgaatcatgggcagcgggagtacgccgccgttggcgtccagaatttccttgagggcgtccaggcgtatccagagcgtattggtgttgaaatagcggtgcctggaaatgttctgggattcaggaatgtcctcatccgggcactgggccacttcccgcagaatcaactggccgtccgatttcctgacagccaggtggccgcctttcctgtccgcctccgtgcggcgggtgacttccatgacgaagggggcgccgctctccgcaaaccagcggaggaagttcatgtcaagctgggcgcccagattatcggaattggagacaaaagcgtatttaacgccatccgccagcaggcggtccagccagccggaccccagcagggccggatacaggtccccatggccgggcggacaccattccagctccggctgttccgggcagctggccggggagaggccgtccgccaggattttgggaacgcggttttgcagcagctccacttcggcgcggtccgcaaagccgtccgccgcgtatttttccaggtaggccagcgtgtccgcgctggtggagaaagagttcatcagcagaaggcgcacaggcgtgccggagatggagcgcagatgcttcacctgcctgacgatcaaatccaggaacgtatcttctccttttactttcagcaggcttttcgctttctggaggcccatgctcgtgccgaggccgccgttgagcttgatgcatacgcaacaggaaatcaggtccttgtccgccgcgggggtggaggctgtgatgtcctgccagtcttccacctggtcggcgggcaggatgtccgtttccggaatcatgccggagtggttggaaacaagggcttcgtaacaacgggagaaagcgttgacggccgcggctgaaacgccggcagattccatcttttccgcaaaaggagtgaacgtactcattggcggcttttgtacaaaatgcccggaggaggctcaagcattatcagcgtatccgagaggcccgcgcgttttctctttcttgcggggactgctccgggttatctggctgccgtcacccggatccgccggtagtccgccacccattgggaaccgtcccataactcatctttcagggaatcctccatttccttgaaaatctgggtgcgctgttcttcgtggaggttgttcaagtcttcccggaagaattgacacgcccagttgcgcaggccgtcaggaccgcctttcagcggcgtagggcggtcaaattccttcatggtttccgggcggagcccggcttgttccagaacgctgccgtattcttccgcggcgggaaagtaaaaacgcgttgtgtacgggaggctcctgcgttccagggctgtccggaaagcttccctgatgcggagaatattgaggcgggctccgaattcgcagaccagtttcccctgcggcttcaggacgcgggaaacggcatttaagagagtcccatgatccggtatccaatggagggccgcattggagaaaacgatgtcaaatctgttgcgccagggcatgaggcgggcgtccagcacgcggaagtccatgccgggatagagctggcgggcttttgctatcatttccggagaggagtccaggccggtgacggatgccgatttctccagcagagcgtgcgtcagcgtaccggttccgcagcccaggtccagaatggactggtctggattttccggtacgcaggagagcagttccctgccgtattccgcgacaaaaccgtgtttgttttcgtaccattcagcgttccagtccattacctctccatcgtagggaaaaagggggattttttcaagaaaaaccctgtctttttttcatggtatttttcccggagggcctctgtccatttctccgtgccgtgccgggattcttcttgcgttggcgggcgggaaatggttaagataagcttactatgaaagcaacagccctgttcctggcggcttccgccctggccgcggtttccgccgtcgcctatgacggatacggttatgacccccggcccgcgagttcctataacaataccatcagcggagcggcccatatcggctatgattcccggtatgcctataaagacgtggtggcttcctccctgctgaaccgcagcggcgtgtttaacatcggcggcgagctgaacctcaacctggccagagactggaaacaggaaatcggcgcggaatacatggctttctgcgacgggctgctgagcgacaaggacgcctttgacgccagctggaaggctgtcaaagagctgttacccaatctttccttccggggcgggtatgagttgaattacggcggactcccggggtatttgagcaagcacatggggaaggctccccattccctcgcccagtccgtcacggcggggctggcgtatgacgatccgggccacggctattttggctccctggatgtgcagtacggcttttacggcatgaccggctggcgcattgacctgaacgcgggcaagcgctggagcggcctgattcatgaaaaggtggatttggagctgagcgccggaacaggttattcctccagttactgggggcccggcgtagccgggtttgaccaggttaacatcaagctggcggctcccgtgcgcgtaacgggtgtagactccagccgcgggttccggattattcctttcatccagcttgactgggcgggaaacacccgttccgaaatccgccgctacgccggcatgaacgcgattgaggacttccgcatccgtgtgggcgtggaagccgtttaccgtttttaagcggctgctccgcggccctttcaccgggaagagccgcggaagcgttccccctttccgggggcgcatgccccctccccggcttcccttgaatcccctgccatgttgaaaatgatttttctgctggcccggcgcatgtttatacggctgctgctggtgctgcttccgctgggcctgtttatgttcttggcgcaggccattcccctttcccctctgcaatccctgctgttgctggttccggtgattgcctctgaagtgtggctcgtcatcaggcatctgctgcccgtcatgggggagctggtgaccaagacgctgtattcctccagtattactacggatgaggaagtgctggtggaggcttccaggcgcatgctgaattccggggatccccagggcgctctggaattgctggaacgctaccggagggagaatccggggctggtgcgttcctggctcatggaatccagcctgctgaacgatatgcgccggtacgcggattccgtcaacgtccttcagaaaggactggaatacggaggatggcgcaaggaggaccgggctctgtttctgtacaagataggagccatttacgagtcccagctcaataacccggacagggcccggaagtattgggaggaagctgcggataaatatcccgatacggcctatggccgctccgcacgggacaaggttatgttttaatgcggctttccgtgaagggatggcatccggatttttttcattgctttaaagaaccgcgcgtgacggaggaataagtctttttctttttccttatttgcgcagggaaatattcttcagggggggcgcgatgccatggtggttctttctgctgagcacggggtaattaagcattgtatagatcaatgtatgtgctacgattcttccgcatttaataataatgctttgccgtttccttggaaccggattaatttttcaactaacaggatatgagtaaaataagccatataaaatatatggtgctttgcaatcttccctatcgtttgcgggagatcgccggacggattgcgaagaaatgcaggagaaggaaagaccggtctcttgaagcgaagctggaggatattcgcaatttgcttatttataaccaccctatttcctctgttcccccggcgacggggaagttgaggctccttcaggacggcaatacggttttgctggccctttttgcgcgcaaatgccgggaaaacggactgcggtactggctggattacggcacgctgctgggggcggtaagacacaggggctttattccgtgggatgatgatctggatgtgagcatgatgaggccggagttcgaccgcctgctggaattgcttcccgttcttttcccccgtgaggaaggatttacctggaacaggcacgcctttctgcaaataggatatgagggtacccccctcaaccttgatgtgtatccctatcatttttatgcagagagtctttcatctccggaacagcatgggaagctggacaggcttttgagcggatttaagaaagacgtggtgctggtaggttccaggatgaacctgaccgatgggcaggttcaggagaagatccgccaggatattctggaaggaagggatgctgccggggaagatgaagcccccgggatttttctttctcctgccattacgtttacaaaaaacacgcacctttcctatgaaacgttctttccccttggctccgcagaatttgaggggatgatattttccgttcccaaccatgcccgccagtacctgcaatttttttacggcgactatctgtcttatccggaacgcatccagttcaagcatccttccgtgaaggccatggtggagaaggttccctttgaggcggcggtcaaccgtttcattgacgtttacggaaagcggattgatgcgcccatgccatgaaaacggttattacttacggaacctttgatttgctgcacacggggcacgtgaatctgctgaagagagcccggaaactgggggaccggctcatcgtcggcgtgactacggacagttacgaccagagccgcggcaagctgaatgtcatggagagcttggaggaacgcatggaaaatgtgcggaaaaccggtctggcggatctcattattaaggaagaactggaagggcagaagatccatgacatacggaagtacggggcggatgtttttgtgattggctccgactggtcggggaaatttgactatcttcgcgattattgtgaggtggtttacctggaacgcaccaagggcgtttcttcaacagacctccgttccgcccggaatcccattgtatatatgggaattgcaggtcacgggcgcatagcgggccgtttcctccgggagtccaaatatgtcagcaatattgaaataacagccgttttcggaaggaatgaggagaaagtccgccgttttgcagagtcccacgctctgctggaatattatacggaatacgaacagtttctggaccgggttcatgccgtttatattgccgtcccccatcatctccattatgaaatggccaggagggccctgttgcgggggaagcatgtattgtgcgagaagcctcttgcccttgcccgggaggaggcggaagagctgttccggctggccgaggagaagggagttgttttgctggaagcccttaaaactgcgttttgtccggctttccagcaattgaccagtttggcggggagcggcattattggttccatcaaggcggtggacgccacgtttaccaagctgataaaggatgaggctgccagggagtatgaccccatgcaggccggaggcgcctggacggaactgggttcctatcccgcctttgtcatcgggaagcttctgggaaccgagccccgcaggattcgttttgtgacctgcagaaagcctcatacgggtgtggacgtgttcacgcgcgcgggatttctttattccaatgcagtagccaccgccacggcagccataggagccaagcaggaaggggatctgtgcattaccggaacggaggggtatatttatgtgccggcgccgtggtggaagacggagatgtttgaagtgcggtttgaggatacccggctcaacaggaaatattttgccaattttgaggaggatggactgcgttatgaacttggcgcatttttgcgcctgattcatggctgccagcacggcaaccgtcttttgacccgtgaggattccatgttcatggctgatattgcctcccgtttcaggcgtggggaatatgttgatgaaatcagctgatcagggtaggcatgccgtctgccggaaatgaaaggagggagatttttctttctgctcatcaacattgatcaggcggtcataaatgtgcctggcgaagacgatatcgtggaggcccagcccgatattataactgaggatgcgttcttccggagacgttcttcccgctgtttttccggccagcaccggagctatttccccaaattgacgaaagcgctcaaaatgccggaaattcttaacatggtcacgatcatcggcaaataccttgtcgaaaaacaaatcacaattttggaatccctttgtatgtacggggataacagtaatgcctggtttaaaacagctgtcgtcggcaaggatgccctccgcattagtaatgcaggaaatgacggcatctgttccatcaatgaggctgttgatgttttgcgcttcttcaaaacggacgttgctatggcattggaattcttcaatgaattggggaacatgcgttttgtaggaaagaagacgcaccgtgaagtttttttcaggatataacgccagaatgcatgccatggtggcgcgggccgtatttcccagccccatcagggaaattgtctggaaatcctgtctggcgaatgtttgaagggcgagggcggctactgctccggtacgggcgtttgtgacccaaaaggcgtccataagagccagaagctttccggtgtgataatcgtaaaggagtatttccccattaatggttttggtccgttccggataacgcgttacaatttttacccccatggcgttcaggccggggacgatgcagggcatcgtattcatgaatttcccttcttcaaaggcgatgcttgttttatggggaaggaagacaggttcttcgtccttgatgcggaaggattcttttacccattggagtgcctgccggggagaaatattgagggaggaaatgatttcgtgaggaattgtcagcatggtagggggggaaggtaaaaacggcgtttgggaaaagggtggtaatgactagtttgaatgcatggaacaaatctcgtgcatggcccggaccagggcatcattgtcggttgcgtccctgacggcgatacggatgaattctctgccttcaaatccttttttccggctgcagtccttaacaaggatggagtggtttttcagcagaaggccggtcagggagcgggctttcatggggggcttgacctcgcacatgaaatagtttgcctgggaggggaaaacgttcaggaaaggcacgcgggagagttcctgcatgaagcggtcccgttccttcatgaaacggttgcacgcgcgcacgtaggattgctcgtatttcccgaagatttgcatgtagaattccgcgatggaattgatgttccagatggaaacgtctttttttatccatgccgccaattccctgtctgcggaggccagaacacccaggcggaggcccggaacgccgtaggatttggaaatgctttttaccacggccaggtggggatattcttccaggatgccgtctttcagcagcgtattgtccggcattccgcaggagaagtctacaaaggattcatccacgatcaggcggatgccgcgggtttttgtccacaggcagaggcgcagcacatcgcctttcggcaggaagaagccggaagggtttcccggattgacgaggagcagggtaccgatgtctttcccggaaaagaattccatcaggtcgtccgccgtataagtgaaattccgggaagcggtatggaagggaaccaccatatccggcttcacccggttggggtattcttcaaaggtagggtagatgacccccattttcccttccaggcgggacatgagcgccttaatgagttccgccgcgccgttgccgatgcagatgtattcctggttgatgccgaagtattttgccgccagcaggctgttgactctcattccggacgggtattccctcactaggcgttcaaaattcgccttgagttcggacatgaggcgtttgttggggaaatagggattgaccaggtaacagaaatccctgatgcggggatagcgccagtagcctccgtaccgggattccatcaggcgcaggtgttcttccctgtccggggtgaatatggaggctgcgatgtccaggtcctggatgtcgtctatttcataccatgcttcgccgccgaggcgcagcgccttgatttccggcttgtccagcagggcgatgacccgcagcacctgttcgtaatattcattattgcccagggctttgctgtaggctgtaagaaaggggacgtaatgggttcgggagaattccctgctgaatttgtaaatattgactgttttaaaatattccgtctttttcttgtaggagaatttgctgccgggaatgaattgcctgatgttgtcgtcttcatccagagtgacgaccgtgccgtccatccagctttcaaatttggcgacgagagcaaggctggggtagggatggcagagcagggcatcaataacggagtcttcaaaaatcaggtcggattcaaagagcagcgtatcgtcctgaagcaggtgttccttggccaggtatagggaataaatattgttggtgctggcgtacaggggattgtccacatattccacaggggtggaaatgtccagctgggaaaggaaggttttgagtttttctccctcataacccgtaacaatcacgattttttccagagatggggaaaggcggttcagttgtctcatcatgcgttctatcagcgtcactccgttgacctggatcatgcacttggtattgttccgggtgagcgctcccagtctttttcccattccggccgctaaaatgatcgcctgcataagtattctaatttgtcttcagaacctgagaaagaaccgggaactatgtttaacggattgagcatccgccgtcaaagtaaaaatttctgtaagaatatgttaatgggatattacccgggcgaaaagaaaaaaccgccttttatgtttcatcgcaatccttttatttttcattgatttaactttggacagaatgggagaaacgcttaacggatgctcaatccgcttgttgccaataccgtggaaagggaaggatgaggtctgtctgcattttggaaaaagcagcgttgatatcatggaacgggtgttttctccgaaaaggataatttgtttttcattgacttgtaaaaagtgggggataaggttctgattctgccggatgtgctttcctggaaaaatgaatcatatcctgcgtgtttttgacccaatttatctgcgatgaagctgccatcattcattaccgccggaaggactggaaaattagtaaggggaaagcattggtgggtgacggaagtccggtgctgcggcctgaaagtgctttcttcctgcacggataggaaaaagcgtttcatccgttttttcggtattccatgcggacggttcaaggtgggccgggaaggtgaatcctcccaattgggcaaactggtaaaagctaccgttcgggccgaggagatgccccaggcgtctggagtgctgaggattgttcagcaggccatgacctgttttttgaatgaagtggccggaattcttgaggagggcggttatccgtactggctggatttcgggacgctgctgggcgcggtgcggcaccggggctttatcccctgggatgacgacctggatatttccatgctgcgtgaagattatgaaaggttgagggcgaacgccgccgggcttttcggttcgcgcggtttctccgtcagtatggatccgttcatccagatagggttgccgggcacgttgtgcaatgtggacattttcccgtatgacacggcccctgccgcgtggtctccggatgcgcctgaggaaagggagtggctgctgcgcggttacaaggcatccggaatgcttgattatgaggcagattcctcctgccgctaccggacgcggtgttcctatgaggaaaaaatggcgatccgggaccgggtggtgatgggaggacggcggccggcggatggaggaaacattttcctgggatttgagattccttttgccggcccgtgccgccattccttccgccatgaatggctgtttccgctttcccgcgtccggtttgagggaagggattttccggcccccaggattcctgaaatggtgttgtacggccagtacggggactggggagtgctgccggattctccccctgtgcattttgatttgaaccacatttccaaggaggttctggccaggatgatgtacatgcgtgatacggggcgccttcccgggcgcgattaaagggccgcgcccttttcttcccccgcagggagaagcccttctttcttccttgaccctgctgattgaggaggggtatcattagataatgagaagacccccgatacccggcttggtgatggcggacggatggctccagccgtattcccgccagatacgcgaccgccagcgtctgtttgacctgaaaatgaagaggatcaatcagcgcgccggctctctggaggaatacgcgcgcggataccgctattacggtttcaacagagacgcggagacgggggcgtggacataccgggaatgggctcccgccgcccgcagggtgtccctgattggggattttaacggctggaaccgggagagccacccgctggagcggaatgagcgcggcgtgtgggaaattacgctgccgcctgatgcgctggcccacgggcagaaggtgaaggtgcacgtggtcggtgcggacggcacgggccgagatcgcattcccgcatggattaccaggaccgtccaggatccgaccacttatgattttgccggggagatctggatgccggaacacccctatgaatggcggaataacggttttgatccctcccgggtggaagttccgttcgtgtatgaagcgcatgtaggcatgggcggggaggaagggcgcgtgcatacgtaccgcgagtttgcggacgaggttctcccccggatcgccaggctgggttacaataccgtccagctgatggcgatccaggagcatccctattacggttccttcggctaccacgtttcttcctttttcgccccttcctcccgtttcggcgagccggaggatctgaagtacctgatagaccaggcgcacggcctgggcatcgccgtgctgctggacgtggtgcattcccacgccgtgaagaacgaggcggaagggctgaacaattttgacggttccggaggcatgtatttcctgcccggggagcgcggccgccatccggactgggattcctgttgttttgattatggccgggacgaggtgattgaattcctcctgtccaatgtccgctggtggctggaagagttccgttttgacggtttccgttttgacggcgtgacatccatgctgtatttccaccgcgggcatgagccgttcggggatttgggcgcctacttcggctcttccgtggatctggatgccgtggcttatctgcagctggccgccacgctgattcagcgggtgaagccgggcgccatagcgattgctgaggacatgtccggcatgccgggattgtgccgcccggtggacgaaggggggattggtttttcccaccgtctggccatgggcattcccgattactggattaagctgctcaaggagaaaaaggatgaggaatggagcatgggcgatatgtggcacacgctgaccaacaggcgctacggcgagccgcatgtggcctattgcgagagccatgaccaggccctggtgggggacaagactctggcgttccgcctgatggatgcggaaatgtactggaaaatggccgtggaccagcagagcctcattattgaccgcggcatggcgctgcacaagatgatccgcctggtgacgctggctaccgggggggaaggttggctgaatttcatgggcaacgaattcgggcatccggaatggattgattttccgcgcgaaggcaacggctggtcttacgaatactgccgccgccagtggtccctggtggacaatccttccctcaggttcaagttcctgaatgcctttgaccaggcgatggtccgcctggcgcaggaagcccggctgctgaataatccgccgcctttcccgcttaatattgacgagaccaaccatgtcatggcattccaccgcggcggtctgttgtttgtgttcaactggtccggagacagggctatcatggattacatgctgcccgttccccagaagggggaatggcgggtagtgctggatacggacaacgcccgtttcggcggtttcgggaggcaggatgtttccatgccgcattttacggatggggaggggaatctttccctgtacctgctgccgcgtacggccctggtcctgaagagggtaggttccgccgtcatggcccgccacccggggcgggaggattagcgtgcaattccaaaaacgggcggtttatttatccgtttgtgaaagggagcgtagtgcggagctgcgtacggaacgcgggatggatatgcgcttttactcccggaaagtgtccggacggcaggctgttaccactgcgcgggaagttcccgcaaggggggcgctcctgagtccgcctttttcaggcggatggtcaggatgtctgttttaaagtctttggacttctcgttgttgcggccccacaaaatggcaccttgcgtggtcatttccggataaaacgttttttccgtggaaagaaagcccggtttatccgccgcaacatgcacgggtttgtgcctgttcagggagagcgtgacgggtgcctggccggcgtagtctccgttcacacgcaggctggctccggaaggaatgctgcggatggtgatgtcccgggaagaactgctgcatgagaggcttgcgccgcagaatgcggagagcaggagaagatgcgggaaaaggccgtgagtcattgctctggaaaaaatcaatgatgttccgccattttcatggcggcctgcttgatctgggccgccatggagttgagggcgttcgccctggtgggcgccaggtggtccttcaggccggttttgtccagcttggacatgtctgccttcagaatttcttccggaggcaggccggaaagcagccggatgaagacggcaatgaggcccttggtgatgagggaatcgctgtctgcgtacagtttcagtacgccgttgtccggttccgtgtgcagccatacgcgggattggcatcccttgatgagggagtcctccgttttgtaggcttcatccagcctgggcaattttttacccaggctgatgatgtattcgtagcgttccgtccagtcctggaacaaatccagttcatccagcaggtcttgcaggcgttcttcgtagttcatggctcggagattgggtaggatggccgggcggattatccccggcgggcgtctgcaagcgtggcgagcacggctttctgggcatgcaccctgttttccgcttcccggaagataacgggagcaaaatgttccagcacgtcttccgtgatttccttgccgcggtaggcgggcaggcagtggaaaacggagtggccggaggcggcatgttccagcagctccctgttcacctggtaggggtagaagtgtttttccttggacagtccttccgattcctggcccatggaaagccagacgtccgtgttgatgacggaagctcccttgacggcttccacggggtccgtggtgaagatgacgttctcgcagtccagatgcctgcggaagtcttccaggggaaggtaattggtaggggctccgatggcgagcgtaaagcccagcctcttggccgcccacatccaggagcgggacatgttgttgtccccgtcccccacgaaggcgattttcatatccttccaggaaccggggccgtagatttcctcaatggtaagcaggtccgccaggatctggcaggggtgctcctcgtccgtcagggcattgatggtgggaatgccggaaaagctggcgaattcctccacctcctgctgtccgtaagtccggatggcggcgccgtggatcatacgtcccagcacgcgggccgtatccttgatgggctctccacgcccgagctggatgtcatggacggaaaggaacatgggacggccccccagttcactgatgcccacttcaaaggaaacgcgggtgcgggtggaggatttggaaaagatgagcgcccaggtctgccccttcaggggaaggcgttcgtgatggccgcgttccgccttaagccggtggcccagggcgagcaggtcccggatttcgtctccggtaagctgttcgatggaaaggaggttgttcatggtttttgaaagggaataaaaacgggaaagccgcaccatactccctgttttcttaaaagaaaagggaataatgcagctttccggggagggatggagatgcctttacttacagcctggccgccgcctggtccggccacggtacgggagcgccttcacgggctccggcgggattattcttcttgtaggtgggcatttgggccttgcgctccttgagcagggcggtcatggtcctggccatggccttaacgcgttccggctgctgttccgccaggttgtgctcttcgctgatgtcctccttgaggttgaagagttcgaacttctggtcagggtgccagtagataagcttccagtccccctggcgcatggccgtgctgggggaataaagggagttgtttccgttcccttccccccatacgttgggcgtgtggaagagcagggggcggttggggttcatgctgccgcctttcagcagggcaacaaagcttttgccgtccacaacctgaggcgcctgaattttttttgctcccgctatttccagaatggtggggaaaaagtcttcaatgatgacgggagtagtgcagacgctttccgccttcgtgaccccgggccagtagacgatcatcggttcccggatgccgccttcccggttggatcccttgccgaagctaagcgggtaattggattctttgttgcccatgcgcccgctgatggcaaggcccccgttgtccgccatgaagatgatgacggtatttttatccagattgttttttttcaggtattcccggatgtcgcccaggctcttgtccatcccctggatcagggcggaatagcgtttttcgttgtcggaccatttgtggccgtcattggggttggtgtactcttccgcaaacctcttgtcataaccgcgcatgtcgaagggggcatggatggcgtagtgggacatgtacaggtagaaaggcttgtccgcctccctggggtttttccggatggcgtccaggcgtttcagcgcctcctgcgtcagggcttccgtcaggaatgtgtcgttttcatagtaattattttcatccagtccgcggacatggaaattccccgtgccgtatttccgggaaccccggtagtccgccgggccgcctatttccgtgccggcgatattgtagtcaaagccgaagagcctgggattggctccgggcgtatttttggagccgaaatgggcttttccgcagtggatggtggtatacccctgttttttgagcagggcgggcagcccaagcacctgggtgaagggtttttccatcctgtactggattttttcttccgtcaggggaagatgggtggttccggatgccctggtccctgccggctggatgccgttgacgctccagtctgcgggagctttgagcgcttgatggcctgcgtccgtggtttggtcacgcaggagcgtccagttcgtgacgcggtggcgggcggagttcatgccggacatgaggctgcaccggctgggggaacagataggctgcgcgtaggcgttcgtgaagaccatgccctgcttgcccagagcctccatgttgggcgtgcggtagcgcttgttcaggaaagtaggtttgggagtgccgtcctcttccctccaaaagggcagggatgtatcctgccagcccatgtcgtccaccagaaagaggatgatgttggggcgtttcggttctgccgcgcgggatgcttttacggaagctgcggaagcggagcaggcgcttcccagcaggaacgggatgagaaaggctgcaatacgggaaatattcattactaaaaagaccagtgcttataataacgcatgagacggacgtttctgtcaaggattcgtattcccgcggcagtttgttcgggaacgccccgtttttccggtgcggcgtgtaccgggatgaaagagccttattcaaacagggccggataggatttccgggccagggccgtgctcaagtccacgataaacctgctgttgggggcctggagcgccttttgcgccatgtcccggcactggccgtagtccagattgcgaatggcataccggatgatggggacaaggtgaacccccacggacatggaggtggcccccaggccgatcagcaggggaagcagggtgatgtcccccgccatttccccacagatggccgtgggaatgttttcccgttctccggcggtgatcgtcatgtccatgatgcgtatcacggcaggatgcgtggggcggaacatattggcaacgcggttgttgacccggtgcacggcaatagtgtactgggtgaggtcattcgtgcctatggagaagaaatccacctcgcgcgccagcacgtccgtcatgatggcggcgctgggcacttcaatcatgatgcccactttcaagtcccgcgcataggggatgttcttcctttccagttcttcccggcattcttggaggatgtgcttggctgtgaccacttccgtatagccggagaccatggggaacatgatgccgcagccgggcgtgtccgcgcaggcacggagaatggcccggagctgctgtttgaacagctccgggcggctgagggagacgcggatgccccgccagccaaggaaggggttcggttccggagtgcggagctgttcgcacggcagcttgtcgccgcctgagtccagggtgcggaagatgacgccgtggggggaacagccttccgccagttttctgtagtagcgtgtctgttcttcttcatccggcatgccggatgggttgcccagcagaaagaattccgtgcggaacaggcctaccccttccgctcccacctccttgatgccggaatattcatgggggaactccacgttgacggacaggcggatgttgcgtccgtccctggtgatggtgggcaggccgcgcagcgcttccagcgccttgtaggccttttccttttccacctggaggcggtggtagtattcctccgtttctttcgtgggtttcaggatgagcacgcccttgtagccgtccaggatggcgggggagtggctttccactctcagaagggcctggtcaagccccacgacggcggggatgcccatggagcgggcgagaatggctgtgtgggaaacggaggaacctatttccgtggcaaagccgtgaatcaggctggcatccatggcggccgtgtcggaaggggtcaggtcgtaggccaccagaacctggtctttttccgtttcttcctcgtcttcaggaggttccgtgctgcggaggttgttgatgacccgctgcatgacatcctccatgtccgccgttttggcgcgcaggtaggggtcgtccacacggcgcagaacttccatgtagttctgcatgaccacataaaagatgtgctccacgttctggaggcgcttgagcagttccgtctgcacctgctggaggataattttatcctgaaggagaaggatgtgggcgtcgaagatggaggcatctttctctccggatatctggatcatgcgttcccgcagcgtcctgatctgatccgcagtggtttgcagcgcccggtggaagcgcaccagctcggcatccacttcttccggggaaatatcgtacgctacgggttccttggaaccgctgatctgaattttaatcttgcccagagcaatgccgggggaaacgggaatgccctgaagccaggtttcttccgttgaaatgggttcctgaatcatctgcgggcttaatggcccggtctcatatggccgtgagccggagtgttcaatcttcttcaaacttgcgggaaatcaggtcttccagcgcattcagcgcttcctgttcgtccttcccttccgccgtgatggtgatcttggagccgtggcctaccgccagcatcatcaaacccagaatgctcttgccgtcaacttcctcgccatccttctccacgacaatgtctgcatcaaatttgctggccagtttgacgaattgagcagccgggcgtgcgtgaatgccgagtttgttgatgatggtgagttccttggtgaccatggaatttgaagtaaggggtgataacggttgctataacggtaagtacactaattaaagtttttttccaagagttttttgtcagtcctagttttcggaggattggaagtttgacatgaggcggcggttgaactccccggccatgtcgatgcccatgtccttgagatgatagtccatggcggctacttccaccagcctggcaatatccctgccgggagccacggaaagctgaacatggagcactttttcccccaggacgtccagcccctcccgctccaggccaagcctgtccagctcttcctggtccttggcgggaatgagggtgacgatgaggtccagacgcttgttgtggcggatggatttcaggccgaaaagggtggtgatgttgacgatgcccaggccgcgcacctccatgaagccgcggctcatttccggagcgctggccaccagttctccgcccacgttgcgcacgtacaccatgtcgtccgccacgagggccgcgccgcgttcaatcaggcccagggccgtttcactcttccccacgccgctcttgccgcggatgaggacgcccactccgcgcacgtccaccatgcagccgtgcagggtgacgctttccgcgaattcgttttccagaatgatggtggcggagttgacgaatttcatggtcaccaggctcgtgcggaagacgcagactccggcttcatccgccagctccacgatttcccgagggggaattttgtcacgggagaagacgatgcccggcacctcgcaccggaacatgcgctgaatgcgagatttgcgcatgccttccggtagtttttgaagataggccagctccgcggagccgaaaacctggatacgtttgttggcaaagtaggagtagaagccggcgatcgccagcccggggcggttgagggcgggttcgcagatgtggcggctgaggccggcgggactgttgatgagttccagttgaagggcttccttgtacttgccgtaaaatttggacagggtgacgaaatccactttcttcactttggatttgctgaacataatcctatataaaggaacaaaacacacgcgagagcaatcaaatattgttcccggcgccatgtgcgggctccattttttgaaaaaaggcccgttccggcatggaatgccacactttaccggttgatttgaagccccaggcatggtctgatgaaggcatgaacagactggatcaattagccaccttgttgagatttccaagcatttccgcacagaaggaacacgcccgggacgtgagtgattgcgcggactggctggtagacaaattgtccggcatgggattggaagcaaaggcctgtaaaacgcccctccatcccattgtgctggcccgcagcccgcgggaggaaggaaagcccaccgtgctgatttacggccattacgacgtgcagcccgtagatcctgtggaattatgggaatccgacccgtttgaaccggaagtgagggacgggaagatttacgcccgcggcgctacggacaacaaggggcagctgttcgcccatattctgggcgtggaggaattgctccgccagaacggaggccacctccccgtaaatgtgattttccttctggaaggggaggaagaagtgggcagcggcagtctttcccagtttatcaaggagcacagggaagagctggcctgcgacgttattgtagtttccgataccggcatggccgctccggacacccctacgttttcctacgggctgcgcggcctggccggggcggaaattatcgtcaaaggcccttccgcggatcttcattccggcgtgttcggaggagcggtggccaatcccatcgccgctcttgcggaaataatcgcctccttccatgatgaagaggggcgtgtggccgtgagagggttttacgacggcgtggaacctatcgccacatgggaacgcagcatgtgggccacggtgcccggcatgagcaatgaggagctggctcagctgacgggcgtggaaaccgtggtgacggaggccggtttcaccggagcggaatgtatttttgcccgcccgacgctggaaatcaacggtatcggcggaggttaccagggtgagggaagcaagacgattatccccagccatgcctttgccaaaatttcatgccgcctggtgccgggacagcagcctgaaaggattgaaaccctgctggaagaacatgtaaagaaacattcccccaagggcgtcacggtggaattcaggcggggccatggcgggaatgcttacgtgtgcgatccgaattccgagttcggtcttgccgcccagcaggcgctggaagaggcttttggccacaaacccgtgctggtaagggaaggaggcagcatcccgatcattgaagaaatgaagcgcgtgctgggagcggatgccctgatgctgggcatgtgccttccggatgcccgcatccattcccccaatgagaactttcccgtggatttgttctccaagggaattgacatgagccagattcttctgcgccgcctggggcagatcaagcattgacctttttatggaccagcctgtagccgctgaaatagtcaacctgcacaagacctttaaaacaggtcttggcaaacccgtggtgcatgccgtgcgggggatagacatgaatatccggcaaggggaggtatatggcctcattggcccgaacggctccggcaagtccaccctgatgaaggctctgctggggctggtgaggcctacggaaggttcctgttccattttcggcaggtccagcctggctccggacagcaaggaggaagtgggctttcttccggaaaatccctatttttacaaattcctgacgggggcggaaactgtttccttttacggcaggctgtgcggcctgagcggaaaatccctgaaagagaaagtcagggaactgctggagctggtgggattggctgatgcggcggacaggcggctgggcggctattccaaggggatgctccagcgcatcggcatggcgcaggccctagttcagtccccccgcctgctggttctggacgaaccgaccgccggcgtggatcctctggggtcgagggatatccggaacattatcgaaaacctgaaagggcgggggatgaccgtattcctgtgttcccacctgctggaacaggtgcaggaggtttgcgaccgggtgggcgtcatttttaaagggctgctcattgcggaagggtctgtgaatgagctgacgcgggattccgacaagcaggaaatacttctggaacatgcttccccggaattgatggaacggctgaaggagatggtgaaggaagacggccgtgccgtttggctggaggatgggcatccgcgcaactccctggaaagcgtatttctaaaaagtttgttggaatggaaggaaaagcatcccaatccggaaccgtaagcggtccggcggctgccaaacgggaagtgcgccgcatgatacgtgaaagggtgggcgaattggatgccgccgcccgggaagccatgtcccgttccatctgccgccgtgtgtcggctctggtgcgggagaggaatttccagcgcgtggctgtttttgccgccaggccgggagaggtggatttgctttccctgctggatctgcttccggatcgggaatggtacttcccgctggtgcatgaggggagaaggctgagttttcaccgtgtatgccatcacggggaattggtggcgggcagctggggcatacgcgaacccggtccgggatgcccggaactgcatgctggggaaatggatttgatagtgctgcctggggccgcatttaccaggggcggcaagcggctggggtatggcggcggattttatgatacgctgctggccggcccggctgctggggtgccgctggcgggagtctgcttcccctgccagcttctggacgatctgcccatggaagcccatgacaggcatgtggacatggtgattgcgccgggagaggagtaacacccttccggagaaagggaaagaggctagatacggaaccggtgtttctgcacggtcagtttataaaacaggtcgtagcgggcgttgagcaggggctggaggtattctacccctccggctacctggccgcggatgtccgcatacagttttcggtagtcggaaagtccgctgatcatggcttcatacaggggggtgcgcagcccgcattccacggcaatgtgcatttccgccgctgcggccacgatctggcgggacaggcggaactgcatccaggccagccccaggttgccgcccacccagacggccagggccgcgcccacgcaggcgaaccctgctgcgtgctctccgaaacagcccagcagggctcccagaatcaccagaaggagcatcagcttgatttccgtcctcatcacatcctcctgatccagaaaaagcttgctgaggcacggcttgatgccgaagtccttcaggggcatgtaaatggaacgtcccagcctctccttgtacacttccagatccgtctggagctttgcggccgggaaatcccctatgtcgcagtcccattgttccttcacgcgcgggcgcacatggttccagtgcgtctggcagatgttcaggaattccttgttgtaatacgcgtgccgttcctcaatgccggatttgaccagctcataaaaccattcgtcaatgacgggaggaagcttgtgcaggatcatcgtgcgccggatggataggaaacgccccatctggcgtgccgactttttccccagacgcggcacgcagtcctgcacgtattgcgcgtatgccttgaggcgtgccggcatttcatcctccatctggagctggatgcggtcgatttcccggtcaatagacgtcaggaagccggaatccatcttggaaaggcggctcagttcatcaagcaccttcccctgttcttccagaaggctgtccgtagccagcaggaggcgctccacgcgcttgtccgtcagcgggctgcgtttcagcacttcctgaacgcatgccgtcagggcttccactccttcccctgcatgctctccggcggtcgtgacagggtacaggggcagctgcacgcccaggcgttcccgggaggtggagcgaagctcctctttcaaggattgaagcttctcaaaggggagcagctccgcatgggtgatgacgagaaccatgcgggaatggagacgttcctccagcgtccggagatagtcccacagggcggaatggttgccgtcactggcggaaataaccacaaggatggcatccgatttgggaacgatgtgcttcagctttctgggggcatcctcctgttccaggccgatggtatcccagaactccaggttgagcagggcgtccgacgggtaaaaaaggtccagaacccattcatgggtgtgtggggcgggatgaggcctgtactgccagcggaccagtgtggcttcactggacacgcgggaacagaaccgttccccggccagggcgtccagcgtagaggatttgccggaccctgtcatgccgatgacggtgacattctgcggagagcagcattcggccagggcttcctccaccttttcctgggaatcgaaatgacggtcggggccgatgcgggcggaaaacgccgcggcggcatccgctacgtcccgcaccgcatgcggaatcacgttttttcctcctgtcagcatggggtgatgaaatcaggtctccgtccgggctgttccggttttccggaacaaacctacacgccgcttttccttctgtccaactaaaatcacgaagcgggagcgtacgagcggccgccgaaaatggccgtccctacgcggacgagcgtggctccttcctctattgccgtttcaaagtcgtggctcatgcccatggacagttccgtcagcgtggctcctcccctgccggacaggacttccttcagctcccggaggcggcggaaatagggccgcgcctcctccggattttccaccggggggggaatgcacataaggccggcgatttcaagatggttcagggaggacagctccggccattccttttccagggtttccgggaagaatccgaacttgctgtcttcattgcctacgttcacttccagcaaaatgcggggccgttttcccgtttcctgagccacggtatccatgaaccgggccaggcgcagggagtccacggcatggatcagcgtgaaatattccagggccttgcgcaccttgttgcgctggagggggccaatgagatgccattccgtatccggaggaagggaggggatttttcccagtccctcctggaccttgttttcaccgaaaatgcgctggcccgcatcatggcacgctttcacatcctctgcgggaaaagttttgctgacggcaacgaggcggacggaacccgccggacgtccggcgcggagttccgctgcgcgtatgcgggagagaatatgttccagattttgttggatgctcatgatggatggttcagttcagggatggctgtgcggacgcgtggctcatgatatggtgcaggggagagagccgccgcatggccatggcccagaccttggaagaatccgtttccaggcagatgtccggcaccatgggggaaacataccaggcacggtcattcagttcccggcgcagctggggcggcgtccatccgctatggcctacgtaggcgcgcaggatggcgcgggggtcttccaggtattccagggcctgttcctcctgcagatgaaactggacgcgcaatttatcctccgtgcggatgaaagcggcgaagatgagctggttgcgttctacgggccctcccttgaagatgggcacggcgtaaagggattccggtatttccgtatggcgggctacgtcccccacattcatgccggacggatgattcaaaatatggccgatgacaaattccttctccgcccggctcaggaagatgacggaatgatggaatccggcgccatccaggtagggggcggcaaccagaaggtgccccgccaggttttcattgctgatatcttcgtgttccatcatggccataaatctacgttaccaaatgtgacggatgcaggcaaccatgcgttcaaacggccatgtcaggaggcggtgaaaacggaacaccggaaaaacaggagggaaggggagcttttacccgagtgtatagcgggcccctccggaggaacggacggcggttcttgaatttccggacgtcctgcgggcgaccgccctcctggagggaacggattttttcccggttgatgccgtttgcttgcgggaaagggcaacggcgggggggcgggaagccctgcggcggtgggaaatgacggaggccgtattggcgttttccatgcggtctggagcggaagccatgaccagcaggggagaatcctgcattttttccgcctgggccagggctttcagggacgcgtcaatggaacagcgttcgattacgaccgggtcaccggtacggagcagattgaaggcctcatatacgtcattgctcgtcatccggacgcagccgtaggaggcgggggtgccgatggtgcgttcctccgccgtaccgtggatataaatcaggcgcgagtgagcgttccggttacggggttccaggccttccagccacatgatgcgcgtgacgatggggccccggcccggagaattgggcgcgacgcattccccggtgggcttgcggcttttaaacaccatgcccttgggttgtccgctgccgattttggaagcgatgcgatgggcgcccagaggagtgcggcagcttccctttctgtctcccaggccgaatttggaagtgctgacagggtaggtcttcaccacccggccattgcgcatgacggccattttctggtccctgacgctgacgaccgcgccgtctttcacgatggcagtgggctcataatccggacgggaacaggatgccaaggctccgaacacagcgaaagctgcgccggcgagttgaatcaggcgtgctgcttgcgagagaggcgcaggcatgggaaaggcgtcagttcttggctttggcagtttgcttggcgggcagcaggttggaaatcatgcggcccagggaacagaaacctgtgtaatagaaacccaggaaaggaatcatcaggatgggggaaaggtaatggccctggcggatcatgatgatgatcaggttcaggaagaaagttccgcaggcgatttccagaacgggaatgacgacggatttaatagcccggtacccgttgcgtttgagctgggagacgtgccggcggtcttccttccggtctacgccgtatttgggcgtgcggacgaaggcggactgatggccgaagatggcttccagaacagctttggcgttgttgaccgccatgcccacgctcagcgtgagaaggagggggaggtacggcagttccttccaccaggatttgggacgcaccacgatttgggcgctcatgtaaaagatgcagacggccacgctggtcatgaagaacagggccacattcacaaaccacatgaagaccgtttcattttccggaatacgctgcgtgcagatggggtacaccaggaagcagagcaatgccaggagcagataggaataattgcaggtgaggtgggtggtggcttctaccttggctttaaggggggcattggagcgccagatatccagcaggattttctggcagacctgaatggaacccttgatccaccggtgctgctgggacttgaacccgtccatgtccacgggaagttccgccggggtaacgacgtcgttcaggtagatgaagcgccagcccctgagctggacacggtaggaaaggtccatgtcttccgtcagggtgtcatgggaccatccgcctgcgtcgccgatcacgcacttgcgccatatgccggcagtgccgttgaaggtgaagaagcggccggaacggttgcgagccgtctgttccatggcaaaatggccgtccaggtacatcccctggatgcgggtaaggagattgtattcacggttgatgtggccccagcgggtttgaacgaggcccacgttttcatccgtgaagaaatggatggttttttgcaggagatccggttccggaacgaagtcagcatccagaatcagcaggaattcccccttcgctactttggtagccgcttccagcgcgcctgccttgaagccggtgcggtccgtgcggtggatgcagacggcgtcaaagccgcgggactttaattcctccaccttgcggtagcattgttccgtggtgtcgtctgtagaatcgtccagaatctggatttccagcttgtcctgcggataatccagagcggctacggattccagaaggcgatccacgacgaacttctcattgaacatggggagctggaccgtcacgacgggcagttcctggaagcgtgctttgggctggggcttgttattacggttcttccagtacaggtaaacgatgctcaggcggtggaagccatatcctgccaggccgacgaggaccagaagatagcacaaaagccagataaaattgtaatttaaagacatgcagggggtacaaagggggttggtatctttttgcgtcagggaagggggatttccttgacgtgacgcccgtataggacaccatagggcgagagtcaagacatattccgttttgcttaacctttttgagtgttgttatgaagagattgtatctgctggccgcagctgtatccgtcacggggggaatggcgttttccgctccacaagaagatgccccggagaaggaggcggcagtactggatgtgcaaacgccgccgtccggcaagcaggaccagccggccattccggaacgcctgctggacgactcccacatgaatgaggagctgggcatcaacgaatttaccgcgccgtccatccgcaagatttttgaagatttggaggggcttcctgaaataccggaaaaggtggccttgcgcgcacgcccggagcggcctcccatggaccgctgttccctggctctccagttgggcggcatgatggcggacggcttcgtaatcgtgcagtgcggcaagatgaatgaggtgaaacccattgctctggatctttccagctatgcaaaggccattggcgccggagagagggtgaaccgccacgccgccagcctgctgaaaaatgcggaagacggggatttgagcagtttcaaaaacaacctggcccttattcaatccgatgtggaacaggaactcgcctccctgagggattccgatatggcgaacctgatcggcctggggggatggatacgcgccctggacgccgctaccgcggctctggataacaaatttgcggaggacaaggcgaaagtcattttccagccggatgtcccggaatattttcattatattctggacggggtggagccggaaatgaaggaacgccgggacattgccaaaatcatgaaccttctgacggtcttgcaggagcagatgacgctggctccggacgccaaacccgacaaggccggcgtggaagccatccgcaaaacgacgctggagttgctcaaggcggctctggcccctgtggaatcataattcctctctccggcaggcatacatctatggttcttccccttttgagcagtctggaagtgcgtcttactccccgcagcctgtacttgcggaatgaaaaactggagcggatgattcgggatgatggccgcatcccggtgccttacaacgtaagcatccgcaatgcgggagacggcgccgtgcgcatcatcggcaaaaagtggaccgtccgttcccatgaagacggcacccaggtgattgaaggggatgaactgttcggttcacgccccctcttgtgccaggggcagatttttgcgttcaacggccttcagatgctgcggctgccggcgcgcatccagttgactctccttgtccgggacgaggcgggaatcctttatcatacggatcccgtcagccttaaatggtgaaataaaaagccctgcaatattcatgcagggcttttttctggataagggatagaggaagaatctgaggataaaagtctataagttaataagactgttccttaattcccactccctctaattgttgcttccgggctaaccttcttcatcatccccgtggttgaggatgaagttcagatcgtcaatgcccaggctggaggtaaacccttcgtcacccagcacgttggcgacgagctggtttttctgatgctggagaatgcggattttttcttccacggaatccttcgtcagaaggcggtaggcgatcaccttgtttttctggccgatgcggtgcgtacggtcgatggcctggctttctacggccgggttccaccacgggtcatacagaacgacataggaggcggaagtaaggttgaggccggcgccgccggctttcagggaaagcaggaagacggagggacccttggtcgtctggaatttttcaatttctccgcggcggcccttggtctggccggtaagatagttaagcggcctgttttccgcttccagcctgttcttgatgatttccagcatggaaacgaactgggagaagacgagcactttatgcccttcttcccggagctgatccagcaggtagaagagggctgtcattttggcactgtcttccttggcgtatttgggatccaccaggccggggtggcagcagatctgacgcaggcgcatcaggccctgcaaaatggcgaaactgttctttttgacggattcgtccgaatccaagccgagcagggcctgctgaatgcggcggagttccgccttatacaactggctctggatgccttccattttggcgtacacttcttcttccgtcctgggaggcaggtcttttgccacctgggatttggtgcggcgcagcaggaagggtttcaggcgcgcggccaggcggttctggctctgcgggtccttgcgcttgtcaaagcgcttcttgaagtaggagcgggaaccgaggactccgggcatggagaaggccatgagggaccacatgtccagcaggcggttttcaatgggtgtgccggagagaacgagacggttgtaggaaacgatttcccgtgccgccttggctgccttggaatccgggtttttgatctgctggccttcgtccagaataaccgtaagccatttgatttggttcagggtttccccgcagacgcggagctgggcgtagttgaccacgaccatgtcgtaattcttcttgatgtcttccaggttggcctgatccttgctgcggatgacgaggacgcgcacgcctggcgcaaatttttccgtttctcccgcccagacgtccagcacggatttggggcaaacgataagaaccggagggatgacgacttttttcttggatttgtttttgcgggcgaattcttcacgcagccagaggacgtaagtgatggactggatcgttttacccaggcccatgtcatccgccagaatgccgccgaacccgttcgtggcaaggtaagccaggaaatggaacccttccacctgatacgggcgcagggtggcctggagctgggagggaacatccggcttgacgtcgatctggatttccgcggtacggtccttaatgcgtttccaggcctttggatcgaacacttctgcggctttcgggtccgccagctgcatggcgtgcatgcggtgggtttctccggaaagatcgaaggggcccaggcccaggcgggtaacggcgtcgcgctggtcattgtccagtttaatttccaggcgcatccatcctccgtcgtccatgcggacgtaaccgcctctggcggcgaccagggcgcggatttgctccttggagagctggacgccttccacatcaatgacgatgcggaggtcaaaccagtcgatttcctggttgactacttcaaaccgcacggcggcggccaccggatccgccagcagcgtcttgagcttgtcgtccatattgacggtcagctctttcggaagctgtttggcccattccgcgaatttttcggggaactggcgggtgacgcgggccttgaacgcgcccacctggggatcataggaaaagcccatttcttccagcaggccgggaatgggataaaggtgctcccggatgaagcgcagcagaactttgttcttcatgggctcctgatgggatacgtcccagccgtccttgccgagtttttccgtgcggtagccggaagcgtccctggcgcttacttcgcagagcacgtgttccgtttccgcagaggtgaggccgcggacgattttcatgtcaaaggtgccgcgcaggtcgatgtccaccacgcggtcttccatgctggggggcagggaagcgcctattttacgcaggaattccaccccttcaaggctgtcgatgacctgcttgggaatggagtagcggggttccacttccgtgctttccagccagcggggggggccgggaaaaacggtttcgtcagactggtacagttcctgctgccccggaagctgccggacggagtgggagacgttgatgccggtggaagttgcaagctgaagagcgtagcagtccggttcaatggggtcgtcctggcaaatccatttgagcggttcgtccaccactttgaaataattttcatcaaggttcaccaggtagcctttcagggcgggctggtggaaaagtttgttcatcagggcgcatgcggcttcctgatccagatccagcgtcagggcgtcttccgcacgggcgtagtcggacagggagacgagcaggatttccgtctgggcgtccatgcgtacggcagcccgttcatgcagattttccagatgttccagatcctgtttttcccggacgggaatccagtcctgcttcagggaatggcggtattcgaaatgtccctcgttaatagtggaaacaagcctcatgaacagttctccgcggggcggctgcggggggcgttcattcacggattggatgcggtcgtaccaggtgccgacttcacgggagcgctcccattcatgaatcttgcgctggaccttttccagatccgtaatggattccatgaattccgggtagggcaggcgttttttgttgaaggcgtaagcaatgtaattccagaatccgaggatgtttgtgggaggcacgggccacaattccagcgggtcatagctgacgatttcccatcggggattcaggcgcaccatatcatggtcgtgaatctcctgttcaatggcgaaacggcggtagcgcttttccagtttgctgacgtagtccgcttccttgtcgtccagttcgcgtcccagtttctcttccagaatatccagaagaggaacatcattcagttcgttcggggattccggaaggccctggccacggtacatgcgctccagcatggcggcatacatggccgctccggccagatcctcgtcttccgtggaacatgctccgaaccacctgttgccctgaaggcgcagattcacgcggtgcacgccgtatgtgtcttccacgcggccctgaatatataaatgattgccaaaaatttgcgtgactgcgccatctttctggagcttctcgccgcgcagccggatttcttccggaaaggcattgagaaagttcagagtagccctatccgggttaagtgccatgctcataatatcagactgtcatataaaaattggaaacaagcgttccctgtcaagggacgctacaggtctatgcactttactatggcacaaaaagcggattagagcaactattctctgaaaataattccaaaggttgtttgtgatgatgttcacgatgttgaatgacaaattgttatgtctatatgaagaagaccggtttttgaagaaaacgaacatattttatcatcttggaaagaaaggatgtcagttttgcgtaacatggttcttgacaggttcgccgtaaaagcgtcttttatgcctgaaattttatgtcctctgcatcacttctacagttactggcgactcaagcccgcttgagcgatggcgaattggccgaacgtcttgacatgactgaagaagccgtgcgagcccagcgggaacagtgggagaaggaaggagtcatcctcggataccaggccgtggtgaatgaggaatatgaacacgacagcaaggtggcggccttcattgaagtgaaaatgacgcctgaacgcgacggcggttttgaccgtctggccatgcgcatttcacggttcgacgaagtttcctcctgctatctggcaagcggcggttttgacctgctggtgctggtggaaggaaaaagcatgcgggagattgcccggtttgtggcggaaaaactctctacgctggaaggggtgttgtccacttccacacacttccatctgaaaacctacaagaaaaacggttgtgtgtttgaagctcccgtgcagacagaacgcctggctgtcgctccgtaattctctgccgttaagaaaggaatgatcatgaattggcagaacaaaatagcggagcaggtaagctccataccccgttccggcatccgggaattttttgacctggtcacgggacgcacggatatcatctccctgggcgtaggggagccggacttcgtgacgccgtggaatatacgggaagcggccatttactccctggaaaaggggcacacctcctacacttccaactatgggttggaatccctgcgccgttccatcgtcaaatacgtggacggattcttccatgtcaactacgaccccctgcgcgaagtgctggtgacggtaggcgtaagcgaagccatagatctcgctctccgtgccattctgaatccgggggacgaggttctttatcacgaaccctgttatgtctcctatgcccccagcgtcaatatggcctacggcgtagctaccgccgtgcctacaagcaaaagggatcttttcgccctgaacccggaggtgctggaagcgtccattacacctcgaaccaaggtgctgatgctcaacttcccgacgaatccgaccggagcggtggcccctgtggaaacccttcaggaaatcgcccgcatttgcatcaggcacgacctcatcgtgctgacggatgaaatttacagtgaactgcgttatgacggcaagccgcatgtttccatagcttctctgccggggatgaaggaacgcacgctcctgctgcacggattttccaaggcattcgccatgacggggttccggctggggtatgcctgcgatccggaaccgcttatttccgccatgatgaaaattcatcagtattccatgctctgcgcccccattacttcccaggaggcggccattgaagcattggaaaacgggacatccgccatgttgaagatgcgggaaagctaccgccagcgccgggattacctggtgaagcgccttaatgaaataggcatggactgccacctgcccggcggcgcgttctatgtcttcccggacatttccaaatttggcctgaccagcaaggagtttgccacccggctgctgatggaaaagcaggtggccgccgtaccggggatcgccttcggcgcaagcggagaaggcttcctgcgctgttgctatgcgaccgcctttgaccagatcaaggaggcctgcaaccgcatggaacatttcgtggaaactctttcctgacccggcagtgttcatgaactccgtgacggaggcgctgaaaacaaaggcgtatgtggcgccgtttgcggtattcatgggctttaccctggtgtggcagtttggcgttcccttgctggaatgggaccacccggccgcaccctggtggagaagggcgccggaacaatggctgtatcccgttcaggcaatcgtttgctttgccctggttttccggtggagaaaggccattgattgggattggcggtggaaacccgccgcctggggaatcctgttcggcgtgctgggtatcctgtgctggctggccccgaccatgatagcggaccgcctgcccggaggggcggatgcctggtttgggcatccctcctggccctggtaccgatatctgctgggaattgacgcgcgcccggatgggtttgatccgggcgtcgtctttcttgcggattcctggagctggctgggggctctggtgctgcgcttcttccgtgccgtggtcgtggtggctctggtggaggagcttttctggcgcggctatctgatgcgcctgatggtgaacccggaccatccctggaaggtgccgttcggcacccatagctggaaggcatactgggtgactaccctctgtttcatggcggtacaccagcctgtggactattgcggcgcattcgtttacggttccctggcgtatctgcttgccgtctggcggaaaaacctgtgcgctgtgatcatgatgcatgcggcggcgaatgcgttgctgggatgggccgctctggaatggggtaaatacggattatggtgaatccggcgtttacagagaggattttcttaagtacataaaagccgatgactccagaggaagccatagcaattttatgggattaccatcacgtgaagcaggaactacgtccggcggaactcatattcattcttggcagcaatgacataagggtggcggaatatgcggcggaactttatgcccggaagctggctcccctgttgctgttttccggcggaacggggcgttttacaggggaatgggccgtaccggaagcggaacttttcgcagaggcggctatgaaaaagggagtgccgggagactgcattctcattgaaaacaaatccaccaatacgggagaaaatgtccgcttttcccgtgctgtcctggaaaaagccggcatcccggaaccatccagcattatcgcccttcaaaagccctatatggaacggcgcacgctggctacgctccaggcccagtggccggaagtacgggtggcggtcagctcccctcctttttcgttcagggaatatctgaccagggagctcccgcaggatctggttgtttccgccatggtgggggactttcaaaggatactggaatatcctaaacagggattttccacggaacagcctgtgactccggagacgatggcggcattccgcacgctggtggaagcggggtatggctcccagctgctcaagggtgtcccccttccttggaattcttgagaagacacgctttttgcttttactgaatgctgattgcgggcatcaatacaacccgcatagccaacccaattatataacttatcatggcagacagaaccaacacagaccccgcccgaatggaaaaaatcgtgagcctctgtaaaaggaggggattcatcttccagtcagctgaaatttacggcggtctgaacggttgctgggattatgattccatgggggtggagctcaagcgcaatctgaaagaatactggtggcgtaaaaatgtgcaggaacgcgaggatgtggtcggcatggacggttccatcctgacgcataactccgtactggtggcttccggccatgtgggcggattctccgacccgatgtgcgattgcctgttgaccaaggagcgtctgcgtgcggaccaggttccggcccagagtggcatggggtttttctataccggggccgccaaaaaagacggttcctggaatattgaaaagaagtactccgttctggtggaatctgaaaaacaggcggacaaggctcgtaagaccgcggctcaatattatgcccagctggccggcaaggatgcctcttacaaggatatggagctgaaaggcgagtgcatggaaaccgtaacggattccaccatgtacaatcctgctaacggttctctgctgacggaagcccgtgagttcaacctcatgttcaagacgaccattggagctacctctgatgaaaacgatcccaacgctacgggctggctgcgcccggaaacggcccagtccattttctgccagtataagaacattctggacagttcccgcgtcaaactgcctttcggaatcgcccagatcggaaaatctttccgcaatgagatcaacccgcggaacttcactttccgttcccgcgaatctgaacaaatggaaatcgaatatttctgccggccggaagacgggctgcgcctggtggatgaatggctggaacaccgtctttgcttctatgacgaagtgggggttccgcgcgaacacattcacattttggacgtgccggacggcgaacgcgctttctactccaagaaaacctatgacttggagtatgaattccccttcggcatccaggaactggagggcatcgcctaccggacggattatgacctgagctgccatcagaaaggttccggccgtcctctggaatactttgacgaagagacgcgggagaaattcattccccatgtggtggagccttctgccggttgtgaccgcaccattctggccattatctgcgaagcttacgatgaagaggaactggtggacgacaaaggtaaaaaagacgtccgcacggtgctgcgcttcgtgccccgcatggctccaatcaaggcggccatcttccctctgtttaagaaaaacggggaacaggtgcgtattgcccgggaaattgaaaagacgcttcagccgtggatgtccgtcttttatgatgaaacgggagccgtcggccgccgttaccgtcgtcaggatgaagtgggtactcctttctgcataaccgtggactttgaaactctcggggaaaatgatgcttcgctcaaggggacggtgaccattcgccaccgcgactccatgaaacaggaacgtgttgcaattgaagacctgctgcattggcttattgcccgcatacgttgatgtttttcagcggctttgatgccgaaattccttcagagccgttccgttgacagcggaacggctttttattttcaaaacagcagtgaaaaaagggggctgaaaaaccgataccgggcgtgatttttccagaagagagcccgttgttccggagtcggtatggctggaggtctgtgcgttttttttgatgctgctatgcacggctgggaatggatatttcttatatgtttactggaagcatatggaatgaaaattcaatgagagttattgacgtcccgccagcaaaagagggaaaatgacgggtgaggcggttcaggaaaaacgtcctgatttttgagcttttttttatcctctgttgtcaaaggtttgtacggcatggaatgatgcgatcaagtagaaagaagatattaatgatggaacattcagtaatttttccggaccatcggaaggtttgcgccctggggcagggaacctggaaaatgggaaagtcagcgttgagggaagccgatgaaatagatgctttgcgcgccggcattgagctgggcatgagcgtagtggatacggcggagatgtatggcaacgaggaaatggtgggagcggcaatccgcggtttgcgcgaccgtgttttcctggttaccaaggtgttgcccggcaacgccagcaggacaggaaccaaagcggcctgcgaacggagcctgaacaggctgaagacggattacgtggatttgtttctgcttcactggggaggtccccatcccattgaagatacggttgcttcaatgattgagctgcagcaggagggaaaaataaaagcatggggcgtcagcaatatggacgttccggaaatggagcggttttacgccgtcccgggaggagtttcctgcgccgccaaccagattctttataatctggcccatcgaggtgtggagtacgatttgctgccgtggtgccgggaacgccaccttcccgtgatggcctattcgcctgcggatgaagggcggctttcccgtaatccggtgctgatggagattgcgcagaagcatgaggccaccccggtgcagattgccctagcctggattttgcgctgccctggaatgattgcgatccccaaagccggttccgtcacgcatgtgcaggaaaattaccggagtttgtccatcaggctgactgcggaagatgtggatttgctggatggggcttttccgcccccggtcagaaaggtgcatctggattcctggtaaaccgtgatgccgtccggcagttggggtgaagcgggacgcgcggattttcctgccgcatcagaattgtttcaagcctttcatctgtccgggatgaaagggcgccagcgggtaatttcaatacacgcacgccttgtgggtagggtattggctttttgttcatgcggccggggaatcttctgacacgtttccggaaggggacttcccggtttttccccttgaacagaggatgtgccgttttccggttccggcttcttcagtagggaagaagattgaatgcggctgaaagaaagccgcccttccgggaatacggcattccggagaggcggctccagaggagaagggcaggataataaagcgctacagcggctgagcgtccgtcctgggtatccagacgggcgtgttctggaaggtgctggcgtagtaccaggagccgcgttccgcgcgcaggatgagcggggtggattccggaagggtgatgagcgccgggctgttcatgtccgccgcatgtctgccgggcgttttttgggtaacgaccagtaaccgatccgccggaatggattccggggtttccgggtacatgatgtagttcatgacagccgctactgtgaccagtccgctaagggtggccaggatggtcagcagggccccgtgtctgcgggtaacggtcagcagggccaggaaggtgagcatgacggctccggacaggatggagatggggccgagcgtatcatggcggatgtaagtgagccactggttttccgtggtgttggcgggcaggatggcgccctccttgcgttcgatgaattgcaggttgtattccgcttccgtgaagtacggggagagttccagagcacggcggtaattgagagcggccagaccgggtttgttcatgcggtaataggaattgccgatgccgaaacaggcgtaggcgcgttctgccttggaagggttcatattgccgctttccttgctgaaatagtcaatggctttggcgtactctccctgttcataggcttttacacccaggttgtccgtttccgacgcgtttccggttgttcctgccagggacagggccagtacggcggccatcatgagaacgggaagcttggcgatggcttttttaatagcctggagcatgtgctggcgttccgcgtgcggcagttcttccgaagattccgaaggcttgaatgccctgtcgtcccggagttgaaggatatctttcattttttcattctgcttggaaggtggaatataggattcaataaagttgccggcggcacgcaggaatcccgtggagcttgcctggcgcggagtggaagcgagcctgcggaaggctctcatgcgttccctggccgtgaagctttccttccggattttccggatgtagcggatcagagccattcccagcaggatgacggcggggatgtaggccaggaaataccacccccagtgagccggggcggtaagggcgttcatgacggtggcgggcatgagcccgtaaatatccgtcatttcagctaccggaatggtgcctgccgggggaggcgtggcgggagcggcacctccggccgccgttccagtaatggctgaggccttccattccaggggaatgggggctgtggttacggttttgtactgttgcgtgctggggtcaaaaaaagtgagttcaaagggagggatggcatccgtttgggcaaccggacgcatcatttgctgaaattccacggttccctggatggagcgcgtattctggcccgggtccagcttgttgggaggatagagtttccagttggaggcgtctgtgagggccgggcaggcgatactgtggatattgcctgttcctgttaccctgattttaacagtaatgggttcattggcactgagatcccgcgcatccgtggtggaggagatgcggaaattccctacggcattggtgaaggaagagggagctcccggggggagttcctgggctgtgattttcacttccggaatggccatttccaccagtacttccgaacggatgaagttggcgatgagagggtccgcctccggcagggcggcgcgtgccgtgacagtgccggacgccgttacctccccggcgcgcagcgggaacagggtgctctggaaggtcatgacattccagttgacgcctttgtaaagtacagaaccgcgaggctggccgcggagcagttccaccagcgtgggttcaaagcgccaggtagccaggttggaggtggtgatggcgggcgccgtgtattccagaatgtattccggggcgtaaattttcagttcgcagcggtccggctggtggacatagggtttctggttgtccacatgccacagcatgccgtacgggactgctgtgccgttcaggttcagcgtattccatttgatggcgctgtaagggtagacagtcagcgtctggggaagcgtggtataagtgcggccattgttggcctgcagggtcagggaagggatttccacggtgcccacttcgtccggcgttacttcaatggccatcaggaaggcggattggttgggagaccccggccagcggatgtagttgccctggctgacccagcgcaggctggcgccctttacccggggaagcgggccctggcgggcgatgcttccgtctgtcaggatgatgaagagacgggtttgttctcccggcacaacggcatcggacagccaggtggtaaccacctgctgagccataagcgtgacagtcatgcagaagaaaagcgaaagaatggcgagcagttttttcatcttgttttgcgggatatgtttaaaggggtggcttcgcggatgcgggcggaacgggttagtaatccttatccggaggaatttccggagaacgctggggaacggggcagccgggttcaatgtccctgcgttccattaggatggctcttgcttccctgcgttccttttcctccctgctttccttttgtgcggctgccggaacgggcttgttatcttccggctggggctgcggtttttccattccggacgtttctggcagcctgtctttttccggagaggagggaagccgggcgtttttcatttcattttcgtccctcttgccttccttggtttcggcgttatccttgtcttggtccttgtcttggtccttgtcttggtccttgtcttggtctgttcttatccttgttcttatcttgttctttgttcttattcttgttcttgttctggtcttgttctggtcctgttcttattcttgttctggtcttgttctggtctgttcttgttctggtccttgttcttcttgttcttctgttcttatcctgttcttattctgttcttatcttgttcttattctgttcttattctgttcttattctgttctattctgttctgttctgttcttgttcttattcttgttcttatctctgttcttattctgttcttattcttgttcttatcttgttcttatcctgttcttatccttgttcttattctgttcttatctctgttcttattcttgttcttattctgttcttatccttgttcttatctgttcttatccttgttcttcttatcctgttgttttttcttctcttcttccaatttcttctttaattcttccagctgccggcggtattcgtccagggatttatcataacggagcatttcctccttgttggacgctgctccttcatgggaaccataggcagagagcgcatcgtcaaaacgtttgacggcctctttaacatgttttttcgcaacgggtatttttgccagccggacatcaatttccttaatttggtcgtcaatggaagagagccgggcttgctgctgttccccttccggcctggagaaagtcatggtcttgcgggcctgggcggcttccaggttgccaaggttgaagtgggaatccgcctggagggctggtttgggagaaaggagcgcctgggagaaagcttccgcggcttctttggggttatccgctttttgttccaggcatcctttggcgaattccaaggcctggcgcgtttcttccgccaggtcgggaacagcgagcatttcatcaatggatttgacggcttcttccgtttttcccgtccggatcaaatccgtgacattgtccagggcgtgcgtgtccgcctgcgcttcctggcccagcagtccggcgcagaataacgccgcagcagtcagagatgtcataccgcggcgtccggaacggcggaaggaacgccagcgtgttcccgccagaagggtgaggagcaggcagatgagggccggaacggcaaagatgatgtagcggtcattcggcacgcggcgcacttcttccttgccttccgtggtatccagccggtccgcgatgtccttgacgaagcggttcagcgccgctccgtcggagagttggacatattggccttccgtttgcctggccaggtattgcaggctttccggattgagcttggagacgacgtgctggccacgacgatcccggtacaggccggagggggattgctcatccggaatagtggtgccgatagtagtaccgatacccgctgtcacgatgataagctggtgctgccgtgcggcttccgcagtcttataggtgatgttgacggtgtcttccccgtcgctgaggatgaccagggcgtttttggcgtccgcttccttgtcccgtttgaaggtttgaagggccagccgcacaacgttttccaggttggttcccccttgggagacccagccgaattgaagttgttcaatggtttcttttaatgcgttatggtcatgggtaaggggcatgagcaggacggcgtccccggagaagatgatgatgccgaagttgtcccccggcagggcgtccagcaggtcgtaggcggcggtttttgcccttcccaagcgggtcggggaagcatccttgctgagcatggaacgggagcagtcaatagcaatgaggatgttgcgcgatttggggatttcctttacctccgtgtagccgtccaccgggcgcgcaatggagaggatggcgaagatggacgccagcacggcaaagatgacggggagcacccggtgccaggtggccggagcgtgaaccagttcccgccggtattccggcgaaacgagtacttcccattttctggaacggcggcgccacagccaccaggccgccgctgcgagcaggaccgggagaatgagcgcgtacagaacgttgggataaaggaaagtcatgacgggtgaagatcggtattacggggcgggggccggtttgagcacttgcagggagaggcccagaagcgccagcgcggctcccgttacaaggaagtacatgaagtattcttcaatgtggcggacggtttgcactttggcctcgcttttttccagcttgccgatggaggtgaacgctttattgaaggaggccatattggtggccctgaagtgttctccgcccgtgagctgggctattttccgcagggttggttcgtcaaattcactttgcaccaccatgccgttcgccagggttccttcttccgtgcctacggcaatggtataaattttgatacccagcttggccgcgttttccgccgccaccagcggggatatctggccggagttggaggcaccatccgtcaccaggatgatgatttttgatttggtgtccttacggtcgtccagccgggtggccgccgccgcaatggcggagccgatggccgtgccgtccgcctggatcatgcgcggatggaaatcccggatgatgctgttgaccagggcgtggtccagcgtgagcggacagaaggattttgttttcccggcaaatcccacgataccgatgcggtcgtccggacggctgtcaacaaattgggtgatgacgtgtttggcggctaccagccggttgatgggcattcggttgagaaccatgtccggcgtttccatggagtaggaaaggtcaaaggcgatcatgatgtcaatgccgttgactgtccggaaggttttatcttccacgtgctgggggcgcgccagggcgatggcgatggcggcagccgccagaacgaagcaaagggcccctatttttcctgccagggattgcggagtacgcgccagggaagcgatgaagcgcacggtggggtaggtgatggagccttccgccccgcgcctgcggcggaggatgatgaggcacaagatgaagggtaaggcataaagccattcaggttgcgcaaattggaagtgttccgtcatggtatgctaacgttggttgaagcgggatgaagattttttgacgacaaggtccgtttcttccttcgtccggtgggcatccgcttctatatcattgatgagttggaccgtggcgtccgccaattcgttgaccatggaatcgttttccggggtgtccggttcatatttgagagaagccatgcggtccagcagatcgcgcgtgggggcctggagttcggaaggcagcgcggtgagcgcgtccgcccggcggttgaattcctgctgggtttcatatagtgccgggtctttggtttctcctaccaggtatttgcggaggatcagggaaaattccacggcggcctgcctgagggagggatgcgtgttccggagcatcgagatgtcccggatagcggtttccgacgggctgagcggcgcggcggggatgcgtccctttctgcggatgagcacgatgacggcgatagcgacggccagaaggatggaggccaaaataatccagatgccccacgcatcccaaaagcccgcttggaagtaggcatccggggattgtgtttccatcagggagggaaacgccggcggttccggaattgccgtgggggggggctgaaaggtggcggggggtggcatggctgatagagaagaggattagcgtgaaaatttacgggatcttctggcaaaaagggcccggaggggaggcatgaagttgtctgtggtctgcaagtccaggaagtcaatgcccaggcggcggaaatcctgcgtccatttctcgcggtgcagatgcacgacgttggcgtgggtttcccggacatcctgacgggaaaggttcaggaacatgcttttgccagtttccggatctttcaggatgacgcgtccggcatccggcagatgcagttccatcgggtctgcgatgcggatggggatgaagtcatgcttgaagttgagctgccccagggcggctttattgttctcaccccagaagtcactgatcatgatgaccatggccgcttttttctgggaaaggacaagttgccgggctacatcggaaatgttctggtcggctccatcgtttttactggctacgatttcgcggacgatgcgcagggtctgcttgactcccttggccggggggatgtaatgggagtggctgttcccgtagatgaggaggccgcatttgtctccgctctgggcagcgctgtaggcgagcactgccgctacttccgccgcatagtccagtttggagacgcgggccgcggaggaggcgtagtgcatggagccgctgacgtccaccgccagaatgacggcctgttcccgttcctcccggaaacggcggacaaaaggggagttcatcctggccgttaccttccagtcaatgaagcgggggtcgtctcccggcatgtattcccggaagtcgtcaaagtccagcccctgtccgcggaagccggactggtattgcccggcgaagttttccgtggccagatgcctggcgcgcagttcaatgcggcgtacgcgcttgagaatgtctgaggctttatccatgaaatgattttccctgtttgggttcaatcaggttccggcaaggcgccccttggggcctgaaggataagggcgggcgcggaagcgtccgcctcctgccgtcacggcacggggactttcgtcaggatgtggtcgatgacgtcgtccgtggaaatgttttccgcttcagcctcataagagagcaggatgcggtggcgcaggatatcgtgggccaggtccttgatgtcctgtggagtgacgaaggaacgatggtgcatgaaggcattggcgcgggccgccagagccaggttgatggtagcgcggggagatgctcccgcgcggatgagaccgcgcaacttcacgtccaccgtttccgggaagcgggtggcgcgcaccagatccacaatgtagccgcgcacggcgtcgtcaatataaatctggtttaccaggtcgcgggaggccgccacctgttccggcgtggtgaccggggaggtttccggcggtttggcggagctggccatgaggtccagcacttggagttcttcttcgcgcgtggggtaggtgaccagcaccttgaagagaaaacggtcaagctgggcttccgggagctggtaggtgccctcctggtcaatcgggttctgcgtggcaagcaccaggaagggatccggcaggcggtaggtggtttcacccagggttacctggcgttcctgcatggcttccagcagggcggattgcactttggccggggcgcggttgatttcatccgccaaaatgagattggcgaagatcgggccttttttggctgtgaactgcctttcttccggattatagatcattgtgcccagcaaatccgccggaagaagatccggcgtaaactggatgcgggcaaactgtgcatgcagcgtgcccgccatggcttttacggagagcgtcttggcaaggccgggcacgccttccagcaggacgtggcccttgcagaggagactgaggattaatctgtccacgagcgcctgctggccgatgaccaccttgccgacttccgttctgagagcagaaatccacgatgagttcgcggcgataatttcgttgaattctcgggtgtccatgattctgatagcgggtgagacagtatgccgggcacttacgttgaaaaaatcctattatttcccaagggcaaatccggttttcaacaggaggtcttcccggaaatggggagccatcatctgaaagcccacgggaagttccatgccgctttccctgacggttccacagggaatggacatggcggggaggccggccaggttggcggggatcgtgtagatgtccgccagataggtctggaggtgatccagcgcggaatctccgattttgggagcgggagcgggcgaggtggggcctacgatgatatccgccctggaaaaggcttccgcgaaatctctggcgaccagggagcggactttttgagcgcgggagtagtaagcgtcatagtaaccggagctgagcacataggtgcccaggatgatgcggcgcttgacttccggcccgaatccctcttcacgggtgcgtgagaagagttccaccagtccggcggcgtcttccgccctctttccgtagcgcacgccgtcaaaccgggagaggttggaagacgcttccgcgcaggcgatgatatagtaggcggcgacgacagcatccgcgtggggcaggttgacttccaccagctccgcgcccaggctttccagctgtttgacggtgttttgcacagcctcggaaatgcccggatggttgccggaggtaaagtattccgaagggatgcccactttcagccctttgacgtcacggcccagcgcagcttcaaagtccggcacggggcagtttgcggatgtggagtctttacggtcgtgtccggagatggcctggagcaggatggcggcgtcttccactgtccgggtcatggggccgatctggtccagggaagaggcaaaggctaccagtccgtagcgggaaacgcgcccgtaggtaggcttgaggcccacgataccgcagtgcccggccggttgccggatggagccgcccgtgtcggaaccgagtgcggcaacggcggtagcggatgcgacggcggcggcagagccgctggaggagccgccgggaatgcggtccggggcttccgggttgcgcgtgatgccgtaaacggagttttctccgctggcacccatggcgaattcatccatgttcgtgcggcccagcgggatgccgcccgcctctttcagcaggcggatggaggtggcgtcataaggagcgacataaggggaaagaaggcgggaggcgcagcgcgtcggctggcccaggacattaatgttgtccttcacggcgatggggatgccggccagggggctggaaatatccgctccggccgcggcgtggagggctgcttcacggtcaaaggagatgtaggcgttggttgtccgatccgcctcaatggcgtccgccgtcaggttgaccagttcggcaggggagagttccttgcggcgcaggcggtcacgccactgggccagggtgccttgaatttttgacatgagaaggaaagggtaaagacggttgaaaggtgaagggaaaaggaagcgggaggatcaggcggattccaccaccttgggcgtgcggaattgcccctgggtctgctggggggcattggaaagggcttcttcctgggtgaagccggtttcaggaatgtcttcgcgcatcacatccattgccgggagaggatggttcatgggggcgatgcccgtgacatcgtaggattccagcttggtgatataggccaggactttgtccagatccttggagaagagagctgtttcttcctccgtcaggtcaatgcgtgccagcttggcaatgtaggctacgtctatttggggcgtgctcatggtgtaatgtagaaaagatgcggaaaagaagggggctacctactgttgttccagcagacggacgatccagcagaaggaaacggcgatggcgcagatcagcaggcccagcagcatgaagttttctcgcagttcccgcctcatgttggtggcgcgtccgtcacgggccactacagcacgcagtgcccggttctggttgccctcccgaacgcggtcaggaggcggcatggtattgcggtccaggcgcatgcgggtctgctgggacgggcgtttgagagaggcttccaattcctggatacggctctcaatttcccgtgaggcgcgatccagttctgccagttcggaggaacggcgtttggtttttcttttaatcatgatgcggaagggctgaaaatccagatgaaaaagaggatgatgagggcaatcaggagcaggggaagatggaaggaaagaccttggaggaactgggtcatgaattcacgggagctgatgcgcactttgctggagcggcgcaccccggtgagcactttggtatgctgcatgcgcgcgcactgctggacggcatccgcgaattcctcctcgcagcggtcaatgacctgctggccctggctgatgaggttgtccgtattttcaataggccattcatccgggcgcacggtgctgagcattttcaggctgcgcgtcagcgccatgtggatttgttccagttcattgctttcctggcggaggctttccacctcccggccgatgaggtctgcagcgttgaccatgcggtcgcccagctcgttctgctgatccataaacctggctttgcgcatatggcattcttccaggcggcggcgggagttttccacttcctccttttccttccgcaattgttccagcctcagctgggcctgttccatatcggcgtccacctggtcgtctgcctgggaattgtaaccggggtcggcgtccatgcggcggtattgagggtgacttggtctcatatgcggaaaaaataatgcgggccggcgtaagggattacagcgtttccgatcctttttgccggagcggggaatccctgcgcgtgctattatttaactttcacaaaataaatcaagccaagaagaagacagggaaagattttccggatgcgttcccggcagggaatgccgccctgttttttcttctggagccgtgcgttccggatatccggggggcgacaggacgctccgctttcccgcaaaggagggggaggtgcgctttttttatggtcaagggcatggatttgctggtatgtaggaagcatgcagtctgacacggtagaatgtaagccgaccatgtggtttaccggcagggcggttatcatggctctcatgtttctggggttcggagtgtatttttattatgatgcttccaccggataccctcaaaaaaacctggagtttttcatgcacaaggcgttcgtggacgctggagccgtgtttgaccgtgaggtgagcgggaaaggggcgtccgcggaggactgggagcgcattgttctggcgcgcactgtggattttccggagggctacgaaattccttccggcgtgaatcggaacacggtgccgtggcctgacattttggcggattacagtctgatgtccacccccggcaagggttggagcgctgcgtggcaatcttattccggggaaaagcactatcccatcaagccggtggaccacccatatgacgcctccaaaatttttgaacagtgggtggctgggtgcatttgcctggcgcttgccatggtggctctgtttttcctggtgagaacgcgcggcaggaaaatgtccttgaacgggaaagaggtgatggccgccggcgtggttttccgcgtggatgacattgcccgtctggatttgcgcagatggaaactgaagggactggccatagcgacgctgaaaccggaatgcggaggagcccgaatcaggctggacggcctgacttacggcggcttccggaaggaggattctccccataacgcggaagatttcatgaaggctcttctgtctctctacagaggagaaatagtggattatgaagaaattcctgatgccggcgggccgcctgcccggcaggaggacgaggaacgtgccgtatgagcgaatcccttccaccggaaaagggcgccaatgaccgtgcgttcggcgtcgcctgctggacgctgggtgggctggcgtttgttctgttgctgatggtgggcgtttctttcagcctgtctgtccgtaccgtggtggtggaaaaagtggtggagaagcctgttcccgttccggcacgggagaagccggagcgttcggccggagtcgttgaggatggggcggctgaggagacagtgcatatggcggatgttccggtatccccttctgaaaagccccgttccgtggaagaaatgctccgggaagccgatttgtcagatccggctgccgattctgtaccggtggccgcggccgttgcgggagggggggactccgctagcggggcatcccttcctgctgaggatccggacgaggtcatgccccccatgacggaggaagtggcggagcttgtcaaggcggctcgttacgcccagattgaaggtgacctcaaagtagcggtcgtgaagttggagcaggccatgaggctggaaccggataatccggtggtgctttattattatggacttacctatgaatggctgaggaatgcggataagtcacgggagttttttctgaaagtatatacccagcgtgagaaggcggggaaatattttgcgcgtgcggcgcggcaccttcaggccggcttttccagcccggcggatttgcggggggatatgtccttcggcactattctagaataccgggatccggaatgccccgccggggagcgcgtcaagctgatggttcctattctgatgaaggatggactgaatgtcaggccggaggatctgcgcgtcattgtccagttttttgacaaagtcaatgggaagaaagtggaaaagacgcatgcgcccgaaccttcttcccggtgcgttacggaacccgcggattgggcggacggtgaggaaatcatggaaataacctactacatgcctcccctgacagaagaagagacgattgcttatggaagcctgaaatattacggatataccgctaaattgtattacaagggggaaccgatggattgccatgcttcccctcccgtgctatttttactggaacagatgaaccagagttccccttccggactgcccgagatttatgacggcggtttgcttccccctgtagaggcggctccggtttctgagtcttatgaatcccttttgcctccctgatgcctgatttgcccaatgtttgatcttccccacaactttggcgattacacgctggtggcatttattggccgcacgcgcggaggaattctttatcaggccatccagcagggcatggaccgttccgtgtttctggagttgctggatccggacaatccggagggggtgggcgtggaggattttctgatgaaggcccgcacgcgcgccgccattaatgctccggtgctgggcaccgtctatgaagcgtcccaggcccagggatactggttcgtcaccagcgaacagctgggaggctcatccctccagtccatgctggaccgcgggcagaccctgtccatgaaggatttgctgaaggtgattgaaacggtcggcaacgtgtgcggcaggtatgagcgtctgcggaccgctttcaatatcatggagccgcgtcacattttcctggatgacaagtctgccgtgcggctgatgaatacggccgtgcccggtgactttcacgaagaaacatcccgcgaccagatgaagcgcctgggcatcgacctgcctcctctggtgactccggatgtgcccggaaccacgcggatgcgcaccctgctggaatggatgagagaagggcagaacggaaagccgatgcaatgggaccaggttatggagctggttgctgcggtccgcgaacagctggggctttcccctcgggttaccacccaccgctataccgtccccgtggaatcccgcagaaaagccggaaaaaagctgctttgggccggaatgggcctgctgggcgtggggatagccgcggctgccgtttttcttttattcccccgggagaaggaacccgtatcccgtccccatgttccggctcctaaacattatccggatttttcctccagcgatcatacggaagtccgcgtaactcttcccggaggaggggaactgattgtgggagcccatgaaattaccctggaatcctaccgcctgtttttggaccagtgggcacgcctcactccggagctgagggaggaatattcccacccggaccagccggacaagaggactgcctcccatattccccaggactgggaggctatgtggaaggcggcttccacgccgggaggcaaatggaaaggcaggaaaataacaccccgctctcccgtcgtcaacgtcactttctgggatgcctgggcgtatgcgagctggaagcccgtggcccccggagaaccgcgctaccgcctgcccgagcgcggggagtggatggctctggggaatatgctggaaacgggtgagaagggggacaggacgctggtgattgacagatacagcaatgatcatgatttaaagaccggcgtgtgcggcatggcttccggcgtgatggaatggacttcttccatggaaaaggatcctgcgcgcgtgaaggagcctccggggccggtggcctgcggcggagactggaggcagcccggcatctccaaccgggtggaatacctgcgctcccgcggtgaaagccgggacaacctgggattcagaatcgtgcggaatgtccgctgacccgtttaacgacaatacttaacatatcaataccatgaaacatatccttgcaatgctgctggcccttctgggggcgtccggggccctggcccagatttacgtgaaagtagtcccggaaaagaagacgttcctcagcggggaagccatgtacatgaggctgaccattaccaacaattccggcgtgccggtggagctgaaaagccgggaatattcctcctggctggatatccatgtggagcattccactgcgggggcggaactcccccagtccaaatttgccctgtttccgcctctcaaggttcctgccggcatgagcgtttcccgcaagattgacctgcgccatttctatgacttgtcccgtgagggcaactaccatgtgcaggccgttgtaaaaatgcccaaccagaaggacatgtttgcttcccagaaatccctgtttgccgtccggacgggaacacccatgtggtcccagaccgtggccattccggccagtgccaagcggtgcactttttccatttgcactattgccgtgcggggaatccagaaattgtatgtgcagacgaaggatccggatacgggagtggcctacaatgccgtgtgcatcggtgactggctggggactacgcgtccgcagtgcatggtggacggcaaggcgaatgtccatgtcttcttccccactacccccatgctgagcgcgtattcccgcatcaactaccggggaaccatggaaaagctgcagtactataaaaaggtggtgggagccccctccatggtctttcttccggacggaagcgtacgtgtgacgggagccgtccattatgatcctaccgtgaaacccaagacggtgccggatgccgctgatgttcccggcatgtaaatccgtcctgtttcgccggatgtcacgcaggggaaaaggaaaggaaaacgtactgcttcttccgtaccgggaaaataagatattccggtattttcctgagctattttcccggctggggagtgtttttcaagatgttttgcacgcttttctgcacaacgctgatgggcagggcgtaattttccgcccggttcactctggcgatgttcatgccgatgagttcccccttgagattaagcagcgggccacccatcagcgtgtaccgggaaggggtgtcatgctggaggaccatagggaaatcatccctgcgtttgctgaacccgccgctgatcaggtcattggaatcctcaggagcgtttcctcccagggcctggcgtctggaacccagcgtgatggtgtaggataaccttttatccttgcgtttgactttcagtgtcactctttctccaacttttttcctggacagaatgggggaaacggcatccagagcagtaacgggcgtgccgtccaccgccagaatctcatctccggcctgggctccggcctggtcggcggggccgtccttggtaacttcctgaatggtacagggggtgccgaaaacgacgcccaggtaggcggtgtctccgttcgggatggggcgctgctctgcactaagggttcccagctggggccgtctggacgtacgggtagtggagccgttgctgactaccagggttcccatggcggcatcattgctgacagggccgggagcgtgcagcccggcggcttccactttcactactgcgatgtctgtggacgggtccgagccaatttccctgaactgcccatatttggaagaacctacccggatggtcagatccctgtaagaatggagttccgaggctttggtggcgatgtagccgtccgggctcagcacaatgccgtaaatcacaacatcgtgaccggaaaagaaaactgcgctcaagtcctgaagacgttcgcggatgggctcgatagttttcagaacggctttcccgttgattctctgttcaaaatccaggcttccgttatttccttccgccagagcggggtggaacagggcgaaaaccaggggagacaggcagacgcagaaaggaaatttcatgatggctgagtggagaatggctggctgtcctgttccggtgacggcgtcagggaggtctttccttccgctgtctcctccgtcagagcgtcgaaatctttcatgggcacgtgcagattgtcttccagaccggaaccgaccctgctgtgaatgccaatcagctttccatccaggttgaaaagagggccgccggaatccccgcgaatcaacttgcagtccgtctgaatgacgccgttcttgagggaaaccaccctccccaggcgcaccatcgggccgcgtttccggtccagccccccgccgtgccccagcgcgaacacccagtcccccacacgaggcattttttccgctttttccacgcagggcagttttttgttcaattgggatgtgattttggccatgcctgcgtccgaattgctgttttgcgccgtggtttttcccggaaggcgcgttccatccggcaggatgattttgagcgtggttcctttcttgtccacaacgtgggccgctgaaaagaccaggcctttttccgaaaccaggatgccggagccgctgccgttgtttaattcaatgcagaccagggcgggaagcacccggggaagcatttgctgaagctggcgttcaatccgctgcaaatcttctacggattgcggggtggaagccagaagaccggctccatcagcggactgagccgacgctggcggggccagcagcgctgtgccgcagagaatagcggaaaaacagggattccggagagccggggtcatgattgccggtaattattgcccagagacggaagtttccgtcttctgctgctggtcctcctgtccgccgcccaccagggaatcatggtaatacacgccgataaacaggcctgccagcgtaataagggtgatgaggagctctttcatgccgtcacagcatagaatgtgtattcgcgtctgacgagagaatttcattgataagccgcattttgatgcagttcggcagaacggggatgaatgcggatgagaaaatagccaaaataaaggttgctttttcccgtgataggcgtataaatccctcagcggacgtttccggttcgctggctcatttcaagcggatgtagctcaggggtagagcgcaaccttgccaaggttgatgtcgtgggttcgaatcccatcatccgctccattttttaagaatcccggccggtttgatgcgggaataatgagtttgcctgaacagtgatatttccgtttaattatttgaaggtgcggaaggaggatatggcggtcgtttatttctgcagaggtgaaacaagagccggatatcttgtttgcagcggggccttatgcgctgccccgcctttgttgatctcctccggaaggagaggaattattgcggaagtccgctttcctgaatgacgggagtttcccttggaaggacttttctttttaaaaaaagcgctgtcaaatatttacggaccggttcatcatagagtttcaggcagagccaggccagcagaatgcttccaatgacgacggccagggctccgggaagtgagtccaggaaggaaagcttttcgtttttcacccacgcatagtacaagtagatgaacgggtaatgcaccatgtacagggggtaggagatgttgcccaggaaacggcatattttatccgtatagggatttgtaattttgccggaagcgccaaagaggaggatgagcgggaaaaataccgcgaagcacgctgtttcatagaggctgttcatccagaaagcattttgtcctcccagccggggaacggccagcagaatggcaagggacagactgcataaccagaaagaatttttgacgttgaacggcttgaacagccggaacagcagcagcccggctgaaaaggagtacaacaggcgcagggagccgcccgtccattccgtgccggtcatggagaatccggagcatatgtctccgttaggcccccagaagctgaaggaggcaaggccgaacccggccgagacaaccagtattgccagggagcgtgtagagagtttccggatgaagagggcataaagaaggttgccgatgtattcaaagaacagggaccagctcgggccgttgagcgggtacatttctcccagaccccggatttccatgccgggaggagacggaatgagcagaatattgacgaaggtagcggcgaacagggagatgaccgctacctgcgatacatcccatacggggcagccctggaaatagaagataagcgcgccgatgagcgcccctatcgctaccatgggctgcaggcgtataaggcggcgtttgatgaattccctggtcgtcatcgttttccagcggttgtcataggcgtagccgatgacaaagccggaaagcataaagaaaaaatcgacggccaggtagccgtggttgatgatttggtccacatggctggtggcgtaggcttcaaagatgtggaaccatacgacgacaatggcggctacgccgcgcaaaccatcaagaatgtggtagtggtgtttttcactgcctgggggaatgggagaatgctgcgttttcaacatgagagaagctgttgttcgatgctgtttttgttttaatgtgaaaaaacggctgctcattttccgcctttccggtagatgcaggttctccggaggcgcagttgttgagctgcctaagcaaatacccttctttccggcagattctttcaacaggcgttgcctgtcttatccgtcggcagggcgatgagcggaacgaacggcggttttccggagggaagaatcacttatggctcggaaggtgcaggcaaccgggaaacccgtcaggatggaaccgtttttgtaagtctgccgggaagaacagggtgttgcttgctgcccgtccgatttccggaaacaggagtttcctgtccgattttctgcgctgcggcgttttttccggaatgggagaagggcctggcaggggcgaatgctcagcctttgcggtagtttacaagggtttccatatatattccggagatactgccgccgtccatgggggttatgtccttgaatgcggggttgatgggctgcagcacgtattccgtttttcctgtttccgcgtttttcctgcgaatcagttttttcagcgtaacgccgcgtccgtcgttgtattccacgatggttcccggtttggggatgggcggggcggtatggcgccgcataatcaccagggagccgtccgggatgaggggttccatggatttcccttctacgcggactacgtattcgtttttacccaggggcttttccatgtaaatggtagacgggacggtgtcgctttccgcaagagagcctgcggcgatgttgccgattatttgcgtactgtattcacgcctggcatgtccagcatgggacgggaattgtctgaccaggggaaccaggggggagtgcgttggccgcagctggcgttcctccgccgcttcgtccgccaaatccgtcagccactggcggagggggacacctttttcagaggcggcccgttcatatttcctcatgcgctcttccgtgatttccagcacgaggcgattggtctggacaggttcgtcttccggttgaaccgttttgtattgagacatcagggattggattttcaacatggcgctggcggggaaggggccggagggggagagccagttattcaccgtacctttttccgtaccgcattctatggcaagccagtcacggtttttcccaatggccttcaaccagtgtttcacatccccttttgtcggtgtcatggcttgataatacacgattttcgtgaattgtcgataaaaagaaataaattgaattcgttaaaatgtgttgacgttttaacgaaaatcgttaaaaaggcgctatgaagtacatgcctttagacctttccgtaatgcagccggagccgtttccgcatcccgtgatgatgaggtccgacctgtatcccagaagacagccctcccgggaagaaaagtggggcatttgccccggttccgtctgcggcgcgctgcgggcgctggttcgtcgatgctgggaagaggcggagcggcggaagctggcaatgaacattctttccgtcgccggagcctgcgttttcggactgatggccgtcggcgtgttctggctggctgttgagatggataattccgctttgcaggcttccaagtcttcctgttccataaaaccgtaagccggcccttgtccaaagggggggcggaacgcttttttcctgcggagcttgctttcgggaatgaacggccgcgtttgatgcctcccggtttgttttttccggttgaaacgtctgcggacgcatgaaaggttccggcaggaatgggcgccggatttccagaggggcttttttatccgcagagcaatttgaacgggagagacggggaagggctggagcttggatgactgcattatttgccggctgcatcacccgggttccggaaatgccgtccgccaatgccgttcctgtgcaggaatagcggttggtcatgcaggcgggcagtatggcgcccgtttgcgaagaggatgaagctgcggttccggatttctgtccggagggaaccgcataagatggagcagggatgcttttcctccacgtggccgtttcccgtttatctggcgcggtttgatttcattctggcgtggccgccgggaccggctgttgaaggagtttcctgaggcgcaagcgggcgcaggcctgtatgggaatcccctgtggtgtctgtcgtgccgggatgcgaggcggggatgatgcgacccgggtccggggcgcccatcattccgggcgctatggcgctggtcgggagactggcggcggaagatgccgcctggaacggcggccttccgcttctggattcattccgggtaaaagatgcgccttttgcggagaaagtgaaaaatgaagaggctttttccgattttgcatgttgagaaagaattttatgacagtcaatgtgtgttcattataaatgaattaaaaataatgaagcagaaagtgctaaaaatcttttgcattatagttactataaggaatagcctgaatgaagaaagaagaaggcatggtacgcggccggcgtcctttcccttctttttccggaatccggccatcgccgtttaaaaggcacaccatgaaaaacaacagactttttatcaaatcatcgccatgaccaagagaatgattaaaaatgcttcctacgaaggggaacgccccctgttcgcttcccgccatcttaggctggaagacgtcattatttatccgggggaatccgccctgaaggaatgttccgacattgaagccgtgcggtgcgagttccgggggaagtaccctttctggcacaatgacgggctgctggtggaacattgcctgttcagggaaggcgcccgggccgccatctggtattcccggaatctgcacatgaaggatacccgcgtggaagcgcccaagatgttccgtgacatggacgggatggttctggagaacgtcgttctgacggatgctctggaatgctgctggcactgccggaatgcgaagcttcgcggcgtgcaggctgagcatggggattatctgttcatgcacggggagaatatagatgttgacggcttccgcctgaacggaaattactctttccaatattgcaggaatgtggtgatacggaatgcggaaatccattccaaggacgctttctggaatacggaggacgtgacggtgtacgattccgtggtggacggggaatatctgggctggcattccaggaaccttcgtctggtgaattgccgcatttccggcacgcaggcgctgtgctacgcggaaaacctggttctggagaattgcacgctcggagaggatgcggatctctgctttgagtattcctccgtgcatgcggaaatcaaggggcgtgtgcacagcgtcaaaaatccgcgcagcggccgcattgttgcggaagagtacggggatattattctggacgagcattgcaaggctcctgccaattgctccattgaaacgggaaaagcccaatccggagaagccgcatgaagtacgattttgatactgttgttccgcgccgcggcacgaattcctacaagtgggattccatgccccgggaggatattctgcccatgtgggtggcagacatggatttccgtacggctccggcggtgacggacgccatccggaagagggccgggcacggcattttcggttatacacgggttccggattcctattatgaggcggttacaaactggtttgaacgccgccacggctggaagattaatccggaatgggtgatttataccacgggggtggttcccgcgctgtctgccgtcatacgggccctgacggtccctggggacaaggttctggtgcagacgcctgtatataattgctttttttcctccatccgcaataacggatgcgtggcggaaacctgccctctgaaatatgagaacggcagatatgcgctggatgcggaggagctggaacggaaagcctccgatcccgccgtcaagctgatgctcctgtgcaatccccataatccagccgggcgcgtctggacgagggaagaattggaggagatggccgccatttgccggagaaacggcgttttcgtagtggctgacgagattcattgcgaactgacgtatccgggccatccctatacgccgttcgcctccctctccgaggacgccctgcaccattccgtcacctgtatttcccccagcaaggcgtttaatctggcgggcattcagatagccaatatcgtcgcggcggatgaagaagtccggaagaggattgacaaggccatcaacatcaatgaggtgtgtgacgtcaattcttttgctgtagatgccctggaagcggcttataacggaggggaggactggttggaggaactgaagctctacctttacgggaattacgagattgtccgggatatgctggcagaacgtctgccgcagctccgtgtggtgccgctggaggggacgtacctggtctggatagattgttccgctctggggcttccctccgcagagattgtccgcctgctggaagaggaggggcgggtgctcgtcaacggcggggaaatgtacggggaaacggttgggtgcttcattcgcctgaacgtcgcctgtcccaggaagctgctgcttgaggggctggaaagaatcatccgcacgctgtgcggcctcatttccggaacacggacgtgcccgtcgggccctgcaggctcttaacagggagaacggttattaatcatcaacaatcaagttgccatggaaaataagatgacgagaagaacatggctccagtcttccaccgcagccctggcatgcctggctttgccggagtatgccctgggcgcggttgcggagaagggtggagcttccagggtctggatgacgaaagaaatttctccggaggctctcgtgaggatttacgaggctctggggcgtccggccgggggaaaggtagctgtcaagatcagcaccggggaaccgggaggccgcaattttctgagtccggtcttaattaaagacctggtgcgccgggtgaacggcaccatcgtggaatgcaatacggcttacggaggcaaacgctcccggacggaggaccatttgcaggctgcgaaggatcacggtttttccgatattgcgcgggtggatatcatggatgcggaaggggagttcactatcccggtgagggacaggaagcacctggaatacgatatcgtgggggatcatttaaagaattatgatttcatggtcaatctggcccatttcaaagggcatgccatgggcggcttcggcggcgtgatcaagaaccagtccatcggtgttgcctcggcagccgggaaggcgtacatccattccgccggaaagacgcgggatgtttcttccgtgtggaacaatctggccagtcaggatgatttcctggagtccatggcggcttccgcgcaggcggtggcggattacttcggggacagaattttgtacatcaatgtgatgaataatctgtccattgactgtgattgcgattcccacccccatgcgccggaaatgaaggacatcggtattctggcctcccttgatccggttgctcttgaccaggcctgcctggatctcgtttacgccgtcaggccgtccgaagggaatgacaacaggcccctggtggagcgtattgaaagccgccatggacggcatacggtagagtatgccgagaagataggtcttggcagcaggaagtatgaactgaaagagctgaaaccgcagcaggccgtttagtcggtcatttcctttttagtatcaaaaacaatagaaaaaactgtgatggaaaaagtgatgttgaacaatggcgttacgatgcctgtcctgggatttggcgtttttcagattccggacgctaaggagtgcgaacgctgcgtgctggatgcgattgaggtcggctaccgttctattgataccgcgcagatttacggcaatgaggaagccgtaggccgcgcagcggagaagagcggggttccgcgggaagagttgttccttaccacgaaggtgtggatttccaacggcgggtatgagaaggcgaaggcgtccattgacgaatccctgcgcaagctgcgcacggattatctggatctgctgctcatccaccagcctttcaacgattactacggcacttaccgggccatggaagaagcgaaccgggccggaaaggtacgcgccattggcgtgagcaatttttatccggaccgttttgtgcacctggcggagttctgcgagatcagacccgccgtcaaccaggtggaaacgcatgtgttccaccagcaggaaaaagtccgggaggtgatggaaaagtacggtaccagaatggaatcctgggggccttttgcggaaggtcgcaatgggtttttctccaaccccgtgttgaagggcattggagagaaatacggcaagaccccggcgcaaacagccctgaggttcctgattcagcgtggaattatcgccattccgaagacgacccaccgggaaaggatggaggagaatttcaacgtctttgattttgccctttcccaggaggatatgggcgctatcgccaggctggatcgcggagagagccttttcctgtgccaccgggatccggaatcggtcctgtacctgatcaattacgggaagcagtaattcgcatgaagttccagaaagatgatacgtcactcatttaaaatattttgtgtggctttttccgcctgcttttgctgtgcggggagcctgttggcagaagataataacccccatacggacaagatgatgaacgagaagctgaatttaacgcaagaatgggacaaagtgtttcctaaaagcgacaaggtaacccaccgcaaggtaagtttccgcaaccgttatggcattatgctggctgcggatttgtatatgccccggaatgttaacgggaaattgccggctattgccgtttccggccctttcggagctgtaaaggaacaatctgcgggcctttatgcccagacgatggccgaacgaggttttttgacgatcgcgtttgatccctcgtatacgggagaaagcggaggatttccccgctatgtcgcgtctccggatatcaatacggaggatttctgcgccgccgtcgattacctttccaaccgcgatgacgtggattcggaacgtattggaatcattggcatttgcggctggggcggcatggcggtcaatgcggcggctatcgacacccgcatcaaggcaacggtaacctccacgatgtacgatatgagccgcgtgaacgcgaacggctatttcgacgcgatggatgccgacgcccgttatgagcttcgcaaacaactgaatgcccagcggacggctgatgcgaagagcggttcttatgccctcgcggggggcgtgcctgatcctctgcctgcggatgcccccggatttgtgaaggattattacgattattataagacgccccgtggctatcacaggcgttcgctcaattcaaatggcggatggaatgtcacttcggcgctttccttcatcaatatgcccctgctggcgtacagcggtgaaatccgcagcgccgtgctcatgattcacggggaaaaagcccattcgcgttatttcagcgaagacgccttcaggaagttgaagggggacaacaaggagctgatgattattcccggtgcaagccatgtggatctttatgacaatcaagccggtgtcattcctttcgacagaatcggacagttctttctggagcatctgaaataaggaggccccgcatctgaatttgggaaagaaagacggaacgtaatgaaacgcaaggattttttgaagataacatccggtttggccttatccctggtttcccggggatgggccggggtgggttcttctttgctgtctgacggtccggggtcttcttccggggtgccgaagaagggttttcttggggaatcccggcgccttggaggcctggaagtttcctctatcgggctgggatgcctgccgatggtgggttattacggcggcaagtatgataaacaggagatgattgccctgatacgccgggcttttgacaaaggggttgctttttttgatacggcggaagtgtacgggccttataccagtgaggaatgggtgggggaggctctcgcccctgtccgcaaccaggtcaggataggaactaaattcggttttggcgtggaggaaggccgtccttcttccctgaacagcaggcccgaccatatccggcgtgcggtagaaggttccctcaggcgtttgcgtaccgaccacattgacctgctttaccagcaccgggtggacccggatgttccgatggaggaggtggcaggtacggtgaaggaactgatgcaggagggaaaagtgctgcatttcggcctgtccgaagccggcgcccgttccatcaggagggctcatgccgagtgtccggtgagcgccgtccagagcgaatacgctatctggtggagggaaccggagacgaagatttttcccacgttggaagagttgggcatcggttttgttccgtattgtccgctggggcgcgcctttctggcaggagccgtccgggaggacagccgttttcaaaagcgggaccgccgcgccactttgccccggtttactccggaagccctcagattcaacatgccgctggctgttcttgtccgggaatgggcggaacgcaggggcatgactccggcccagttcgccctgtcctggatgctttcccggaaaccgtggattgcgcctgttcccggaacaaccaatccagcccatctggatgattttctgggaggggcttccgtctgcctgtccgaaccggaactcaaggaattcgaccttgcctgttccagaattcccctgatggggcaccgggcggatccgtttacggagagccagattgacaagtagttttgccggcgcgtttccttccgttccggaaaaatgccgcgggactgtttgcggcggaaggatgttaagctatttttaagaaagagacatatgattctgattttcggagcattgctggcggtttacgttttttgccgcgctattttgccgctgaagctgaaatggggctggaagcttctgcttgccgccctgctggcggtggcggcattcaaattccacttgctgcatttgtttggaggccccatgtttttctccccggttttgccggaaaacgttctgctggcggccgcgtggctgttctccgttcttttcctgttctttttcctgctgctggcggcggatgtggtgcgggctctgtatctgctggttttgttctgcttgcggaggaacaggacggaaaggttccgcatcattggcaaccgggtgaatgttgctttgctggttttttccgccgtgctggcaactgtgggcatgattggaggcaccagagtgccccaggtgaaggaggaaacggttgccgtgaaccgcctgccggaggaggcggacggattgacggtcgccgtgctggcggatctgcatgtggacggcattacaagggaggagcgcattcggaagattgtggagcgcacgaacgccctgaatccggacatcgtcgtgattgccggagatttcgtggacgggacggtgcccgtgcatggcggcgatttgaggccgcttgcggatttgaaggccagatacggggtgttcggcgtgccgggcaatcatgagtattactccggttatgaggagtggatggagttcctgcccaccctgggcattcgtatgcttcttaatgaacacgcgccggcgggaggggaggccgtggtattggccggtgtgacggatcctgtggccggcatcatggggaaggaggagccggatataagtaaggcgttgaaggatgccccggaaaagggagtgcgcatccttgtctcccaccagccgcggctggcccgggaggcagctgcgcacggcgtggatcttcaagtgtccggccatacgcacggaggcatgattgccggggtggaccggctggtggcgtgttttaacgagggattcgtctccgggctgtacacggtgggtaatatgaagctgtacgtttccaatggggcggggatttggaacggctttcccatccgcatcggcgttccatcggaaattgttctgattcggcttcggaaagaataacatatattgataaagcagtttaggaagtgatgcgggcaggattgccggaattgttgaaaaaatattgacttatagttactctaatgtttagacagaaataaggaacaaggtcaggcaagggaaatgccggatgaaaccgttttttccggacgccttttgcctctccttttaaccggataaaaatacatgaaaacaatatcaatgatatgcacgctggccgcggccctgatgacaggagccggatgtttgggacaggaacaacccaaggtttccgcggaaccttccagggttctcattgcctattattcatggggaggcaatacgaagtacgccgctgcgcaaattcagagggcgacgggaggaacgctgtttgaaatcaagccggtcaagccctatccctccgaataccgggaatgcaccgtgcaggccaggaaggagattcaggaaggggttcggccggaactggccgccaaagtggaggatatgggcaagtatgatgtgattttcatcggcagccccaactggtggagcaccattgcacctccggtcgcgtctttcctggcaagttacgacctttccggcaagacggtgattccatttgtgacgcatgggggcggcggcatggcgcgctgtgcggacgaggttcggaagctgtgtcccaagtccaccgttctcaagggaggcgcttttgccggggaaggaatccggacgacgagggccgcgcttgtcaagtgggtcaatgagacgatttccatcaataaataatgattttatgaaacgaaccatcgcgggaatggctttttcccttgcctgtctgatgaacctttcagaagcccaaactataaatcacgataaagtggaaatggagaatggcaaaaatacgggcatgtgcgacaagttaccgatgcagcctgatggtatcgtccgtctctcaaaaatagaagtgcattctgaatatttggaggaatatgtgaaatgcgccatcgaagtgggggaaatctccctgcgcacggaaccgggcgtgttgaccatgtacgctgttgctgaaaaggacaatgcttgcagaattacgattcttgaaacttacgccagccaaaaggcatataagtcgcacatcgcatcggctcattttcagaaatacaagcaggaaacgctgcacatggttaaggcattggttttatccgaccagacgccgctgaatcctctaagcagtattactaatattattaaataatacaataatgaataagattattttatttctttcaattagttttttcataacaaatgctatggcgcaggaaaagatagtacagacggcgggacgcactcagttaggagaatttgctcccaaatttgcggaacttaacgatgatgtccttttcggtgaagtatggagccggactgacaagctcggtctgcgtgatcgcagtttggtaaccatcacctccctcattagtcagggcattaccgacaattcgctcgttttccatcttcagtcggcaaagaagaatggagttacccgtaccgagattgcagaaatcatcacccacatcggtttttatgccggttggccgaaagcatgggcggcatttaatctggccaaagacgtatgggcggaagatgcggctggcgaagacgccaaagccgctttccaacgcgaaatgattttccctttaggcgagccgaatacggcatatgccaagtatttcacaggcaacagctatcttgcacccgtttcacgcgaacaagtgaatatctccaatgtaacttttgaaccccgttgccgcaataactggcatattcacaaagcgacgaaaggcggcgggcagatgcttatcggtgtggccggacgcggctggtatcaggaagaaggaaagcctgctgtggaaattcttcctggaacagtcatccatattcccgccaacgtgaagcactggcacggggctgcctccgacagctggttctcccacttggctattgaggttcccggtgagaatgcatccaatgaatggctcgagccggtgacggatgaggagtatgccaaggccgtgaaataatgtggatacttccatgtgaaacaattacagcgccagcacgacagcttgcgctgtaattgtttgatacaaaattattttgagtattccacggcgccgttgctttcattcgcaatataataggatttgccggaggcgcccatgtattcaggaatagtctcgcatagcacaggttaagacccgtattcgacgaaataatatgaaaaatatattgattatcagcggccatacaaaccttgccgcatctgtagccaataagacaatccttgaaaccttgaacgaacggctgccggaagctgaaatcgtaaagcttgacgaactttatcccgattttaagatcgacgtggaagccgaacaacagaaattgctgcgggcagacatcattgtattgcaattccctctcttctggtactccgcaccctccatattggaacgctggatggaggaaaccttccgccacggcttttcacacggcagtaccggagacaagctcaagggcaagaaactcattctctctttcacaacgggagcgcccgaaacgctgtatagccgtgaaggggccatgggatacgcgatcgatgaatttctgccatgctacaaggctgtctgccgactgactcaactggaatactgcggcagtgtttatacctgcggcataagttacggcaatcatacgacaccggaacttatcgaacagcaaaagggagcatcggtggaacacgctgaacgtcttatccggttacttgaagcgctctgatgtttgaataatttcgacgctatggccttcaattgccctctatccgatgactgcatgaatttcatgtatgcggaggcggcaggaagcaaataagaacgcagagcggccgggattcctcattggaaatcccggccgacgtctgttgaggatttaagggagggtttattcctcaggcgcgatgttcggctcgctggcgctgatgtagttcagcggattgcagctgtccggcctgcggttgtctaaaagatcctgataaaattttttcttgtatttcaacacttccatttgttttttcaggattcggagctgttcccggagacttttctcctgcttgaagatcagttcggcgcgctccggaatggtggagtccccttcctggcacaggtcgatgtagtgcttgacgccttcaatcgggaggcccgtcatccggaggcagtggatcaggcggagccaccccagggtgtagtcggaaaacatacgggcattccctccgctgcgattcacgtccgggattaatccggcgttttcgtaataccggatggtgtaggctgacatttccatcatttccgcaacctgcttgacagtgtatctgggggtgcggtcataagaagggcggtaggtgccggatggatttttctgtttaatcatcgtgtgactgatagcttacagttactccaatatacgaggcgttgccggatgacaagttttttactgtgcttcacgggaataacgtatttaaaggccggggaaaacggcggtaactccattccgtggaggaaggatcgggctgtgcgtcggaatatcgggggaaggggggcaaatgagttgactggcttttcctccccgttacaatgaagcccgctccggggacggagcctgtaatgatgattattgcctccctttccgattccacccgttacgaaatgttgaatcccctgttcaggagagctttcgattttatcagggagattgctccggcaaccctggaaaccggccgccatgtcctggaggaagacgccctgaccgtgatggtgaatgaaccggtgatgaagaagcgggagaacgcccgcatggaagtgcatgaccggtttattgacattcacgtgcccctttcccgggaagagggattcatgtggaaagagcgcgcggagctggaaaagccttccgaaccgttcaacagggaaaaggacgcgcagcattatgatgatgctccggacacctcttttgtcgtgaaaccggggcagttcgccatttttttcccggaggatgcgcatgccggctgcattggggaaggaaagattctgaaactggtgattaaagtcagaacggcctgaacctcattccggaaaaacagtccggaatggagaacaggccgtttcttcaatttgcgggcgggagttgcgttattttccgtcttccttccgggcgtcctgtaaagcgttttccggaatccatacggccacattgccgccgtggacaagaaaccggccgttgccttccccgtcaatggagacggtttcctccacgttgccggtggcttccttccaagtttcccctgcgtgctgcttgcccacgttcatgactttgtctccatcctctccattggaaatgagcacagccacgccggaatgcgggtgctcttcatctcccacacgggtgaagccgatggtgttcgggtggtcaaagtagtaattttgttccccgaaagcatggtttttacggatttccagcagattgtcgatgatggcgcggtgcatgggcgggttgccgctcacaccgtaatagtccccgtagaagatgcagggataaccttccttcatgagcaggatgagcgcataggcggagggtttgaaccagtcttccacagctgattccagggaactgccccactgggaatcatggttgtccacaaaggtaacggccagcgtagggtggttctgaaccagggttccgtccagaattttggaaaggtcgtaatcgcggccctgcttggaggcctggtacatgttgtagtgcagggggacgtcaaacaggtccactttgtagcgttcctccttgaggtaatcgtccagggattccagatcctgtttccagtattcacccacggcgtagaagtctgctcccctttccttgcggacggctgccaggaatttcctgatgaattcgtcattgatatgcttgatggcgtccagcctcatgccgtccagatccagttcccgggatacccatattccccatctttccatttctttcaccacttccgggtggttgaagtccagattggcgaacataaggtagtcgtagttgccgttttcttcatccacgccttcgctccagcttttgccgtctcccataatcttgaaaatggaggttttttccgtgcgtgcgtcatagtccgttccggtgaagtggtaccagtgccatttgaagtcggaatatttgtttccgcggccgggaaagttgaagccgatccagccttcaatctcgtaggcatccgtaatttccttgtcgcggttctgctggtccacttccttggccatgaatttttccgtatagtctgcccctgctttgtggttcatgacggcatccagataaacgcctacatggtgttcgtgaagagccttgatggcctcctggagttcctgcctggtgccgtatttggtgcggacggtgtttttctggtcgaattcccccaggtcaaaaagatcataggtgccgtatcctacgtcattttgttccttccctttgtaggctggaggaatccagacggccgtaacacccatttcctccaggtggggggcgtcttccttcaacttgttccaaaactgtccgtcgttgggcagattccactcaaaatactgcatcatgattccgtttttcatttgatctgattccttgtcataccgttcgggttgtcgtgcttccaggggctgtccggtggaaaaagcggttttcccgggcgaggttccggatgatgaatccatacgaagcccccaacagaatagagttctgaaagtacggcgcgttaggcatactgccggtcttatgtcctgcaaaaatgccagcggcaaaacggtaggcgggaagggtttttctccgaaggatgggaaaaagcggtttcactcccccctgccgcaccccggaaagaatgggccgggaacgagggttcgtgtaagtaagacaggtgggaagaaagattatgcctttcccgtgccgggaaccaggtagtgcctgtttttcagccggtagtatttcaggaaccggcggatgaagagcagggtgacgataaaggaaagcacgtctgccagaggaagggatgcccagactccgtcctgtccccagaaacggggcaggaccagcaggaacggcaggaggaagagcatctggcgcgtcagggacaggaagattgccagacgggcttttccaatggcctggaagaagttcccgatgatgatctggctgccgatgagcggaaaggccagcacgcagatgatcagaccgttggccgccaggctgatgagcgaggcgtcatccgtgaagagcccggcaatgccgcggggaaagaagacgcaggccaggaatcccagcgtggtgaaggatgtccctgccagaactccgtatttgagggtgagcagaacgcggcccggcttcatggctccgtggttgtagccgatgatgggctgcattccctgagtgaggccgatgacgagcatggcgaacaggataagaatgcggttgatgatgccgtaggccccgatggccaggtcccccccgtgattcgcaagctgcctgttgatggcgacggtgaccgcgctgccgcagacgtttaccaggcagggagccatcccgatggacaggatgccggtgacgatggtcttgtgcagctgccagatgccgcggcggaagtggaccgtgctggccgcatcggaaaagtgtaacagcacgcgcaccatgccgacgacctgggcgagaagggtggccacggctgctccggtaatgccccatttgaaccagaagatgaaaatgggagccaggatgatgttgattcctacggaaagaagggtggagcccatggcttttttagggtagccggtagctctcatcacatgattgaggttgaagaagacgtacgtgacgggcaggcccagcaaggtaatgagcatgaagtcgtacgcataggtgagggtttgcccgctggctccgaaggcggtcaggatttccgtaaggaaaagaagcgtgggaatcatcagcaccacagcggcaatcagactcatgatgaggacgttgccaagcgtgcgctcagttccttcctggtcttttcttcccagccggatggagctgatggccgccccgccgatgcctaccagcgtgcccagggcgaaagtcaggttcatgatggggaaggtgacggccaggccggacagggccagaggccccacgccgtgaccgatgaacacgctgtcaatgatgttgtacagggagtataccaccatgccggcgatggagggcagggagtactggatcagcagacgccatacggatgcgttttccaattctgcgatgttgcgtgactgggctgccatagacgttcctcctttcaaaacaggtggcaaactataaaaacgcacggatgggttgtcaagctgtccacctgtccggaaaacggcctttttcccccagtttcagagagagggctgtttttgattgactgtggaagcttttggaggttgagtcctttccgcctttttcagaagcacgccatgaccatgtccgttttccctttcctgcgtcttgtctccgtttgcggcgccgctcttatgggttcttcctgtctgcccatgtttggcgccgggcaggtgctggcgggaagcagcctcgcggaaggtctgctgccctcttcctctctggatcttgtgtggaggggagacatccgttcttttccctcttccggtttgaggacgccccgcgggttcaaagtttctcccgcggattcttattccctgctgatggaagcgcgcccggggattgccggagagtgggcctgctatcatgaccgcagcaattactactgggcttttgtagccggaaagaaggaggaagaagcggggttttacgccgtgcgccgcggcgtggccgtaagcggcatttccggagaaattgaagatgcccccgccgtgcaggatgctcagccattctccgccatgtaagcacaggttctggtctttttgcaaaaaatgctgccggaaccccgttttccggcaagttggacacgataggtttgacaggcagctgttattgcgggcgtattatgaaccgcatgaagttccttttattatcgtttgcatgggtgtgcatggcttgcgccggagcatgggggcaggatacggccccgtctttcccggctaacggggccaattacagtctgtttccggcggaccggcctccgctggttcccaaaccccagcagctgcgctgggacgacagggccattcccgtgcagtccgtacgcattttggctccgtctccgtccaggacttcctatccggaacagatgaagttcattgtttccgaattgaaatcttttctggcggagcaccgcgtgaaggtggctccggacgggacttttgccgttaaattcgtcaagggggatgtgaaagccggcacggaaaattccaagctgaaggaggaggcttattccctccgtgtaactcccggcggcgcactcattacggcgatggataccagaggattctattacggcatgaaaacgctggagcagcttcttttgcgccgcggcgggacgacgaccattgccgcctgcgatatcgtggactggccggattttgaaatccgcggattcatgaacgatgtgggacgcaattacatgccgctgcctctgattgcacgggagctggattccatggcgcagctcaagctgaatgtttaccacttccattttacggagaaccccggctggcggctggaatccaaaatttatccggagctgaacgcccccgaaaattatacgcgcatgcctggcaagttttacacgcagaaggagtttaagcagctggtggagtactgccgcctgcgcaatatcctgctgattccggagatggatatgccggggcacagccagatgttccgcaaggcgctcaacgtgaagatgagcgatgaaaaagccaccaaagccctggtggccctgatcaaggagttgtgttccctggttcccaaggagaaaatgcccatcatccacattggcacggacgaggtgcgcggcaaggatgagcaggtgaacaatgagattcttaaggagtacatccatgcagtggagtcctgcggccgcattcccatgagatggcagcccggcctgacgccgaagggctataacggctccatccagcagttatggtccggccgccagaaccgtggcgcatggcctaccgacggagcgaagtatgttgattccctggagacttacctgaaccaccttgatccgtttgaaacggccatgaccatgtatttccgccgggcatgcccgtttcggaatgcggaaggactgggcatgatgctgtgttctttcccggacctggaaattacggatccgcgcaaccaggttcttcagacgcccgtttacgccggcatggcgttcgtttccgaacctttgtggaataatccccatgagaaggtgctgggagaccccaaccaggacgaatatatgaagtatttttccaatctgcccgtgcagggggatcctctgctgaaggggtttgcggattacgagaaccgcgtgctcgccatccgggaccgttttttcgtggataaggagtttaattacgtacggcaggcgaatattccctggaaattgctggggcctattcccaacggcggtaagacggaaaaggaattcgctccggaggaggacaacaaggcagggaagatgagggattcctacgagattgacggcgtcacctatgagtggtccggagacgattacacgggggccaccatcattttcaagcattactgcgattttccgacgctgttcaatggcgcaaagatgggagcttatccccacaaaaaccacacttattacgcgcagacctggatttattcccccaaggcgcagacggtgcctttctggatcagcggacatacctgggccacgtccgattggcgcaacggtccggcgagcgttcccggcaagtggtttcatgcggatcccaaattttttgtgaacggccgggagattgcccccccgcaatggaaaaagccgcgtaacagcggcgtgatggtggatgaaaactaccatttccgggagccttccatggttcctcttaagaagggttggaaccgcgtgctggtaaagagccccagcaacaattccgcgcgtcggtggatgttcacattcgttccggtgctggtgaaccccaagacgcccggctgcaatgtgaaggagtatcccggcctcaaattttccacacgtccggaatagaaaatcccgtgatgagcatccggagctggaatgagccggttgcagtatccgccatcatcattaaaaaagaagccacgcttctggcaaaagcgcggcttctgcttgcatgcaaaggacacggatacgaagttaagcgctccggcggcgcgttatcggagcggcaagtcccggcaggccaagggaagccgagtcctggtccggcacgggaagagccccttcattgtagattcaatggagcagggtaatcctgtattgtcacagtattttccagggaatatgttccaatagttcgtcaaagccgagccccgtgcctccaggaacagctgcctgagggtccatgcctcccatccggtctataaaggggtccggctcaaacaggaggtgggtgcagaggccgcagaggggaatttccgtgggcagggagttgcggtaatattccgccgcctggtaaacggcccagagctgccctacggggtgatccatgacggtggtgaagacgggaggttcgtaaagatattccggcgttgcttcccgtgcgggtttgacgatgcggatgatgggcaggtccgaggagatggccggctggtgttccacatccgaacccatgtccagggccagaggcatgccggcatctaccagacgttcccagctctggatggagaaggggcacgggtcttctatgaagtctattctggttttcagatggtggggcagggatttccagaatttcagggcatcgttttcattcaggcatccgttgaaatccagccgccagcgccaggagggaaccatggatgccagcatcgtcagccgttccagggcggcggccagattggcgctggccttgatttttcctgccttgaatcccttggattccatgatgcgaatggtagcggggctgacgcaggagggcagcgtggcgtggctttccggaatgtgaagaccgtcaaacaggctgacgccccgcgcgcgtgcttccccgtccgttcgggcgcactccgcggcgcggacgcccagaggcagagggcggcccttcctgagcgcgtccaattcctcttgcagggtggcgtctcccagttccggccacggctggatgcagccgtacccgccttcatccgttttaatgagggctcccttcctgcacacttccgcggctctggcgttcagagggccgcaggctgttaaagaatattcatggtaaaacacaactttaattcaaacaacctttccttcttttgtcacgatgaaaaaaggttttcattggattttggagggtgaaacgtctaagctctgcgtcatgtacagaacattggtgttcggggcggacggccgggtgggaagccgtctggcagcgtatctggaagaacatggcctggaggtggtgaagtgcggacggggcttttgtgatttgaaggatttaagcgctttgaaacgtgttctgctttcttccggagccactcatgtggtgaattgcgccgctgtgagcggattggaagcctgcctggatgatccggagacggcccaccgcgtcaacgccatggctccggagatgatggcgcgcatttgccgcctggagggcatgcgctttatccatttgagtacggattatgtgctggacggcaggaggagaggtttgaaaacggaggaggggaagtgccgccctgtaaatgtgtacggagagtccaagctggaggcggaattccgtgtgcgggaggagatgccggatgctctgatagcccgcgtttcctgggtattcggcaatccggaacggccctcattcccggaaatggtgctgcggcgggcgatgaaaagggagcccctggccgctgtggcggataaatggtccatgcctacatgggtggaagatttatgtgcatggctccgttttctggcttatgagagcggggcgtccggcgtgctgcatctgtgccagtccggagagcctgtttcctggcacagttatgccgtggccgtgctgaaatgcgccgtgaagcacgggttactgccttctttgccgcctgtggcggaacaaaagctcgacgaacaggccggtttcagggatgctcggccccggcataccgccatgtccagcgaacgcctctcttccctgatgaagcagcccgtgagggcgtatgaagaggccattgacatggccgtggcccgctatgccgcagatccaacctttctctccagcatttcatgaatgatttccacaattcccgtgattcccgccccaggcccgtttaccgggaccgccgttcccagccgggccgcccgcgcacagttcccaaaaagaacctttttgccaacaagtcgccggaagggagcgaacaatggctcaagccctgggtggagctgaagtatttcacatacaatccggccgtgttcccccgcatgctcggctccgtaagcggggaaatagcgccgggaagcctggtaaacgtctatgacaagaacggcgaactgttcggcgccggattctggaatgagtccagccgcacgcccctgcgcatggtgtaccacgggaaggacgtttttgccgaacgtgacctggatgctgcgctggaacgcgccgtgaagctgcgcagggaagttctgcgcctggatgaaaccactaatgcgtaccgtgtgctgcacggagattccgacgggctgggcggcctggtggtggaccgttacgcggacgtgctgagcctggaggtgagtacgctggccgtctggcagaggctgaaccgctggctgcccctgctgcaccgcctgtgcggcacaaaacgccatgtggtgcaggtggatgagggcattgcccgcatggagggtatccgggcggaggaggcgccggcatccccggcccccgtcaggctggtgaagattgtggaaaacggcatcacctatgaagtggacttcgcccaggggcacaagacgggctttttctgtgaccagcgggacaaccgcctcaagttcgcctccctggtgaagggtgccacggtgctggacctgtgctgctacagcggcggcttttccattgccgccaagatgctgggcggagcggcggaggtaacggctgtggatttggatgagaaagccgtcgccatggctaaaagaaacggaaatatcaaccatcagcgcatcgacttcgtgcatgcggatgcctttgtctatgcgcgccagatggtgcgcaacggccgcctgtttgacgccgtgctgctggacccgcccaaattcatcgttggcagggacggatatgaagagggcatcaaaaaataccatgacctcaatatgttggggctgcaatgcgtgcgtcccggcggcctgtttgtcacctgttcctgttccggactgctttcccccgcagagtttgagcataccgtcatcaaggccgcccagcggcaggggcgcaagcttcagattatggcgatgaccgatcccggctgggaccaccctttcctgagcacttatccggagggccgttatctgaaggttctgtgggcaattgccctgtagcaggagattgaggcccgggatgcatttcggaaaaacctttcaggcgtgttgacgttctttgcccctctctgctttcgtggtgaggaatatggcaaaacaagtattgcagcggctcagttttacggccggggagctgaccccgtggctggccggacgcgccgacctggatcccgtgtcccgtggtgcctcccggctgataaattttctggtcagccccttcggcggtctccggcgcaggccgggaacacgcctggtcgcccgcgcgggatgccgggagggcatggtgaggctggtttccttcaagtactccacgggcgtgcagttcatgctggaagtggggcgcggctacgtccggtattttaaaaatggcgcgcttctgacggatacggaaggcggggtgctggaaacgcttactccgtggaagacggatgaacaggtaagcaacctccggatgcagcagctgaatgacgtgatttactgcgtggaaccttctacgccgcctatgacgctggcccgctacgcagacgatgactggcggctggaagcgttggagttttccggaattccttatgagagttccctgttgaatgccgtgcggctggaatgccgcatggtgcgggaggggagcgtcaacaggctgctggcgacggcggacgatgatgtattcactccggaaatggagggaaaggagtttctgcgcatcaccaggaaatatggagaaaccgtggcggagggaaaccagatgcctttttaccatttgacgactctgagccgggacctttacaagggagagactttttccatgaaccgggaggacggctggcggcaggcttatacctgcatccgcgatttcagccgggaaagcgactaccaggaaggggtgcaccgcccggagaggtacacggccttttttgaaaaaggggccgatgccagtacccgcatttatgtcaacggcgcgtggacgttggagacgacggggacctgggatgcggagtgggaaatctgccgggggtatccggacggctccaattaccttcccaaccgtccggaattagtgtggcattccgtgaagagcttccagcagagggaggggttccggaataatttcaccctgagcggcaatgaagaggaaatgtcctactacaaaatccgcctcatggcttacaaggacgggtcttctgcgggaacgcccgtattccgcgcatcagccggctcctttaaccatgaagtggtggtggaggaatatgtttccccgcgcagcgcctatcttgcgagtgcccttcatctgtcctatcatacgctgagtgactgtgataccaatgactggtcttttggtgcgttcgggatctggaacggttatccgtgcacggtagagttccatcaggggcggctgtggttcggaggcactcctgggcagccccagacgctgtgggccagcagggtggatgatttttccgcgtttacgcccggcattccggcggattcccccatgattctgacaatggccgcttcccagcagaaccgcatttcctggatagcttccctccgggggctgatgattggaaccagcgagggggaatggcgtctgtccgccaccaattcagaagggttgaatgcctctaatgccggatttgagcgccattccggcgtggggtctgcctccctggatgccctgtctgtagaaaacagccttctttttgtgcagcagggcgggatgaaggttcgggaattattttattctctggaggccgacggttaccagacaagggatgtgagcctgttgtccgaccatttgctgggggagggaattgtggactggactgtacagaggagcacggcgttccatgtctggtgcgttctgggtgacggcagcgccgtatgcatgactctgaacagggaacagaatgtggtggcgtggcatgcacaccgcctggaacacggccgcattctgtccgtggcgtccctgcgcggttcccgcaacacaccggacgaggaagtatggtttgccgtggcgcgcggggaaggggaggaggcctgcattacggtggaatgcatggcggatgggaatgcctgcctggatgcctgcacggaggctgtcgtgaagggggagacgctgtccggcctgagccatttggcgggatgcggcgcctttctggtgggcggggacggcgcatgcatggacatcagcgttgacggagccgggaatgccgcctgtcccggaaggggggatggggaaacagtatccgtaggcctggccgctccggcggaagtaaggacgatgcccctggaaacgcttgagacgctgggttgctttaaaaagcagctcggtgcgcgcgtcctgcttcatgaaagcaccctgaaattccgctacggaacgggaactccggaggcatggaaggatttccagcccggcaggtacggtgtttccgaaccttactccggctatgtgcggatgattcacaactatggtatggatgagcagtcttcctttgccctccgtgtggagactccggctccatttaaccttctggccctggtgctggatgtggaattataggcgcaggagtgcgtttacggctgttcagccgcctcttcatgggaaagcatgtgcacaatgaccttgatgccgtgtttttccccagccgccttcgccagggaacgaatggcggaggccgtcattccattgcggccgatgatgcgtgccacgtccgttttttccagaatcaggcggaagcggacggcgtctccctgcggggattccgcaacgcgcaattccgcctgttccgggtgttgcacgaattgcagggcgatcaattgcaggtactggcggatttgttctacggcaggatgcatgaagggaaatatgggttatttccatgaatcctactataaagccgcctgattgaaaagatgcaattccagacattccctgaaaaagaaagtcgccccggccgtaaaacggccggggcgccccaactaccctatgaaactggatcggttaagatccagagagcttttttaacgagcgctcacctgctcgaggcgcaatatagtggaggaaaaggggatacacaagtattttttcattggaacgatgtttttgttcaatggaaatagcaccgtatttttatttcattttgacaatatcgggatcggaggaatggttattgttattgtcatgaaatcatcttccgggaagcagttcatacgtgaaccccttcaggtattccgtttccggaatattcaataaaaccggatgatccgctctttggccgtgttgctgtatcagacgcagggtggccggagcatcaatggcggcgtcaagcacgctctcccggaacaggtccgctccggcgtggtgggaacagcagaaggtggaaaggatgcctcccggagccagaagcttcatggcgcggaggtggatttccttatatccgcgcatggcgtcatgcacggattttttgtttctggtaaaagagggcggatccaggataattaaatcccatttgtgttctcctccgtcccggacaagggccgcttcctttttcaggaagtcaaacgcgttatctgtgacacactgcacggagactccgttcaggcgggcgttccgcgctacggcgtccatagcatcctgggaaacgtccacggccgttacctccgaggcaccggcaagggcgcaggccagggcgaaaccgccctggttgcagaagcagtccagcacgcggcgtccgcgggcgaagcgagccacggcggcataattgtcaagctggtccagatacaggccggttttctgtcccgtctgaaggtcaatcatgaattgcacgctgccgctgcgtgcggcaaaaggttccggttgctgtcctcgtgccacccggacggagggggaaataccttctgccgccagcatgggtgaatcattcctgacaataatcccgcggggagaaagaaggtcttccaaaacattcaggatgatggggaggcggcattccatggcgatcgtcagcgtctggacgaccagataatccgcgtaacggtgcacaatgaggccgggaagcccgtcggattcgctccaaacgagccgggtgagagtttcttccggaagccggcggcggcgcagttctactgcttggctgatgcgcctggaaaaaaaatctccgttcagttcctgtttgcggcgggaaaagcgcctggcgacgatctgggaatggggattgaacatggcggaacccagaaagcggtccctgaaatccttcagggccacgacgtcccccggctgcggattgccgaaaattttgcgcacttccgtgccgtaaacccagtcgtgcccttgaaaaatgcgtgctcttggagaaataatcaaacctgccatgtcaggaaaggcaatacatgatcggggtggaaagttcaagggtaatgcgggcggctcccagaaaggccgcggaaagggtagaggcctccgttccctgggatttttcgcgcaagtacgccgcagtgcatcattccgggactatttcggttgaaaatgcccggaaacgaagtaaaatagggcgcgttatgaaagtagaaacttttgaaactccccaggatgctgccaaggctttggcaggagaagttgcggaattgatccgtacgcgcgccgctgaaggcaagaacgtggttcttggccttgccacaggcgccactccgctgcctttttacgcagagctggtccgcatgcataaggaggaaggcctttcctttgccaacgtgatttccttcaatctggacgaatacagcggcttggatcgcgaccatccggaatcctactggtacttcatgcacacgaatcttttcaaccacatcgacatcaagccggaaaacatcaacctgccctccggcacggtgaaggatgatgaaattgccgcccactgcgccgcctatgaacaaaagatcaaggattgcggcggtatcgacctccagattctcggcattggccgaactggccatatcggctttaacgaacccggctccgatgataccaccgtcacccggcaggttcatctggacgaactgacccgttccgatgctgctcccgctttcggcggtattgaaaatgttcccaccaccgccattaccatgggcgtggctaccatcatgggcgcccgtgaagtggctttgatggcttggggagaaaagaaggcgtccatcgtgaaaaaggctgttcaggggcctgtgacggtggatgtggccgcctcctaccttcagaagcatccgaacgccaagttccttctggacaagggggctgcttccctcctttaattttacgttttagtaacggaaatgccgtctttcccggtttcgtgggaaggcggcgttttttatgggatgaaggaaggcggaagcttcttttttccatggaggttatatgggaaatgccgcctatgcaggcaaaaggagaggggtggaggttgtgcggggaggattttgtatcatcgtaacgaaggtaaaacctgcagtatggcaattgcagaggaatcgacacctcttcagctctccattgcggatacctcccggttcagggaaggcagaatcacagtccgcttccgcaacgaaggaaacgagcctgtccggattccggacgaaatcaacgatgagacggctgattatttcttcctgacggtgttgaggacggaacgggggaacttccgcgtcctgaacaggacaggcgggaaaataaccttcaatcgttccttgaactaccgggaactggcccccggccgggaatacagcgtcacgattccggtatgcctggatgaagtcgatctggaaggctggaaacaatgttcttgtgaactcgaaacgtgctactataatcagcagggtgaaggttgtttccgggggatgctccgggcgacggccaggctcgcgctgcaatgaaaaaaatcttccggtatttagtacttctggcaagcctgtccctccatgccgcggcgtggggggacatggccgacaacggagtggaatgctccgtggtgatggaaaagacccggtttgacgcgagggagacgttccctgacttcaaactggtgttcacgaacaagggcgaaaagaccgtgcgcctgttcgacgacttctatcccctcaaggatgacggccctaatatccgtatcgaaatatgggaaaaagcgggagggaaaagatatgggtacagagtgggcgaaatagagaatccaatagcctgttatggagccgggtataaaatcgaacgggtagcggctttgatgcgcttcattacgttgaagccgggagaaaagcatgaagtccccatcaaggaagcttacctgttgctgatgtattttgaccgtcttcgcaatggtcagaactatgagctggaagtacgtttcagggatgaaagttcgtatcccgatgctcggagggtgtatgtagggaaggcagaatttagtttgtcgcgccggtcgcccaaaggagttcctcggtgaataatccagactgttggaggacatagcctattgttcagccatttgttccctgattatctctgttccttgatacatttttttattatttctgagaaaggacaggttagttgaaataggtgaattaagggctcaatggcctgaaacctaataacgacgggggagaattgggacgatgggcgtagctttctccttatcattcgaaaatgaagttatgaattatcgtggaagaaatcttcatcacctgtgaagaaaccaaggaagtggaaatcggttttgaaggaatggaaccggttattgcagacgaagcatggaattgcatcactacgcctatcattcccagaatttttgtgacggcgtgtaaaggatgaagcagccgatgtctggaagctccgtattgagggagcggaaaggcgatccggcaatgtaggcggtaatttatcagtcccattgtcttaaatgggattccaaatttattggggtatcaaaaataccagtattttcaagttttgatcaaggaggggaggtttgtggactttgaggcggaattatgggatgacaacaggtttgaggaaaactgttgaacccgtccacggtgtgccgggaggatttcttcggacaggaaaaggccggggctatttgagccatgccaggaattcatggttgccgtccgtccccgtgataggggaaggttcgcaccccatccaggaacggttcagctcctccgtgacgaaagtgcgtatggagtccaccgccctccggtgcaaagccgggtcccggacgatgccgccggggcctatatcttccggctggagttcaaactggggcttgatgagcaccagggcatcccccccttttttaagcagaggaaaggcggcgggaaggatttttttcagagagataaaggagacgtcggaaacgatcagatccacttgttccccaatatcctccggagtcatgtagcgggcgttgaatttttccttcacaatgacgcggggatcctgccgcagtttccagacgagctggttggttcctacgtctatggcatgcaccctggcggctccgtgctggagcaggcagtccgtaaaacctccggtggaagccccaatgtcaaggcagaccttgccttccgcagaaacggggaaggcattcagggctccttccattttcaggccgccgcggctgacatagcggggacggtttctaatggtgatatccgcgtcttcattaaccttgagaccgggcttggtagagggatgcccccccacgctcacttctccggcaatgatgagccgctgggccagctcccgggattctacgagattgcgggaaaccagaaggatatcgagtcgttgcttgctcatgattcggaaaaaggtgtgaacgcaggtatttcatgaaaccgcatgaagaatcaagaaaaaccgagcacagagaggcattcgggcgtaaaaatgcggcattcctcgtactggagcattttacgattgattcaaggccggtttataggagactctgcggcggatggaacaccgctacaggcaattgatgcgcagagtcaggctttacctgctgacggaggtgcgcaaaaaatcgtgggcaagcaagttcctttccgccagggtttttgattctgtttactggtcatgggacaggcaatccgttgcaacgggagctgcctggggggctgccgcagcgattgcccctcttcccatgcagagcctgtggggcgttttcgcctgcctgtggcgcaagggtaatattcccgtagccattctgatggcgtggctctcccctcccggctttaccttttttgccattcccgctcaatggtggctggggtggttccttttttcgattttggggttccctacgtccggcgcgaactgggagatgctgaaagcgggggttcagcagtggtcctggacgccgtttggcggattgagcatcggcatggtaagcctggaattcgcagcgggctgggtggtttccagcgttgttctgggcagcctgtgttacgggctggtgcagttgggatggaggatgggccagttcctgcacagcagaaaaaagagcggcaagttgtaatagaaaaactgccgtctgtgtaaggcagggcgggaccggaaagccgggcagtccggaaaaatcagacggctacttccatcagcaaaacggttgagttctggagggcttctatggagacggtttccgtatccgtaattccggcaccgtcccgactgtgcaatatggcatctcctatttttatttctccgtctatcacgaagatgtatacgcccgtgttccgtcccttgaattggtattcccgttctatgcccctgtccagctccgcccaggaaaaccaggcctgctgcatgatggaaatatccgtttccggagccaggaaggtagagatttcattatgcttcaacaggggggtgatgtcgtaatcccggtatctggggggcgtgttgatcctgtccggaatgatccatatttgcaggaattccaatggttccgtgaggctgtcgttgaattcgctgtgctgaatacccgttccggcgctcatcacctggatttctccgcgcgtgatagtatggctgttgttcaggctgtctccgtggcggagccttcctttcagaggaatggaaaccacttccatatttttgtgcggatgagtgccgaagccttcttccgggagaatcttgtcgtcattgagcacgcgcagagctccgaattgcatgcgttccgggttgaaataattagcgaagctgaatgtgtggtatgtatccagccatccgtggttggcatgtccacgggaggatgcacggtgaatggtaatgttcatgattgatatagggggagtgggagcggttttccgcttgcagagtgtttgaccggctgcaactctgggctgttcaaggcgaatgacattatttccaggaccgtaaaataaatcggcaacacaaattggtggtgcaatgtctcttcttttagggtagcgtgctgcagtacccgtgcaaagaagacaaggcttatggctcagcggacatttatgagatggatcaaaggactgattcccacagtgattattttgctgggggcgttgctgctgggctgcatatgctacatctctatctggggggtgccttccttcgttgtgcagcgggtggagcaggctcttctggaaaagggcattccctcccatatagagacgctgaaagttactttgtggccccgtgccgttgtgacactgaaaaatgtggaattgctggatccggaggccatgccggaaactcgccggcccatagttctgctgcatgaggcggatgtggcgctgaattggaaaaaactgatagaaggacaagtagtgccggagcgggtgaatgtgaaggggatggacgtcactctgcccgtagatgcggggaatccggaaaaagttttttccgtaacgggggtgaacgcggaattgaatctggggcggcccggcatggtggacatcgtcaaggcagatgccgttgtgcagggcatccgggtgacggcccagggggcattttccattggtcaggatgattccggagactttacgctgacggctcaggatatgggcgccgtcagagagcagttgaatcaggtcctgaattacatggaccgggtgaagtggcctgatgcatctcctccccgcctgattgtcaatttaagcgacgatccgaaaggcggcgtgcgtgtaggcatggatttgcaggcgcctgttctcaggtacggaaaaatcatggtcagggatttcctgttcagcggggattacgcggattccgttatcatggccaaacactttaccatgcgggatgcggaaacggccggtttcgtcagcctttccctccaggccgatttgaaaaagcgcacgctgatctgggatgtccgcagtacggctcctctggtctcctgggcggtggctattgttgatgaagctctggtgccgaaggaaatgaagtttctgagcgagccgcatgtacagatatccggtcgtgcggttttttcggaaaattgggaaggcgtggaacatctgaatgctttaggttccggatccatgggagcattttccgtgcttggggaaaaattccagagggcctcctgcgatttcagttatgaaaacggtaatttttatgtaactgatttggatataaggcatcccggaggcagtttttccggcaaggtaatgggagtggacggagagattaaggtagacgttcacagcacgctgcctatgaaggcgatgctggggatggcccgttccattgccccggaggatgcgaagctgccgccagcgctggaaatcaggggagacccggaattgaaggtgtacggttccgtggatatgggaaaggggtggaaagggccgttccaggtgcaccgcctccagattgaggcttccgtggcggatgtcttttaccagggagtggaattcgtttccgctgcggccagggcggaattgattggccgttccattaacgtcacccaattggaattggtgcgggatgacggccgggtgaagctggaaggaagctatttgggcaccgaccttgtttttacgctggaatctaatctgaagcctgaactgctggagactctggctggaaattggttttctgtccctgaaaatttgcagcttccggaaaaagcggttttatgggtgcacggcaggctggatattccggagggcaagcctgtggagccgactctggtccgcgcacgcatccatgcggagaatcttgcctggaacaaggttcctgtcaaaacggcggatgtggaagcggaataccgtcccaaccagctttttgtgcaaaattgccggatggaaatggaaaagggcgtctttgaattgttcgccaacggttttctggacggtcagatgtttgtgatggggcagtccacggttccgctgcaaacgatagaccaattgttgagcatggaggatgacgactttttcatgaaccgctttgtcttccgcaaggattccggcctggagttttccttccaaggaacgttgggtctgtacaatctggaaaaggcttacgacttgcaggctactgtttccgcaaccaacacgcgctacaggggggtggacttgaagtctgcccgggcggatgcccatctggtgacggaccagctggtgctgaccaatgtgacgactgtggtttccaacggaaattacctgtcttccgtcggattgtccggaggcccttcggaatgcacgctcaaggccaagagcatagatttccgttttgtgcaggatacggtggaagtgcttggtctagaggggcaggcctatcccggctataccctgcggatgttttccgatagtgccgccagggttttgaaggagtttgtctttacccggcccgtaacgctttccggcggcggcatgtttccgatgggggatgacatgaagctgatgaaggggcgcatccgctttgacgcttccgccgggcgcgtgcgctatcccctgctgggaaccacgctggacctcggaaggacaaagggggaagtgttgatttctccgcaatgggtggttgtggacaagatgatgggaaccatctgggacggaaccttcacgggccgcattctggcgcagattgatgatggggatgccctgaacggttcttttgtcctccaggacatgaatttgacgtctatcgggaaatcctatgacaaaaaaatggagaaagccactgtgcacggagccattgagttttcatccaagggaggcaatatgaattctattcaggcgaagggggaggctgccctggtgcatggcgacctggtggaaattcccctgttcggatttttgggggaagccctctctaattacattccaggactggggcatctgattaattacaagatatccagggccgattgcgatttttccattgagaagggttatgtgcgcaccagtaatttcgcggcccagggaagcaacatgtctctggaggggggaggctggatacgcctttccgatttgcaggtcaattcagatttcaagctggggcttcgcggtttgccggggtttattacttccccggttttcctgttggccggagggctgtttcaagtgcggggaacggggcctttgagcaatgtttcctggaatttcgctccgttttccggagggaaagcccccgttcctcccgccgcggcgcctgcccggaaaaggtagggcagacgaaatatttgggtgttgcgcaactgccgtaaggagccgcatgccttgcagcaattgaaaataacagataccggatatctgacagaagataaagagctgtaaattcagaatgccccgtttacggtgctttccctcaggaaaaggagttcccggagaaatttttcttaaaccagagtataggcggaaacagctgtaatgctcaatttctgtaggaaagaccagtgaaacaggaggtttttccccgggaatgaaacccggggctgaacggtgccggagcgtaaaaacgtatgaactatggagccggaaggaaatatccccaccatgcaatcctgaagaaggtgcaggagttccttcatggaaaagacaggctgccggtttccgttgaagtgccgcgatttgcttcggccgttctcctatgtgaacgcccgcctgcatgttccatacgggtagatcgtgcggttcggtacgctgctggctggatgggaataagccgattccggggccggatcggctgttcccggcagggcggggccataatggcgttcttttactgaggagaggatgtggctttaccggaaatagtctgcggcaggagaggcggttttaacgggtaaaaaagcaaataaggcaggaggtgttggcgtaaaagaaggaagtttttattccggagtgggtccgttaaaaacggggcggctgaactgctccagccaccccgttgaaaaagggagttatttaccggattttcccagtttgtacccggcgtaggtttccgtgttgtacaggggctggttgtccggcacggcgtaaccgatggatttgcgaatggcgaggaagtccgccacgccttccggccccacctggttcagaggtgctttgtgcagtccggccatcagcaccatgcggcagtaggcatccgcattttccatgaaccattccgcttcttccacgtcacgtgctccggtaatgactccgtggttttccatgaaaacgacggtggattgtctggctgcttccgccacggcccgggccgtttccagagagccgggcgttccgtaaggggccagcgggatgtgtcccaggaagatatccgcttccggattgatgccggaggggggaacctgcccggcaaacaggaaggcattgcagtgcgggggatgggcatggatgcaggcattgacgcccacggatttcatcatggcaatgtgcgttttcacctcgctggtggaggggcggatgcccgctttctggcgcgcgtccatgtccaccatgcagatgtcttccacagtcatgaagcctttggaacacagggtgggggagcagagcagcaggttctgagccacgcgcacggagatgttgcccccgttgccgtccacatattcccggttccacaggcggcgccctatgtcgcacatgcgttccttgatgaccagaatttccggggaatggaagaattcgttcacttcctcccgcgtgacggggttatatttttcccatgggaacactttgtccggcaggggaggggagattgaccagtcttctgacatatttagtagcgtgttattggttgaacttttcgtaggcggcttcctgggaacccggcatatatgtccggtaggtgatgccgaaggcggcccgggcctgctccggcgtagagtacaccccggcgcccgcaaaggcaaacatggatgcgcccaataccgtactttctgacacttcagagactttgacgggaatccggagaatgtccgccctcatctggattcaaactctgtttctggcgcctccgcccaccaggatgaggaattcgcttttgaagccgcccacggattccaaacggcgcaggcgggatttcagccgccaggtgagagcctccatggcggcgcggtagatatggccgcgtgttcttcccagcaccagtccgttgatggagcctttccggtctccggaagccaggaagtccggaaccattgtcacgccgtcgcagccgggtgggacggcggccgcttccgcatccatggtgtcataggattccccgtgaaagcaggctgctttcacccattcgataatgccggagcccagccattggagcccggggttaagaaggccggattccgcgtcgaattccgccgtggcgccgtcttcataatcttcccgggccagcctggcctgtgcggagcgcgccatcaggatttcccatgttccggaggaaaggacgggctggttcttgtctgctccggaaccgaaaatggcgaattgggtgtcgtgcccggcggagataacgggaatgcccgccagggcctggagattcatcgcgtctgccgcttccggcgtaaggaggccaatggtttcccctgcatccacgatgggggggaagaggccgcggctcaaaccgaggcggttcaaaatgaattcggaaaaatctcccgtttccagatccgtgagctgggaggtccctgccatggtccggtctgtcgccatgatgccggtgagcttgtaggccagcaggttggagatgaagagccacgcatgggctttttccagaagttccgggcggttttccctgagccagacgagtttgtaaatggtgttgaaagcaaaggcccccacgccggagatacggttaagttcctcttgggagatatatttgccgatgtttttcatgacctccgccgtgcgggggcatttccaggatatgacaggatagagcaggttgccggcgtcatccaccagtgctccgtccacaccgaaggtggtaatcgtgacggccgtcacctgttccgcatttagcccttccagggccttcacggcacattcggagagctgtctgaaaatcaggtcggcatcccagacgtgaaatcccggattttcctcaccgggcagcgtggcgttcggctgtgaggccttccccacaatgacgccttgtttatccacaaccatggcgcgcacattagtagcgccgcagtccaagcagagggagtacatgagttaagatttaatagtgaaaagttaataggaatccggctgagcttgttgagttggtttgttaatagaaatgagcattttagggatttctgtgctgtcctggttgacagaggaagattccgtttccgtcaggcttcccgtggcgcgcagcagtttaggccgtgcatgcgtcccggaatattccttcagggcgatgcggggtttggaaaagaagtcccttctgcggctcccgtaaacagcttcggataaattggcggcaatgcccgcaccggaacgtaggagctggctgagcaattcccgctcggcgtcctgctttttcaagtgcctgcatcattgaataatgcggactgcgaaagaaaagcttttcgcggaaacgggactttctgccatgttttatccgaagctgttaactattacctattaactgttaccttttcgttttcagtattttccgtataatggcccgtagttggcgcaggcccggaaatcagctccttccggatccgccgtgccgtggagaccccaggcagaggggcggtagatttggtcatccggaatgttatgggcgtatacgggaatgcgcagcatggaggccagcgtcaggatgtctgcgccgatgtggccgtaagtaaaggctccgtggttggctcccatgttggccatgacgctgtacacgtccgtaaaggctcccttgccggtcaggcgcggggcgaaccaggtggtcggccagcccgggtcagtgcgttcgtccagggtcttgtgcacctcggcaggcagatcaacagaccagccttccgccacgatgaggacggggccgagtcccttgacgatgttcaggcgcatcatggtgacaggagcgccgcccctggtgacgtagtggacggagtagccgccgccgcggaagtattcccggttggccgggcaccagacggcttgttccatcatggttttcgcatcgtccggagtgacgtcccagtgttttttcatgacgggctgtccgtccttgcccgtgcaggccatgcagccgtccagggcggcggagccggaattgatgaggtggatgatgccgtccttggcatggccttccagcgtataacccgtgacgcgctttacggcttccgggctccagtaggtgcgaacgtccgcgaagacattggcctgtccggtcagcagatagccgaagaggaggcaggcgccgttgagagagtcattttccgtggcgaagggaagcggggcgcgcgggccgttccagtcaaaggtggagttaagcagggtttccgcgatgtctccgttcgggtagaagtccgtccagtggcgctggccctggaagccgccggcaatggcctggtaacccagggattcttcttcgcggtcgattttcttgagtttgggattgccctgcatcatgtcgcgtaagatcatggccatcagcacgctttccttgaaggttttgcggcgtccggcttcatccagcttcatatccggacggtttttgtcctcggcgaatttaaagacggaatccgcccattgcatggcgaggtcgaattccgcttcgtcataaattttctggtccatgcggcggcgcacttccgtcatgtccacggcctgtacgcggatgcccaggtaattttcccagaaagactggtccacaatggaaccggcaatgcccatggagcagccgccgatggaaagatagccttttccgcggagggtggctacggcgaggccggcgcggcagaagcgcaggattttttcagctacgtcttccgggatggaagtatccgtggcgtcctgcacgtcttttccgtagatggagaaagccgggaatcctttctggttcaggccggccagcgcagcggccagatacacggcgccggggcgttccgtgccgttgaagccccagatggccttgggagtgaacggatccatgtcaaatgtttcactgccgtagcaccagcagggcgtaacggccagggagactccgacgttgttggccttgaatttgtccgcgcaggcggcggcttccgccgggccgccgatgcaggtgtccgcgatcacgcatttgacgggttctccggaggcgtggcggatgttggcctcaataagggcggcggccgccttggccatgttcatggtttgatcttccagggattcccggacgccgaggcggcgaccgtcaatcgtggggcggataccgatggttggtaatgctgttttcatatcttgcgtaggtgatgtgaagctggttcatgcctgggcaggcttttcttcctcttcctttttcagatgagtgttgcggaagaagaagccgtaaattagtaccacggcaaagcagatgatgggaataaagaaggatgaccgcaccgctttttccacgaagttttcctgggccgtctggaattgcttcatgtccaggggcagggcgatgaggttgtccagcacttccgcctggtttccggataacgtggagagagccggaatcagggagaattgctgaatttgctgttctcttccggcaggagcggggaggcgttccagattggctttgaaaacggccagttccccaggcttgagggaggagcagccgggcagggatttggccgcctgctcaaaagcgtccccttccagggaggggagggaaaggaaggtttccaggtttttctggaatttgccggcggccctggcttgttcttctccgtccgcagggctggcttctgacatcctgtacagcgccagcatggctccggataaggatttccgagcgtccgcagcttccgcctgcgcgatcagaggacggttgatggattcaaaataggccacctggttttttactgtggtgttgtctatccaggaacccatgtacggggtaatgactgcgccgcccagaatggccatgataaggcccgcagctcccagtttcacttcagaccccagtccgcgcagggcgatgccgtaaatagtggggaacatcagggacatgcagccggagattccgaccagtgtccagacggagatttccctgggcagatagatggtgcccaggcagcagagaatgccggcgacggcgaaaagggacatcatgttggccgggttaaattttttcatcagggccgtagtgatggcgcggcaggcgatgaacaggatgatggaaaagatatagtagttggaggccgccgcttcctgcattccggggaagacggacatgatgtatttaatcgtccacgtccacacggcaatctgcacgcctacatagaaaaactgggccgccacgccgcagaagtagcgcggaagcttcaccagtttcataagctggcagcggtagtccggcatgatgagcaggaaggcgatgggcccgatcatcataatcaggatttgctgcaccatgctgaatccgaaagcggaatagtactggaacaggaaggggatgagaatcagggcgatgcagagtcccaggcggccgagtttggcggaaaggggctgtgtgttttcccgggtgggtacgttttcatcgtcggatttgtaacggcagaaaaagaaccagatgacggcggcgatggctaccaggcccacataaggaacgcatacccagaaaagttcatcgctgacaatggcgttcagttgttccggattcatggctttgcgggtgtccatgtccgcatcgttcaaatgcgccagaatgaaatatttggccaggaaaatacccgtcagggagcctatgggattgaaggcctgggcgaagttcagacggcggacgctcgtttcctgggaccccatggagagaacgaaggggttgcaggtggtctccaaaatggagaggcctccggccagcacgaagatagccatcagatagatatcgaaactttgcccgatggcggcgggaatgtagcacagcgcgccgatcatgtagagccccagcccgatgaggacgcccgccttataggaaaattcctccagaaggatggaggcgaaaatggcaagcaccgcataggcaccatagaaggaaatctgaactccggcggattccgaagcattgatcatgaatattttgctgaatgccggaaccaggttgtccgtcatgttgttcaggaggccccacagcgcaaaacaggagaccagcatgaagaacggcagccggtactgtttgggaacgatcggcacggtagaggtacggttgttatccatattgcttttgtcaatttctcacaaggacggcggtgcgtcaatctggaaaccgaaaagagtccagaaattatccaacctgttgataaaaaaaataaaatgatgtttttccatggagatattccgtcagtgtccgcagaagctctttcttcttcttgacttgtgtttccgcggcggataggaataaagagatgaagaagagtattctagccgtctgtctgggcctggccggattctggagcgttctggctgaagattctcccattgcggccccgggaagggtaaatgaacagggggatgcggaactgccttccggggaattgttgtcggatcatgtggcggaagcggaatttacgggaatgattcatcggaaatgcaggttccttacttccctgtgcccggacaagtgcgaccatgccagggatttcgccgttttccggatcgtcaagtacctggattaccggaaaccaggcaagtacggcgatgaaaagcaggatcagctgatggttgacgttaatccggcgcacaagcccatcctgcagagtgcggatattttgaagaagatatccgcccttaaaccgggggacaaggtggttcttcactgggctcattattatatgcaccggaatcccagttctttcccggaacgtcccgtgatttccgtggagccggcggctctttccggaggaaaaacgggaaagtaaggactggtctttcctcaggccgttcaagcggggctggacgcaacggaaagccgtgtgttaggaaacggaccggcaaataacgctgctccgggcaagattgccgcggggggcggcgtatatatcccgcgaaacacaccataaatacgatgcgtttatctttgaataaattaatggggcttggcctgttgtgcgcactgggcctgtctattccctccgttctcggcaaggaaagctttgagcaggccaggcgtggcaagtttacaacgctttccaccaaatacggccttatgtcctgccggaacggtgtggcggaaatcggaggagggggaaaatccggagaagcctccctgcggatgttcggcggacaggatgctgaattgaaactggacttgaaggatacgccttccagggaagtccggctttctgcctgggcggagcgatggaccgggcaggccccttttgaattttccattgtggccatagggccgaatggagaaaagaaaatttatgacggcaaggatatcaggacgggcgggttccataccaagatagaaaccagtgttcctgccggaacgcgttccctggtgttcaggcttacttctccggaaaacaagggaatgaagctggacgacctgtttcttgttccctgtattcccatgaaagtgaatccgcaggtggagatggcctcttccatttacccggtgatggtgcgtatcccgtgcagccccgttctttctctgaatgtccggacggacggctgccttaatcctcagttcctgacagctgtcaatctggattttacgggtacgacgaagctttccgacattgagtccgtggctgtaatacggggggaagaggcccctgtcatccatcatggggaagagccgttcccgaaagactcttcccaggttcttggtacagtaaagcttgccggttccgccagaccccagatttctgtgaaggggaaaatggagctggagcccggagacaattacctgtgggcttgcgtgacgatgaaagaaggagcctccctggacggcagggtggtggtgcgtccggccagcgttgtggcgggcaataaaccggtgagggttgccaatgcggctcccgtggcgcagcgcatcggcgtggccgtagtcaggcatggggatttcaaatcaaaattctaccgtattcccggtctggcccgttccaggaagggaaccctgatggccgtgtacgatatccggtacaaccattccggagaccttccggccaacattgatgtgggcgtaagccgctctacggacggaggccgcacctggtctgatgtcaaaatcgccattgatgattccaagattgacccctctctgggggctaccaggggcgtaggggatccggccattctggtggatgaaaagacggggcgcatctgggtggccgccatatggagccacaggcattccatctggggcagcaagtccggagacaattctccggaggcctgcggacagctggtgctggcctacagcgataacgacggcctgacctgatccaggccgatcaatatcacggaacaaaccaagaacaaggattggcgcattttatttaatggacccggcaacggcatttgcatgaaagacggcacgctggtcttcgccgcccagtactgggacggcaaaggggtgccgtgattcaccattgtttattccaaagaccggggaaaaacctggcactgcggcacgggcgtcaaccagcagacgacggaagcccaggtgattgagctggaagacggctccgtcatgatcaacgcccggtgcaactggggcggttcccgcatcgtgggcgttacgaaagacctgggccaaacgtgggaaaaacaccccaccaaccgcactgcccagctgaaggaaccggtctgccagggcagcctgcttgccgtggacggcgttccgggcgcgggcagagtggttctgttttccaatcccaataccacatccggacgttcccacatgacgttgaaagcttctacgaatgatgccgggtcatggccggaagacaaatggcttctttatgatgcccgcaaaggctggggatattcctgcctggcgccggtagataagaaccatgtgggtgtgctgtacgaatcccagggggcgctgaacttcctgaaaattccctataaggatgttcttaacgcaaaaaatgcgcgctgattccgtttcccggtaacatgttcaacgggccgttttcgttggagaacggcccgtttttttgtttccgggtgtttttgtgaaaggacttggccgctgcgctacgggttatttgccgctaaagacgggaaactgtaccaggaaccggctcccctccctttggcgggaaagccggcggtgtgttcttaacttgttttgaggacgccattgtcaggataaaaaggaagcaagagcctccttcagcatgtttctggcgcggaacagcaggcttttggtagcgggaaccgtcatatccagcgcccgggctatttcctcatagggcatgttttcgaaacggcgcagttgaacggccagccgcgccttttccggcagagcggcgattgccgcgtccacggcgtgctggagttccgtatgttccagtgcttcgtccggggcctgggaaggttccagaaacacggccatgcctccttcctcctccatggcgtctgcggaggtggtgggcttgcgcttctggcggcgcacttcattgaacaccagattgcgcaggatggtgaacatccaggtggtaaaccgtgcggaaggttcataattcccggctcccttccagatgcggatgaatacctgctgggcgatgtcttctgtctccgggccgttgttcagcatacgggccaccgtcgcatatacggaattctggtgtttgcggaccagcatttccatggcggaagcgtcgccattcctgaccctcagcatcagcttggcatcttcgtctggttccgcaggcggcatgtcttgtgcttcatccatgaaattcccttttataaaccccgtttccggtgaaaggttgcagccggcagggcgcattccggaaaaaggtctatcccatttttacacggctgactagatgaaaacgggtctttcttttctttccgcaggggatgggagtaaaatgttttactctttccggagcccgggaaatattcgcgcctttgcaggagagaacccggtgcatgatggattccctccatgcctgccgatttgacaggggccggaaggggctgtcagggtagggaaggatggaagaaaggaacatcggcgaattaatttgtttaaggaatcattccgaattccttttcgcggcctcttcctggttcagttccaaatggggcattccctcagaagtttatgaagaaagcatgaaggaatgcatggagcggaaaacagggattcctcaatggtacgttattgtggacgggcagcggaatatcattgcgggagccggagtaattgaaaacgattttcatgaccggaaggacttaactcccaatttatgtgctctttttgtagaggaaaggaaacgcggcaggggaatagccggggtggtgctggattttgtgaggaaggatttggcctctctcggatattccaggctctacctggtaacggatctctcgggtttttatgaaagatacggctggaattttctgacgatggtcatgggcggacatcatgctcgggagaggctttaccaggctcccgacatcagggccggttccgcttgacggactcccaaccacactccgcgcggaaagaagagcaaggaatggagaaagttccccggcaaaagggaaagagggggaaataatgaaaaaccgtccggtgtttccgttggaagatgcacggagccgcctgccgggggaggactctgttcttgacagcatttcctgtctgcctgataacttgataatacgagtacccctcagcagcatcaggaaacgccgccatgaaacaatgcatgaattccgaaaatttgcatcgccgcctcaagaagattatcggacaggtgcaggcaatcgacaggatgattgacgaagacgttccctgtgaagatgttcttgcacagctcaatgccgccaagtccgccttgcataaggtggggcaggtcgtactggaggggcatatcagccattgtgtccgggacgggcttgaacacggagacccggaagagacgatcgcgcgcttcaccaaggcggttgagcggtttgccaacatgatttgaatgggacaatgggttaatgcctttttccggcaggttcgggggtggctcccatttttttcttgaaaacctatacccctataggtatataaatgcccgtacccgtatgggtatgaaaagaaaaatcatcatatgctggactgattggaaaaattgctggaatggggagggacaaggcggaaagtcgcactgttgtccgtttccggattagctctgttgatgagcatgcttggcatggaacctttgccctttgaaatttcatggatagccattgtgctgtgcggtgttcccattgtgctggaagccgttcttggcctggcgacggcctgggatattaaggcggatgttcttgtttccgtcgctctggttgcctccgtcatcattggggaggacttcgctgcggcggaaattgcatttatcatgcagcttggggaactccttgaggagctgaccgtagcccgggcccggaagggtattgaaaggctggtccgtttgaccccggcgaccgcccggaaagtggaaggagccagggaggaggttattccggcggaagaggttcgtatcggggatgttctccgcgtattgcccggagagacgattccggcggacggcgttattctttccgggcacacttccgtcaaccagtccgtaatgacgggggaacctcttccgatagacaaggaaaccggggatgaggtttctagcgggacggtcaaccagttcggaacctttgacatgaaggcggccaggaccgggaaggacagttccatccagcgcatgatccgcctcgtccaatccgcggatgcggggaaggctaaaatcgtgaggctggcggaccgctgggccacctggatcgttgccattgccctggtttccgcagggggggcctggatggccacgggcgaactgatccgcgctgttaccattctggtggtattctgtccctgcgcgcttgtgctggcaactcccacggcggtcatggccgccatcgggaacgccaccaggcatggctttctggtgcgggaaggggatgccctggaacgcctgtcctgcgtgtcccacctcactttcgacaagacgggcacgcttacctgcggtgatccgcgcgtggcggccgtgcgcagtttcctgccggagctcccggaacaggaactttacagatatgccgcctgtgcggaactgcgttctgaacatcctctgggcaaggcgattgtccgctgttaccggaaagattcagtgcgggaactttcccaaccggaacaattccgcatgattcccggcaggggagtacgggctgtggcgcagggaaaggaacttctggccggcaacctggaattgttcagggaaaacggggtggagctgtccgatgaggccagacgtgcggcggaacggtatcaggaggaggggtgttccgtgatcttcataggaatggaccggcaggccgcaggggtgatcgccctgtcggataccttgcgggagaatgccgtagccaccatccgggaagtacgggatgccggagtggttcccgtattgctgaccgtggaccatgggaatgccgccgcgcgtgtcgccggacaactggggattgacctggtttgtgcggaatgcctgccggaggacaaattcaactggattgacgcgtgccagaaggagcggaaccgtgtgtgcatggttggggacggaatcaatgatgcccttgccttgaaaacctctcatgcgggaattgccatgggcggcataggaagtgacattgccgtggatgccgcagatattgtcctggtcaatgacgatatccgggaactgccccatctgctccgtctgtcaaggcgcatgatggggataatcaaatgcaatctgacattctccatggctctgaacttcatcgccatcatcctggcggcgggcggcatcctggggcccgtggctggcgcgctggttcacaatgcgggctccgtcgtcgtgatcgccaactccgtttttctgctgaaatggaggaggaaaaacgcgtgaatccgcctggagggtagagaaacttccccgtgttgattgccgggagggaacggagtccgtctttttgacgctccggtttcaccgcgccgggctggaaaacgcttggatgaagagaaagtccgtgttattctttttccagttcggcaggggtgcccaaataaaggctgagattgcaggaacggcatgctgttcccgcagaacccttcaaacctgatgcgaataattccgccgcagggagttcgattgaacgggcttgtcccgtttttcggggaggtttcgtttccgctgttcccctgccggaacagaacagcattcatcccatgaacgatacctccaatttgtcttatcccggttcccgccgcatttatgttccgggccgtctgtacccggatgttcgggttcccatgagggaaatcattttgggcgataccttgttgcccgacggcaccgcccaccctaatgacccggtgcgcgtgtacgattgctccggcccctggggggacgctgcttatgagggaactgcggaggaggggcttccctccctgcgtgccgcctggatacgggcccgcggggatgtgaaagaggatgtggggcacgagagcatcctgcgtgctgcgggcaagacgcctgtgacacagcgttattacgcccaacagggcgtcattacgccggaaatggaatttgtcgccatccgggaaaatttgggcagggaacaggctttcaaggcgatatacgaccgctatccgaatgccaagagccgcccggacgaagccgcggaagccctggaaacgctcaccatgatgccgcgtccgtccgaattggaggcgcaggagggatttgggccgtccagcatggtggcccgcgaccgcctggatcaccagcatgccccggaacgccggaacggctgccgcatgcctgcctactttacgccggaattcgtcagggatgaaattgcctccggccgtgcgctgattcccgccaacatcaatcatccggaatgtgagccgatggctatcggccgcaatttcctggtaaaaatcaacgccaacataggcaactccgcgctggtatccagcattgaggaggaggtggaaaagctgcgctgggccattcactggggggcggataccgttatggacctgtccaccgggaagaatatccacgcgacgagggaatggattttaagaaactcccctgtccccatcggtactgttcccatttaccaggctctggaaaaggtgggaggaaaggtggctgacctgagttgggaggttttccgcgataccctgcttgaacaggcccgccagggcgtggactatgtgacggtgcacgccgcccttctgctcaggttcgtgaaccatacggcgcggcgcatgacgggcatcgtttcccgcggcggttccatcatggcgcagtggagcatgatccacgaacaggaaaatttcctttattcccattgggatgaaatttgttccattctggcggcttacgatattgccgtctccattggggatggcctgcggcccggttccgtggcggacgccaacgacttcgcccagctggcggagctggaagtgcagggggatttgaccatgcgcgcgtggaaagcgggcgtgcaggtcatgaatgaaggccccggccatgttcccatgcaccttattagggagaacatgagcaagcagctggaatggtgcatggaagcgcccttttacacgctggggccgctggtaacggacatcgcccccggttacgaccatattaccggagctatcggaggggcgatcatcggccagcttggctgcgccatgctttgctatgtaaccagaaaagagcatctggggcttcctgaccgggaggatgtgagggaaggcgtggttacctacaagctggcggcccacgccgcagacctggcgaaggggcatccatccgcgcaatggagggataatgccctggcccaggccaggtttgaatcccgctgggaggatcagttcaacctttccctggatccgcaaaaggcccggtccttccatgacctgacgcttccccatgccaacgccaaaaaagcccatttctgttccatgtgcggtccggacttctgcgccatgcgcctgagccaggatatccgccgccgctcacagcaataggcgtcttttctccggcatttcgaggggcttgcggttccgagggggccagcccttaaaaaagaatgacaagccccggtatcctgctatagtacggttaagatgagaaattcattttttcctgcaattggtgttctttccttggcctccgctttgatttgttccgcgtcttcctcctgggagactgattggaataaagcgctggagaaggccggaaagggcggacatcctgtgctggctgattttaccggttccgactggtgtcccggatgcattcacctgcgcaaaaatatttttgacacggatgcgttcgccaaatatgcggcggatcatcaattcgtgctgctggaactggatttccccaaggctgccgggaaaatgccgccggaacagttaaaatcccatgaagagctgatgcggcgttatggcgtttcctcgttcccatccgttctgttgatggaaggaaatggcgctccctacgctaaaatagtgggtgccaccagaaccccggaggaatatctgaaaaaactggaggccgccggagaaacgaggaggaagttgaaagaggccgtagcggcggcccagccattgaaaggaaaggaaaaactggagcaactggttaaggccttgaacgtgcttccggaagatttgcagcctttccagaaggagttgattgcagaaatttccgctctggacccggaggacagatacggttttggaaagaagtctgaaaaagccgcagccatggagaagcagcggcttatgtgggaacagttctgccaaaaatattcggggaggatctccgcagaagaaacgcgcgccggacgggaggaagcattgcagatgttggagaaaaaggatacgcttcctcccatccgcctgaaggtcgccaaatatatcagtgatgggtatgtcttggaacgtaatttgcccaaggctttggaatacctggaaattgcccgtgatgccgatccggagtctcaagccgccaaaaaactggaaccgtggattgacaatatgcggaaacatatcaatcaggagaagtaaaaattgttccgaaaggcatggccgtcttccgtcgaagggggagggccatgcctttccgttttttattttaaacaaaaaaacagggctgttgcgctatggctgatgaaggaaccgaatgtacggatgcagaaatgaatacgccggcttacgtcaggaatgaggaggttgatgaagaaagcagccatttgctgagttgggatgagtggctgcgggaacatgcttcccagctgcttctgtttgcacgccagcagtcccgctctccggaagatgcggaggatatacttcaggatgccctggtacgtttggctcgcaaggaggcttccggggaatttgtgggtgggcaggaggcgtggctttcctatgtctttgcctccatccggcgtctggcggtggattatggccgcaaatccgaccgtcgccagaaaagggaggatgaagcctgcgcctctgaacgggacgaagatgtttatacggacccctggttttccagtgctgcggcagatgaggaactcaaacagttcatggaaatgcagctcaggaagctcccttccaaattctccgaggtcattgtcttgaaaatatggggggaacaaacttttcagcaaattgcggaaacgctggaaatttcgcagaatacggcggcgagccggtaccgttacggtattgacttgctccgcagggctttgagaaataaaaagaatcaattctaatgccgctctacccttatgaaccatgaaacaacatcatccgccgcaggggaggaagacggcggtactgccgtcctgcagccccttcccgtatctgatgaactgatttcccgtctggccggaaagtgtgaggaaatcttccctttggagagccgtttccggcgtgatgaaatctccgatgatgaaattcatgagatggaatcccttttgaaacgttttcggccctctccggcaaaagtcctgttcagggaacaatgctgtgccctgatgtgtgcggaatccgaacatgagatggaaacccggttgaaaaggctttccgcttcttccatgttggaattttccgtctgtaaaatggcacaagccatgaattgcgccagtaatgaaaaacgggaaaaagcgctgaacatccccctgtggcggcgttttgcctgtatttccggcatttccgcggctgccgttgtgggggccgtcatgctggttcaacatgctctggtggcgcccgtagggacggtggcggccggaaatgccggggaagttccctcggaaaaggctgaaactcctgtgattcccggtgaaaagcgggagttgctccggacgcccaccctttttgaattgcagggaggggatgagcgcgtgcctgtgattgctcccgccgttatccgcaaaattcttcctgaaaaggaatattaaaaattgcggtgcatgaatatcgccggaattgtgcgatctgctgcggcattgcggctttccttggcaggcaggaaagatgcctggcgttttccggtgttctgcggcgagggatgccgtcccggaagcggcgaaaaaaatgcacaaattttgaacattgtatggacagatgctgtatattatctcacatggatatgaaaacctgtatctttctgacattgggattgctggtaggttcgggctccggatattccattgaccggcccgcaggaagtacggacaaccttcagccgcctcctctgacgccgacaccgtacgcgcatcaggtgaaaccgctcccctcttccaaaccggccagactgggaattgttccgggcacggtgccccaagcgctcgttgcgcagctggagcttagcggattccccggagtgctggtgaccaaagtgatgccggacagccccgccgcaaaggccgggctccaggaaaatgacgtcatggtcaagctgggggatgtctccctgtccgatccgcagtctgtgacggaagccctgtctgaaaaggtgcctggagacaggattacggctgtattttaccggaaaggaaagagggagactgttgaaattaccctggatgggggaacgctttccgctgaagaaatactggcggcccagggggatccccgcacgcagccccgcgcagttccttccgtccggcgtcagacggcgcctttttccggaatggttgcacggcctaatctcccccagcgtattctggatatgcagcagatgatggatgagtttttgaaggattccgccatggatgattaccggatggacgacatcatcggccggatgaacctgactcccggcgcggcgcagatgctccggagcttgcaggggcttcatcaaatgcccatgcctcccatgggcaaggtttccggagggggccagagcatgtcttccgtccggatgtcggatgccaacgggactatcgtggtttcttccaattcccggacgggaaccacagttcatgtgacggactctgcgggaaaggttttgtattccggcccctacaatacgcaggaggaaaaatccgccgtgccggaagccgtcagggaacgcttgaaaaacatagaaaccaatttctgcttttaacggcttcatggaatagcggagaaatccgtattcatgaagttgacgacagctgccccgtgcggggcagcttttttattacgtggaagaagaggggaaatctgtgttgatgcggcagatgaaaataatgacgggcagaatgaaaggaaaatcatggaaatgcgtatccttcaacaaaatagaccgcttcatggttaagtgcaggtgttgggaaaacggcggttttttcagtctgcccggtttctggcggcggtcttttcacaaagaacgacatgaatggttttatttttattttgtggatgctttgctgcgcttcttggagcctgggagcggatatatttgtttctcctgacggagatgacgctcatgcggggacggaagaatttccgatgcgttccgtggaggccgctgtgcggaaggccgggcaagggcattacggaaaaggctgccagattatcctggccgacggtatttatcacctggcggaaccgctgctcctgcgtccggttcattccggtctgactattcgtgccaaaaatccgcataaggcggtattgagcggtgctcagccctttgtcgcggactggaagcccttccgtgatgggatcatgagaacttccgtgccctccggactggaaatggacgtattattggtcaacggcaaacccatgcacatggccaggtatcccaacgcagcttccggagaacgcattttccagggaacggccccggacgcggacgctccggaacgggtagcccgctggaaaaatccggcgggtgcgtatctgcatgcccttcatcatcgcatgtggggagacatgcacttccgcattacggggaagaatggaaatacactggttaagcaggggggctggcagaataaccgtccctctccgccgcacgaaaaatataaatttgtagagaatgtttttgaggaactggatgctcacggagaatggtatctggacagaaaggaacatattctttacctgtatccggaacagggaacggatctggctgcagccagactggaagccggcggcctggaagaactggtcaaaatccagggggaaggctcatcccccgtcgggaacgtgacgctccgggatctggtgctgactggaacgcggcgaaccttcatggaaaaccgggagcccctgctgagaagtgactggaccattttcagaagcggagccgtactcttgcggggaacggaagggtgccgcattctctcctgcgaatttgccaagttgggtggaacagccgtttttgtggacgggaataatgaaaatcttctggtgcggtcctgttatatccatgacataggttccaacggcgtagcgtttgtgggggatcgttcctgctaccggtgaccgaagaattatcgggaagccaaaggaatgtccttggagagaatcgacagggttccggaacctcgaaacaatgaatttcccaggaactgcatggtggatgattgcctgatcacccggacggggctggtggaaaaacagactgccggagtgcagatatccctggcccgggaaattaccgtcagaaattgttccatctacgaacttccccgggcgggtatcaacataggagagggggctttcggcggccatgtgattgaatacaatgacgtttttgataccgtcagggaaaccagcgaccatggttcgttcaactcctggggacgggacagattctgggtacgggaccagatggcgctaagccaggacaaggacgtcgtcctgctggatatccggcaacctaatatcatcaggaacaaccgctggcgttgcgatcacggatgggatgtgcacctggacgacggttcttccaactacattatttgcaacaacctcatgctttcctccggcctgaagctccgggaggggttttaccgcaaggtttacaacaatattatggttaacaaaaccctgtacccgcatgtatggttcaggaacagcggggacgaattttacaataacattatttttgaagaccgttaccgtcccgccggcaacatggatttttccccgtggggaaaactgatggacaggaactttgtgcatgtgaagggcatgaaaggggtggaacccgcctccgaactggccaggcaatccggcaatgacaggcactccctgaagggggatgccctgttctctgctcccggtctgggggatttttccgtccgggcttcttcccccgcccttaaactgggattccgcaattttcccatgaaccgtttcggcgtgcgttcccgacatctgaaagccctggcgcgaactccggatattcctgaagttgccgggaacaggttggagaaacgggaaacggtgctggtgaagaaactgggggcggaagtaaggatagcggaggacgaaggggatttgtctgtctttgggctgatgccggaggatctgggccgggcgctggttattgtcaaggtacagaaggacggcccttgttcctctgccggcattctgcccggcgacgttcttctgatggcgggcgggaataaggtggatggagtggaaaagctcgaacgcctgctgccgtcttccggtaaattaaccgtaaccgtcaggagaaaccaggaaaatagaaaggcggatttgcagttttgaggatgcttctggcctccggaaaaagaggaagcggaaattacagaatcccggtcaacttccggtaagtctccagggcaaaagaatccgtcattccggaaatataatcaagcatgtgcgccaggcgtgcagccttcccgccgttgttccggggtacgccggtgccctgaagcatgatggcgattttttgggattggccggaggatggatgattcacccattccataaagaagtcgatcaattctcccagtaccttataacccatggcttccacttcaataacctccctggcctggtacacattcttgatggcgtactggtacaagccgttcagcggggcggccagttccgagctgtctatcagggattgttccaaccttccttgcagcaggtcttcctcgtggttcacgaaactgtccacggcggactgaatgcttttgccgatggcgagcgcgcgcatataatggatgcaggaatctttttcctcttttgcttccagttcccggacataacagagctgggattccgtcaggaaagggctgaacaaatccctggtggaagcaaaatccagaagtctggaaaaatacccgtcctcaatatccgcaatgcggtaacagatatcatccgcggcttccatcaaatacgccaggggatggcggctccagcaaagatgtgctgcatcaggtgtggaacgcggaatcaaccccaggtgtccagccatgaaagaagcagcttccctttcctgttccccgatgccgaatttcttgcattcaagcttgttggccgcaactatgctgcctttcctgacggcggaggaataagattgcgtacagggatatttcataaaggcgcccaaaacagccgccgtcagtttcaggccgttgccctccatcggatctcctgtacgtgtcaggatgcggaatccctgggcattcccttcaaaaggcagttccaggccgtgccgtttcagggcggtttcaatggcgtcttcaccggaatggccgaagggcggattgccgatgtcatgggccaggcaggcggtggaaacaatggtagcgacatcggaaggcatgataggagcgggcagggaccctttcttcgccagccactcccctgccagcatgccgagggaagaaccgatgtgggctacctccaggctatgcgtcaggcgtgtgcgcacgtaatcgttgcggcccaggggaaaaacctgtgttttgtcctgaaggcggcggaaagcactggaaaacagaatgcggccgtaatcccggtcataattgctgcggtttttctgtggagatgccgtactccgatgcctggatccccagcgcgcgtccgacaaaagctgctgccaattcatcatccctgacatggtaaggaaatgctacaggggaatgcccggatgtaacaggagaaaaatagagagggagttcaataggtcagcatcagccccacgccccagtgcaggttcttgtcgtaattggtggaaacgctgaggtgtgaggtcaggatgtagtgcaggcccacggaataatcccgatccgtattcagggaaaaggaaaggcgcaggcgggaggtgagcgggatatcgtcccgctccaattgcaggcgcaccttgccgtccgtgtcaatgcgcgcatccgcaatcaggagcaggggcaacatgtaccgggctcccagggtgccatccatttcccggtcctttttggtggtctgtcggaacatgttgcgttctccggcctcccccttgcggcaagtccagtccgccccgatgtaggggtaaagccattgcttctccccgatatacctgcccagcctcccttccgcctcataaccccgcgtatccttgtagcctattttccactctccctgcatgctccaccgggtgcccccgaatcccaggttccctatgttcccgttggtggcgaaatcattgttcacgctcaggtaccatttccggcccatgccgctcatcatgtggtacaggatatggcagtggaaaaaccagttgccgcgcgttttctctgcagcgttaaactcaatcacctgggtgtccatgggctggatatccgctgtaaacttgagcggagaaaaatccccatgcctgttcaccagccggaaaaaatgcccgtgcagatgcatgggatgcctcatcatggtattgttggtcaggattatgcgcacattctgtccttccctgatcatgatccgatctgtctcggaaagagttttcccgttaatgctccatacataacggttcatattaccggtcagcatgaaatgcaattccttaacgggcacgccggaaggaagagtggtgcgggaaggggacttcagcatgtcatacgtcagggtggtttcttctctgtcctcctgcatgttgccgtgtcctctcccatgggaggaaccggacttcatgtccattatctccatatttccggaatgggtggtcggcatgccgtgatgatgcatcttcatatttcctcccatggtcatcatcccgttcatttgcttcatctttttgaagtaattcagcttgggaaaggggcgcaaaggctgcctttccccatggcccagccacagggaggaagacccggaagtatcctctgccgttgcctggaattcaaaggccttgcctgattccggcactttcaagatgacgtcgtaagtttcggaaaccgcgattatcatgcgatccacatcaacgggaacaacgtctttcccgtcgctggccaccacgcgtattttcccgcccgcatacctcagccagaaataggtggaggatgctccgttgacgatgcgcagcctgatgcggtcgccgcccctcagccggggcagggaagcccgcgggatgccgttgagcagaaaacattcataatacacgtcactcacatccatggcgttcatgcgcttccattcgcttaacagcttggttgccatgtagccggagcgcagggcctcccaatagctttgtacactccccttgcggatggaaaaccagtcggagtccgtgtgaagcattctgttcacctcctggggattctcgttcgtccagtcgctcagtaccagcgtatattccggcagggcgtcctccgtcctgcgtgccgggtcatcgggccgtttgcggacgatgaacgctccgtacaggccgctctgctcctgaaaaccgctgtgggaatggtaccagtacgtgccgttctggatgatgggaaaagtataggtatgcgtagtgtggggcttgacaggagcggaagtcaggtacggaactccatcctggtcattgggcaccagcaagccgtgccaatggaaggaagtttccgtgtccatcaggttatgcacccgtattaccgcagtatctccctctgtaaaatgcaatgtggggccgggaatgttcccattgatggtcatggcctggcgcgtggctccggtaaaattgacgggagcgttccggacatataaatcgtattctaccgtttttgccagagaaggggagaagagtatcggcaagcagcacaggaatggaagaaaatggaaggttcgtgtgaacatgaatgggaaaaagcactgccaggaaagacctgcctcttgaatttccagttcaaaatgaaacggatgtgatgtgtcatgcccacccttggccaaatctgctaaatggcggggcctccaattcggacggaatagggcgtctggaatttatttatgcgtcgttttttaaggaaatagggacgatcaggaaagaggccaggataagcaggcagccgatggacagaaggaacatgttggaatgctccctgaacagtagcagggaagtcatggccgccaggggaatcttgagattgttcataatcgccagctttacgggagttacccggcgcgcgccgtaattccacaggaaaaaacagactcctgaagcgatgacgcccaaataggccagcagccaccattgcacggctgaaatcccctgccagcaggccagtcccgacggcaggccggaaggcaaagtaaccagcagggcgcctgcataggcataggcgaagcaggatgcttcgcttctcctgaaccaggaatttttcagggaaatgtaggctatctgacctgccgcgaagcagaggttggaaagctggaccagaacgattcctgtcaactccccgttaccggaggaatatcctttccaaaggattcccgcccctcccatggctgcaagaatagccgccgccagatggagcggcggaagattctttttcatcaggccgtcaatcagaaccacataaatcggcgtggtggctgtaaaaagggcaacctggtgggaaggcagatagtggaaggcagcgatatagaaaagatacatccctccgaactggacggcgcctatccccatcatccccacggcatggctgaggggcgccttccggacgaaggggagaaaaacggcaaatgaaccggccatgcgtgccagtgcgacaaagctggcgggaagtccggacaggcaattccccagcagtccgaatgacaacgcccaaatgaaagacgtgagcagcaacgcaggcatgcggacagaagcatatggagaaaggaaaaccaagtcaatgcccgtaccatcgggagtacgcaacattcattaaaaaagcaaaggaacggttaagctttcctgccagtagaaattaagctttttgtgtataagattgtttaatcagggtaaggatgtaatccatcctgtcctcattttttacagtcagctcgtaagatccgtttccatgatggccgatattggaaacgtccctggcgagtttgtaggggtcttccaatttgccttttgggagattgatccagagtttcagtccttgtttctgcaaagcgatatccgtgaaatttgaaccgttgaccgtgaaagctacataaagcttggttgctttgatttcgacgtcccctaaatcgaggattttatttctgaggctgttgtaaataccctgtaccttttccggaatactcttcaaccgatcctgctccgtgtaaactactacttctctgctgacggcatccacgtcgctgtttttcgatgaaattgttttgatgctttctgttgcattgagttttcggatttcctcaaaactgatggtttgattgctgtatttttttatctcccacagagcaatcggaagatctttaaaattaatggcttctttttgataagaagtaaagccttgggaaataaaaatgatccgggattgggaccaatccacgctgctgcgctttagtggttcattccgggcctcattatattccagaatgaaatcggctttattattaagcattgcagaaagataggcatagccttgatctacaacgctaaaattcttgtcctgcttgtattcgatgatgacaaaagccttattttttctgtcaaaagccaatgtatcaattctcaacctctgaacggagccggatatcgtgaattcggatttgacgaattccaacccaagcaacgtatttaaattggcttctaccaaatattgaatttgccgttccagcttgaacggggtttccttgacttggttcaatatttccagttttgaatttgaattgaaaagcggcattgagcagatgagggaaggttgcttgaaccatactatctttatgagggatggatgacaagacaatcatcatgaagcaaaatgggctatttaaccaattgagcattatctgctgactgttctgaacataaaaacaccccgaaatattgaattccggggtgttcaggaaaatggtacgcggtactggtttcgaaccagtgaccccatgcgtgtgaagcatgtgctctaccactgagctaaccgcgcgtttgcagtgcggaaggaatatatcgttcgtgccggggattggcaaggagttttttgaaatcgggtaaaaaaggatttcgcttttccgccgtcaacaagttcccggaggaatgaccggtgtacagcttctccgagggacggtttggaaaagtggaaaggtggcttaattccggcttgtacagcatcaaccgtctttctacactccgggcatgagttgcacaagccctcccagagcatgggcccagattgataccaatgcgttgaggcacaatttaaacgtcgtccggcgcgtcatgccggatcaccgtctgatggctattgtgaaggcggaggcttatggccacggtctggaaggggtggtgaaggccctggatggcgaagattgcgcttttttcggtgttgccacggtggcggaggcctgccgggtgagggatgccggggcaaaaacatgcccgtttattctcgatccctgttttgagggagagcgggaggaaatcgtgcagaacggctggcgcgccgctctttccagcatggaagaggcggagcatttcaattccctgggcgccctttatggcaaaaccgtccatgtccatttgggcgtggataccggcatggggcgcagcggttttttaccgagtgaattgcacggcctgacggacaaactcaaacagttcagttatctggatctggagggcgtgttttcccatttatccgcagcttccgatgatatttccttcacccacggacagatcagcggctttacggaagccgtaaatgaactttcccaaggccatcggtacaagttccggcacctgtgcagcagcgccgctgtgtttaattacaaggttccctgcgccaatatggcgaggctgggcagaatcctgtacgggtattcccccatgccgtctccctataataaggagctgcggcctacaatgaccctgtacagccgcattactctgatacgcacgctgccgggaaatcacggcgtttcctacaaccactgctatataacgaaggggagcacgaaggtggccactatcggcatcggttatgcggacggctatcttcaatatctgtccaaccagggagcgagggtgtatatcaatggccagtactgtccggttttgggccgtgtgacgatggaccagatcatggtggacgttacttacatgcaccatgtggagaccggagacctggtggaaatcatggggcctaatgtaagctgggaggaactgacgcgccgtgccaataccatccccagcaatgtgctgaccagcatcagcgcccgcgtgccccggatttacgtgtaggataatgccggggcatggtgattaaaagctgttgcccgccgcccgaaaaaaaatcaggggatttgtttgcagatatgtttttccccggcggacacggataaacgttttaccgtaccttttaccgctggcggattctattccagtcttccggctccagagcgcagggatcaggggctacccagtggcccggttctatttccacaggggtaaggtccgctcccaccgtctccggataggaggggtgctggatgcgatggccgaaagcagagccgagcggcgggttgatgggagaggggacgtctcccggcagaggctggtgcttgttggccgtggaggggtctggttccggaatagcgtccagaagagccttggtgtaagcatgtttgggggattgatagatggtttccgcatctgacatttccacgattttacccagatacatgaccgccacgcggtcggagatgtgtttgacgaccgccagatcatgggcaataaacaggtaagagagtttgcgttcctcctgaagttccagcagcaggttgagcacctgggactggacggatacgtcaagggcggagacgggttcgtccagaataatgaggctgggatttaacgtcagggcgcgggcgatgccgatgcgctggcgttgcccgcctgagaattcaaaggggaagcggtcaatagcgctgtccggcaaccctacgcggtccagcaggccgcgcacccattcccggcgcgcggcgggggtgcccatgcggtggatgacaaagggttccgctacgatttgaccgatggattgcctctggttgagggattccgcagggccctggaagaccatctggatgtgcggacgtagaggcctcattttgcgctgggagagtctggcgatattgttgccgttgaaccggatggagcccccggtgggtttcagcaggcggacaatgcttttgccaatggttgattttccgcagccggattcccccaccaggcccagcgtttcccccgggtaaatattgaaggaaacgtcgtccacagccttgacccatcccgcttgccgcaggaaaatcccggagcggacggggaagtacattttcaaattgtctacttgcaagagaggttctggcatggctggtagaaaaagaagttaaaggttggcgcaacgggggcaggcttccacgaagtgatccggggatatttccacgaggggagggcgttccgtgagttcttccgcgggcacaccctgcctttggcagaagcggcatccgggaacgaaatccgcaatagaggccacctgaccgggaatggtgggcagtttggttttccgcacggaacttagctgagggatggaggccagcagtcccttggtgtaagcatggcgggggttggcaaaaagttcccggacaggggccttttccaccacgcggccagcgtacatgacgactacggagtcacagctctgtgcgatgacgcccaggtcatgtgtaatgaggatggaggatgaccccatttccgcctgaaggtctttgagcagggacaggatttgagcctgaacggtgacatccagggccgtagtaggttcatccgcaatgatgagttccggatggcaggccagggcaatggctatgacgacgcgctggcgcatgccgccggagagctgatgaggaaattcgtccacacgctgttccggggcggggatacgaacgcgctgcaggagctggatggctgcgtcccgggcttccctggtgttcattccccggtggagcatcagggattccccaatttgcctgccgatgctgtgtacgggattgagcgccgtcattggttcctggaaaatgacgccgatatggcggccgcggatgccgtgcatgtccgtctcttttgcctgaaccaggtcgcggcccttgaacagaatttgcccgtccaaaattttccccatgggctggggcagcagccggacgatggacatggccgtaacgcttttgccgcagcctgattcccctacgatgcctacgcaggtacctttggggacggtgaagctgacgccgtccaccgctttcaacaggccggattccgtttcgaagccggtgaccaggttcttgatttccaacaggggatcgctcatgtgttatttttccgtggcagaaggttccagagggtcgccgctttccgggatgacaggcacagacggcagcttgccgccgccatccttgttatccaggctttcaatggagtccatgtagcgatactggtcatacacggtatccacttcctcgaatgtttttccttcccgcttggcttccattgtttcctttttgatatcgttatccacccagtacagataactttccatgggatcaaatacgacgggatggcagaattgcgtagttgcactgttcggccatttgacccagcgccagtaacccagtctgatgaattccgtggtccagcagggaacccacagggcttcgtcatcaattttctgctgcactttccacgtggccttttggagttcgtcttccgtggctgcgtttgtttctgcgtccagcagcttgtccatttctttgtccgcgtaagcgcagatgttattggtataggtaataaggcctccacgctcatcataggcgtaccgggagtggaacccctgctcgttcatcggatgggggggagtgaatccccaggccatgaaggaggcctgagcgcgtttttccatgattttgcggaaagctacggtggagtccagagggtcaagctggatttccaggccgcacttgcgcgcgtcttccttcagcttgcccagagtggaagccagggaaggagatgaattggggaaggtgatggctgcggtgagccgggtgccgtccggtttgcggaggatgccgtccgggcaggggatggtgtagcccgccctggcgaaataagcgcgggcctgttccggggaataggggcgcgccttaatataaggattggtgaatttgccgaaacctgaattgtaggaattgagccgctggtagtctccgcggaaggtaatgtcaatgatattctggatattaagtgcgtgctggaacccccggcgaacattgaggtcattgaagggggctttggaggtattcagaaaaactccgtaaggagggcgggggtaaatggtgtaaaatgtgctgcggttgatgtagccgttgtgaacctccggtatttccatgcgttcgtgccatagttccggtttggtgatgttcaaaacgtccagttctccaatgcggaagagttcgatggccttggatggttccgcaatgaaattgtacacgatttgatccacattatacatgtatttcgtgaattttttgtccctggcccaccagtccggcacgcgctggagcgttacctggcggccgcggatgataccgtccggcttgacaacgtaagcgcccgtagtgggcggtatgcgccactggtagcgttccacgtagttggggccgaactcgcaataaaaatgcggcggggacggaatgaacagcgtgcaatagtacgggagcagaggtttggcgaaggggagtgtgatggaaaagcggctgtcgtcgtagatggtgatgttggaagcgttctggtaaaaaaagttgttgtagaatacgtcccggctgtattccgaagtgcggatatacatgttcaccaggaggtcgatggcctttaccttggctccgtccgtatagcgggcatccggatccagttcgaagtaaacagtgcgcctgtctggggattccgcccatttatgagcgattcctggaatgatttttcccgtaaccggatggatggaaacgaggccgatgatgatttcatcatacagggggccgcggaaaccgctgttgctgttcgggccgttgggccggaatgtgtcgggataggatccgggggcccactggcgcagcacgcctccttttttggcattcgggtcccctatctccggattgtccagtccatcctcccacttcaggtcttgggggatgtccgccggggttttgaatttgatgtagtcgccttccgtctgcctgcggtgaatgacggacagggcggcttcatccgcaatgagcttgctttgcagtttttccctgactttagaatcttcctctttaaaaaacttgtcccggagctcccgtatttccttttgcttggcagcttcctcacgagccaggcggtcattgatctgtttgttccatcgttccgggaaggaatcaaatcccggagggagcgtgccgaagggtacgttcggctgccagcctaccccctgggattgggaggaatccttgcaaccggacccggctgtcagcagaagggacagcatcacggaagaaagggtggaacggaggagggtggacagcttgagcataagaaatggcaaagcgggagtctttttatttataagtggtgaattttttaggatcaaaggcttcgcggacagcctccccgataaaggtgacgagcaggagggtaatcaccagagcggaaaaggcggaggtaaccacccagctggcggaaagatccgccagtccgtcattgagcaggcgcccccagctggcgtatgtgtcaggaaggccgaagcccagatagtccagggaagccagagccagaatgagggcggaaacgctgaacggaaccagagtgaccagaatggcgaccaggttgggcaggatatgaacgaagagaatacggctggtggaagccccaagcacgcgggcggccgccacgtagtcgcgtgctttttccttcatggtggaggttctgagctggtaggtcatggacatccacccgaacatgattagaaggctgataatcaggaacatacccttcatatgaaggggaaccatatctgaaataatcatgatgatgaaaaggaagggaacctgggagaagatttcaatgaggcgctgcatgccgaggtcaaacatgccgccgaagtatcccatcatcattccaaaggtgatgccgatgaaatatacgataggcaggtagaagagtgcggctttcatatttacctggaggccgccgtacagataagccagaatgtccgccccctgggtattggtgccaagcaggtggccccccttgaggggcggggaggggtggtagaagatacggctgattttatgttcatccgtctgtttcaggaattcctctttggtgccggggccgctgtaatgttccgccacaatgttgttgttttcatacgtggcgctgtacacctccgttctgtcttccagccagccggtggcccggtccacttttttccccttgcggaatttgtagctgatgtggggaagggcttcttcatccttatgcaaacgggaggccaaaccggaatacggcttgccgccgggctcgcagacgaggccgtcttcattcaccatcaaagcttccgaaccggggttggtggaatctcccgtgggatcgtatggaaccagaggcatgataacaagggagggttttcccggctggcctgcctgttttttcagttctcggtagttggcttccgcatccgcaaaatctccggtctggccaaatgtagaacccttgtatactttgcgcatcatggccggaaagtaccaggatccgtcctgaacgacaaggagggcccgcttgcccaccaggcattggtccatacaggccaatagcgtcaatacaagcaaaatgaggagggatacgtagccgcgggagatgcttttaaaacgctggatgcggcgcctggtgatcggcgttggatggaacctccgggggcctttcagcatgagccagaaaccgaggcctcccatgaccagcacgcaaacccagccgaaccacaggaatttcccctgaggcgtcagaaagccgccgttgttctggttcgtacagacgatgttgagcatgctcatttcccgtgagacggtgaagggccagcttaacgtgggcaggagcagcccgcacagctctcccacggcagtaagaaccgccagaatgaccaaaaggtatgccagttttctaaccatgtgtattattcaaatttgatgcgcggatccacagcggccacgatgatatcggagagaaggttgcccagcaccatcaggaaggaggtaagcagcagcgttcccatgatcagggcgtaatccttgtccatcagagcctggtaactcagcatcccgaacccctggatatcgaaaaccttttccaccagcatggagccggccacaatcaggctgatgaggctgcccagagtggaggcaatgggtataaaggagttgcggaaggcatgcttgatgacggcccctctgaaactcacgcccttggccatggctgtcctgatgtagtccgcggaaagattgtccatcaggttgtttttcatcatcatggtggtgatggcaaaggaacttactacataacaaatcagggggagcaccgtatggtgcagcaggtctccggcctgttgccagaaccccatgtccgcaaagtccggagacgtaagcccgcagagagggaaccattccagccgcgcgcccagatacaccaccagtacggcgcccagggcgaacccaggtacggagtaccccaggaaaatcaggacggaagagatgttgtccaccaggcttttatggcggattgcctttactaccccaaggggaatgcagacggaataggtaataatggcgctcaggatgccgaagtacagggaaacgggaatgcgctccttgatcatgtcccatacgggttcattgtacttaaacgagttgcccatagttccctggagcagcccgtcaaagctggtcttgtacattacggcacgccaggcatagccccgagccttgtcgcggacggcctccgtattatccgtctgcctcatgcggcgcgcccagcgttccgcgcagttcatgggggattctatatccacggtccagccttctgaagcggctttccgggacggcgtgccggaaaagaaagcatctttcacgctgccggaatccttgtcctggcgaactacgacgacttgttctcctgtttcattcagattgatccgtgtatgcgtatcggaaatgccggaatattcatcttccttgtctccctctcccgctccgccgatttccccgaattcctcacgggaaatgaaaatctttttgggcagcacgcccagccattgtagataagccgtgatgatgggctcctgcaggctgtactgctcttccagccgctccatatccgcttcactcaggttattgtcgccgcgctgggagccggctttctgtccggacagggcgctcatgctttgctgctgcatcatctgctcaatgggacctcccggaacaaaacgggttatgcaaaagacgagaaacgtaacccccaggagcgtcaagggcatgagaaggagtcgtctgatgatataggtcttcattcgtcgcgctgaactctaccgatttgtggaaggtgaggcaagtagcaatgcaaatttgtaagcctttgctaacataaggcgctgcccggttcttcttaagatgaaagggaaacaatgcaatacggcaggtttcctttcttttggcaggcctttcaggaggtgcggaatttacattccttctcccaaccggcgcgccagcatgtccggaagaccggcggccagaatgcgtctttgggcctccgctacatcgtattccacgcggcgctggtagtacaccatgctgtcttcgtcaagcacgccgtaggcggcgcggggatcgccgtctctgggctggcctacggagcccacattaatcagatatttattggttttgagtagctggatatccccggattcatattcatggatgcttccttcatggcggatgaatgtacgggggacgtgagtgtgtccgttaaagcacaggaattgattgtcacgcagcatattgatgctgtgggtggccgtatccacattcgtgacgtaggcccaggagttgggcttgtcctgtgtagcgtgcaccagaacgatttcattggggagaatgcgctggaaaggagcgcggcgaagccactttttctgttcttcggaaagttgctgtcgcgtccacatcagggcattgtaagctactgggttcatccctgccggattgtcttctccaatggcttcctcatcatggttgccgcgcacggtgggaatctggcggctgcggatgaattcaaggcattcggacggattggcgttatagcccacaacatcgcccaggcagtaaacggcattgcattgaagctgttctatatccttcatcaccgcttccagagcgggcagattggcatggatgtcactaatcagggctattctactcatggtattgtaagcaaagagcatagcactttggggaggttttgccaagcgcgtttgctcacaggaaatcatggttggggcacagggtgccggccttcccatgaccccttatttccgtctgtttgatttactcgtcttttgccggaggcaaagattccagggcttctctcagcccgtctaccggatatttcagggaattggccagatggctggtcatcaggtcacgggcgatctcatccgtgggaaacagctcccggaaggggatgcgttccttttccggtatgttcagcctgttttccagaacaaaaatattactcaccaggctgggtgtcctgttgcggggatccttgaataactcccggcccagttccagagcttctccggatttggaaggcacacggacgagcgcataaaattctttgcgggccgtaaggggaggcgctcccaaatcccgtgccttgcggtaggcttccgccgccttttcaaagtccggttgccggtaggtatcgctatacatgttgcccagcagggattgaaggtaccagctgtcaggattggcgttgatgcctttttccaggaagcggcgccccttttgaatgtatttgcggaagccttcccggcgttccatgggagaaagacgtttattgtccagataactggaggaagcgttattgcccaaatgccacgatccgttgtcccagtaaaaatcggagtgaggagcgagagcggtaacctggttgtagcggcgttccaggttggcccagtcggaaatcaggaaacagtcgaaagcttccatgctcagcacggccgccaccagggagcggagccctcccagggagaccatggcaagttgttgttccagataatcggaagaggaaagctctaccggattatccagcagcccctccgctttctcctgttccagaatatgattctgcaaaggcaggcgaatcatgccgaagcccagcagggcaatgatgaaaatgacgatggtcttcagcatgattcgcaattggttcgggttaattcatattcaggcgcttgcggatggccttgtccagaagttcccattccggcacggaggctccggcttgccgggccttggagagagggtctccccagatagccgtgtattcgacggggcgtccttcgttgtagtccacggcgctggatgggatgaaagcccccatggtttccgtacgggaaaggtggaattcaaccaaatcttccggcagggcgtagccgcgggccctggctgcctgtactacttcttccatgatgcggcgcgcgcgtacgacgttttccggattttggtaaagttccgcaatgctgatgccgcccagagccaggcaaagcccgttaaacgggatgttccagacgagtttgtaccactggatttgctctgcggcgtcaaaggcgcgcgttttgatgccggcattggcaaacagctcggagagttccctggctttttcagtcccttccggcgtgggaatgaagggggcgaactggatgttgcccccttccagatggttgacatggcccggtttttcccgcatggcgcagatgaagcacaggcccacatagatacgctccgccgggatgatgcgggcaatttcttccgcatttcccattccgttctggagtgtaaccacagttgtgtccggccccatcaacgggggaagggctctggaaaatccggcgtttgccgtgcttttccatgcaacgacaacgaggtctaccgggccgacttcctccgtgtcccggtaaacgttgatgcggggcagggagatattcccatgcaggcttttcacctgaaggccgtgttctttcagatagccgtattccgaacgtacgatgaaggatacgtcctgccccgattcctgaagtctggctccgtaatagcaacccagggctccggctcccagaatggcgattttcatggcgtgcggcgcagttggtgatatttttcagagtccctggacgttgcccttgtcatccagatagatgtgcatggcgttcggtgagacgggaagggcgggcatgcgcatgatttccccgcagagggccaccaggaagccggccccgttggcgatttcaaagtcgcgcacggtgatggtgaagccggtggggcgtcctcggaggcgtccgttgtcggaaagggagttctgggtttttgccatacagacgggaaggtccgtcaggcggctggcttcaaactgggccagcttctttttggcggcggccgtcaattccacaccgtccgccccgtaaatgttgcgggcaatgatgttgagtttttcttccaccggcagggcggattcatagaggggcttaaaaggggcggaactcctgtccgcagcttccacaaccatttgggccaggtctttgcctccttctcctccctgggagaagatgtccgcaatggcgcagggaataccgcgttccgcgcagtgtttcacgatagcgtccagttcttcccgggagtcgtcaaagaatttgttgacggcgaccacaacggggcgtttgtagtgggcggcagcgtccagatgcgcatccaggttggcaaggccttttttcaacgcgtccacatccgtgtttttcagatccgcaagggcagtacccccgtgcattttcagcgcgcgtgccgtcgctacgatgacaatggccgccggatccagtccggactggcggcatttgatatccaggaatttctctgcacccaggtcaaacgcgaatccggcttccgtgacggcatagtctccaaaatgaagggccatcctggtggccagcacggaattgcagccgtgggcaatgttggcaaacgggccgccgtgcaggaaacagggcactccttccacggattggaccaaattgggcatcagggcatctttcagcagggccatgacggaaccggtaatgcccagttcccttgcgaatacgggcttgtcatccgtcgtgaatccgatcacgatgcggttgatgcgttcttccatgtccttgtaggaagtggcaaggcacaggcacgccatgatttccgaagccggggtgatatcgaagcctgtttctcgggggaacccctgcttgttgagccccacgatgatggaacgcagggaacggtcgttcatgtccatgacccgcttccatatgactttgcgttcgtcaatgttcagcgtgtggaagaacatggcgttatcaatgatggcgctgatgaggttgtgggcggatgtaatggcgtggaagtcccctgtgaaatgcatgttgatttcctctgccggcgtcagggaacttttgccgcctccggtagccccgcccttgcggccgaacaccggccccatggaaggttgccggagcgccaggcagacttttttgccgatggcctgcaatccctgcgccaagccgatggaaacggtggttttgccttctccggatggggtgggagtgatggcggataccaggatgagtttgccgggggctgccggcttgtccaatacgtccagggaaattttggccttgttgcggccgaaggggatgacgtctttttcatcgacgcccagcttgttgatacagtcggagaatgcaggtgtaaccatgcgcacatgatgacggaagccccctcttttggcaagaaggttcatgggcattccggaccggatgaatcgatgagcgggaaagggccgccttcttcctgtcccgcggcattccccggatatccatgcaactccgggagaacctccggaaatacccggtatggcaggttgcgctaagacgggggtaagaatcagggttgcgctttctgtttcccctcagccagcacgggacggtagtggcccgtgatggtatgggagaacaggaagtcttcttcctgcgttccggcgccgacattatgaatgatcagcggcgtgccttcctccgttttccggtcggaaacgatgccaatgtggggaatactatcggacaggttccatgtaaccaggtcgccgggctcgtagtccgccgcgttttccgtaatgggaacggaccaaccttttctggcaaagaaggtacgaagattagggaccctgcggtggtcaatgctgcggtccgtcgttttcaagccccatattttagggtatttggaaaagtgggccttcatgtcctcatgcacggctttttgaaggtccaggccgaaggccctcatggcgcggatgaccacatccgtgcatactcccgtttcgcggggaacgtctccgttggggtaggggatggattgatagcctccgttgtaggaaaccgttactcctacctgttcacgcgccctggccgccagcgcggcgttgtccgccatcaggcatgcagggcaggaaagaaacaggaggatgagaagggccgccggtttcatagggaagaaggggagggaaaagcaggaaaatcagacgaagctggcaaagccgatgtccggccggcgctgcatgccgttaaattgaatctttttgatttcgttgtgggcacgctggcgcgcttcggagagggtatctccctgtgccacgacggccaggacgcggccgccattggtttcataacagtttttatccgcattccatttggtgccggcgtggtaaacggaagcatttgaaatgtcgtccagtccctgaatagcgtcgccggaatgggaggtctccggatatcctttggaggccagcacgcaacagacgctccagccgttttggaaggaaatttcttccggcgcaaattctcccttggccccatgcaggcagaaggaagccaagtctccggagagcaggggcataacggcctggcattccggatcgccgaagcggcagttgtattcaattacttttgggccgtttggagtcagcatcaggccgaagtacagaaaaccccggtaaggcagcccgtcttttttcagtccggctaccgtcggagccacgatttccttttcaatgcgttccagcatttccggctccaccagccgacgggaagccaccgctcccatgccgcccgtgttggggccagcatcgccttccttgaggcgcttgtagtcccgtgccgggcagaggatgagataatggtcgtccaccagagcgccgaagatggagacttccggtccggtaagaaattcttccaccagcagccgtccttcaccaaaacgcctgtccgtaaatacttctttcaggaaagagtctgcttcctccttgctcatgcagacggctacgccctttccggcggccagaccgtcaaatttcagcacggtaggatagttgtttccgatgaattgccgggcttcctccaatgtggccgctacgcgcgcctgcccggtagggatgcggtggcggagcaggaagtccttggcaaattccttgctggcttccagctgggcgctttcttttaccggcccccagcaggggatgcccgcacgggagcaggcattggccaggccttcatccttgaccagatagctttcctccccggcaacgcagagatccattttattggaaaccatccagtcgatcagcgagggcagatccctggccgggatgggggtagccagacggttgatggcgtcacttcccgggaaacagtacatttccggagcggagggagattccttgagtgccttgaccagtgcatgttcacgtccaccttttccaataacggctattttcatacgccgccagtatgccgggacggactgattttgccaagctgaaatgaacggtgaggttttcccttttgtccggttgttcccatgcttttcctccattgccgggaatggggttgtaccactttttcttttcgtggcacggcgcagccgttccgttcggggaagatgatgtaaaaaggccgcctgacccggaggaaaggcggcctgtaaaaggaaagggcggtatttgcgtttagaacgggatttcgtcgtccatgtctccgaagtcgttggacggctgattggtggggggcatggggggcgggttgtagttctgggccgggcgggattgtccgtagttgttggaacggggagcattctggtactgctggcgcggagcacctcccatatcgccttcaccgccgcgggggaagagctggatgttttccccaatcacgcgcagcttggtgcgtttctgcccggaggctttatcttcccaggaatccagttgaaggcgtccttccacaaagactccgcggcccttgctgaggtagttgccggcaacttccgcctggcggttccaaagggtgacgtccacgaaagtggtttcttcctggcgttcgctgttgtcgcccgcgtagtaacggttgatggcaaggcggatgtccgtaacggcggttcctttgggagtgtagcgcagttcgggatcagcggtaaggttgcccattaagaagactttgttgagattggccatataggatgggtgttaacgaggtgtatggtatataggaaaagggccttgccgtttaggaggaaggcatgtgtttggtcgctagcaagtatgggcctgcacatggtcttgtgcaatactaaattacggaatcgtccttcatcatgtctcctttctacattgcattcgtcatggaaccgtgaaaactttacctccatgagtttcaggcagcggcggagaaacggactgttccgggtttcctggggcacatgccttttgctgtctgtgctggcacacctgtttttgctggcggggagctgcctggttcctgaagaatggctggcttccccacgtccggctgaagcggcgcggaggaaagtggctgtaagcgcgcgcatggtaaagaaagtggaacctcaactggagagccggagacaagagcccgcggaatatctgcctgccgtcgtgaagaccaatgaggagcaggaaagcgccaccaggccggaagtgcccaaattccagagcaacaggaacacgcgggcggaaggcggccggaaggatccggacggcgacagggatatgcccgcccaggatggcgtggaacgggaaaacggagagattgtcctttttaaccaggaaaggcaggatggggatttaagccatgaacgggacggcaacaaaaacgcctcccccggagcttcttccaatgttccctaccagcccctggaaccatccatgccgcctgctggtcatcccggttccctggctcattctcccgtcaagaagggagagccaggcaaatcggaagaggaaaaaacggcccgacaaaacatccgtcatgcacaggagaaggccatgcagcttccccatgcggtagtgttgcccagccccggagattcggagaagccggatccgcttgaggaattggccaaaagcattgcgaaaggggcggacaatcctcccctaaatcttcccaatctggatttgctgcccaatacaaaaccggttcagaaacagcccttgtatgatcccatgttcaatgcggagagccagcccggcttcaagacacatgagcggaagaccaagcaggccggcaaattcagctttggccgccgtccgacattggatgtggaagctacgcccatgggaacgtaccaggcgatcgtttaccgggctatcggggaacaatggtaccgccagtgcgatttgaaccgcgacctgattgttaccggaactgtgcgcatccgcatcctgattaacaagaatggcaaaatttcgtctatgaggcagacttcccgcgtgggagccagcgaggtacagaagtcctttaccttcctcgccatcaaactcgccaggcttccagcgatgcccccggaggtaaggagtatgcttgtgggggattctttggaaatgtatttcgatttcaatttttaacaacctaccatcctgcaacaaataccattcacagatatatgatgatgaacttgatcaaagactgcattacattcttccaggcaggcggcgttttcatgtacccgctggcagcctgttccgttcttcttattgcggccgttatttaccgcatgttcaatatgaagaagagcctcatttgccccgtcgtgctgaccagggccgtggagcagtacacccgcggcgccgtggggcgcactgaattggagagaatagctgcggattcggattccgtggagggccgcctggtgctggatgcgttgaatgcaccgctggaggatgaagcctccctgaaggaaatgatccaggtgaaggcccgcgaggagtttgtaacgcttcaggcgggtctgcccctgctggacatgattgtgatgatcgcacccatgttcggcatcctgggaaccgccagcggcctggtgcagattttcagcgttttcggaatggatgagagtcacggcatgattgctcaggggattgcccaggctctgaatacgacgattgccggtctcgccatcgccactccggccgtgattgcccacgtttattattcccgcaagctggagcgtatttccgcctccatggaagtcctgctgacagaactggtttccttccgctgccatcattcccaacgctgacaaggccatgcagttttaccgcaagaaagcaaggagcatgggggtgcccatcgtccccatgattgacatattgaccattctgctgatttttttcattgtccatacgcagtggaagaagccgcagtccctgcttaagatagatgtacccggagcggaattcatggaggggactccgtcttcggaacagcgggccgttctggccgtgacggggacatccgccatttccctgaatggcaggctggtggagatgaatgaactggctgctgccctggaagccttgaaaaaggaaaatccaggcgtcaaactgcagcttgatgtggataaaaaagcggagtttggcatcattgtcggcatttgggatgcgctgacgtctgtgggtattgacgcaggtgaggttcctgccagaatagaaatcaacaagcccggcgaacggtaagcgccttaacatatatattatccccctcccgatgttattggaaatagcacagtatggaaatccggtattgaaggaaaaatgccgccctgtagaacattttgacgacagcctgaaaaccctggcggaaaatatgctggaaaccatgtacgcagcagagggcattggcctggcggctccccaggtgagcattcccattcaactggtagtgattgatattccgaaggaggaagagtccgtcacctggcttaaagtgaacggagaggacaaagagctttccgacatcatgcccttgatgtttgccaatcccgttctggaaccttacggccccatgcatccttttcatgaaggctgcctgagcgtgatgaaaatacgtgcttccgtcgtgaggccggattttgtcaaggctacggtgcttctgattgacggaagagaaataacgattgactgcaacggccttctggccagatgcctgcaacatgaatgcgaccatttgaacggcatcctttttgtggagcgcgtttcttccgcacagaagattaccctgcgcaacaaattgaagcgtctggcattgggatattagctttccgtgacatccctcaggccctttatggcagccaaaggaggggggggcaaagaagaccgcattccggaaccgcaaagtttttacagccgggaaccgtcccgtgatgttcccggcagactataatccacccgggttcgcagtattcggaagagaagaggtcaggacgctttttccggatccggctgaatcggttttccggattctcttttgacgcgtatttgcaaatctgccaaagcgttcatgtagtaaatgtacgcgtcaaaggcggatgcatacggcgtgaaggagttttccttctgcatgtagtggaagtgatccgcgctctgcagtttgcgccaaacgtgggtgagatccttgtcatgggctgccttgaccggtttttccagacggtagattttgcggagggcttcatcctgcatgacgttgccattccaatgggacatggttccaaaagtggagcaggtcatttcctgggtgcactcacagacggaaacgggcttgatttcctgcgctacttcggacggagtcatgaaccggttgccggcgtctatgcaggcgagaatcatcgtacgccagaatctgaagacgcctgtagcgtcagactggcgttcccccagcgtttcatagtccatggacagggtagtgacgcttccctgctggtgcgtcagccaatccgcgaaagtggtgggggaaagcgggtattccgaccattccggatcagtccgcatgattgccaggtcattggagagttccctgttgcggaagatagtggtggtgttatacacccacggagccaggaagacttcattgctggtaaatcccttgagcatggccgggttgccgtccgccatgatgcccttgaagccgagcgtttccgcctgcgccgcaatggcgttggagtacagcatgccggtattcatcagcacatccgtttcctgatggaagagttttttgagaagctcccggtgttcttcaatctgttcggcaaattcctgaggggagtaaacggatgctagggaattgtaataaggcattgccagaaagtccacacagccggtttccgccagatccttgaatgcggcaatcagatccggcctgtggtacagggcctgttccagaatgactccgctgagcgccagcccaaagcggaatttgcccccggtgagttcaataagctgtttcatcagccgggttgccgggaaataacagcgttccgccaccgtgctaagcacgcgggcattcagatcatcatcttcataaaaggcatgttctccaattttgaagaagtcataatgaatcagccgattgggctgatgcgcaacgaaagtgagggaaatgttgctcatggacggggtgaagaaggctgagagttatggagtagggtaaaaaggcgtttttagcggttcagcacatgttcatagacccggataaccttgtctgcggcggcatcccaggtggaagccttgatgtcctccgtgctctgttccactactttccggtacaattcctcatccgtgcagagatggacgatatgttccgccatcttgttgacgtcccagaaatccgctttcagggctcccttcataacttccgccacgccggactgcttggaaatcacggcgggaatgttgaattgggccgcctccagcgcagaaaggccgaagggctccgatacggaaggcatgcagtagatgtccgtgatggagaggagttcattgactttgtccttgttcaggaagccggtgaagtggaatttgtcgcccacacccttgaaggctccggattcgatcaactggcggagtttttctcccgtaccagccatgacgaagcgtacgtcgtccgtctgttccagaaccttggcggcaatctgaaggaagaatcccgggcctttctgagccgtcaggcggcccaggaagaggacgagtttttccggaaattttttcttccctttgaagactttgaccggatccgctccgttgtgaatgggaaatatcttatgggggtcgatggcatagtgcccgctggcgatggttcccgtgtatttactgaccgggataacggcatccgcctgttccatgccgaatttttcaatgtcgtaaatccagccgcgggcatccgctccggcacggtcaaactgggaagcgtgcagatgcaccaccaggggcttgcccgtggcttttttcacttccacgccagccagataggtcatccagtcatgggcgtggataatgtcaaaatcctgctgaagggcgacttttaccgctatttttgagaattgaatgactttcagggccaaatccccggcgtaaaggtcttccttgttcctgaacagctgaaggtcggcttcatgcgttttggagaaggtgatgcggccttccttggtgaactgcaccacgccggatcccccttccacggtggtgtaggggtccagttcaatgggcgcgcgctccaccagggcaaagctgtcataggaatatttccgattcacttgctccacttcccgataggagacgttattgagaccggtgagctggaatccgtcaaaaaggacggaagggtcggccttgggaacgatcacccttaaatccactttttttgccagcgccttggaaagacccaggcaggcaatgcccaaccccccgttgaccaggggcgggaattcccatcctaatgtaagaactcgaattgtgctcatcggttgatgtggtttgtcggtgccgggaaggatacggactcgtgccgtgttgtacaccaacgcaataaaaccagatttttcatgttcggtctagattaatatgaataattttactctaataatgaaaagaaaagtgctgctttagttcaatcttgcgttcgtcatgaaattgatttagtctggactgaacgcttttgatcctctcttccgtccggcttcaatgtgctccgtttccaacatccctgaaagacgaaaaacacctcctctccgggggagtttcgtcaaatgggagtacacgaatacggtttccaaaataactctcagcgtgtgtcttgctgatgccggtattgtccgcgtaacgtatttccccggagcggtgccggaagacgagccgagttatgccgtaagccccggatattccgcgccgggagcggaaatccgcgagtatgatgaggccggggttcatgtcgttgagacgtccctgctccgcatccgcattcgcacggaggagcaaaaggtggatttttacgatgttgctacggatgagcccctgctgacggatgagggcggattcggccgggagagcaaggactggactggagacgcccgggtatggatacggaaaaatcttcaggaaacggagcattttttcgggcttggggacaagccgtgcgccttgaacctgaggggcaagtatttctccatgtggggagcggaccattatgatttccatgaggagtcggatcccctttacaaaagtattccctttttcctcagtttgcgggaaaggaaggcgtacggcctgttgtttgacaacacgtgccgttcgtatttcgacttcggagctacggatgaaaaggttctttccttcgggtccttcgggggcctgatgaattattatttcatttacgacaacactcctctggacatcatctccgcttatacgcgccttaccggtacgcctgaattgccgcctttgtgggcgctggggtaccaccagtccaagtggagctattatccggacaaggccgtatacaatctggtggagcgtttccggggcctgggcattccgtgcgatgccgtgcatctggaccatcattacatggaacggaaggagggatttacctgggacaaacagaattttcccgacgcggaaggaatgatccgcgccctggagaaggacggtgtgaagacggttctgattgtcaatcccggcgtgaaggtcaattccgccaatccggtctggaaagaggggatggaacgcaattatttctgccgccggtcggaaggcaatttattgtcggaagaagtatggccgggactttgcaattttccggattttacggctcccgccgtacgcggctggtgggcggatctgttcagcagggatattgggaaaattggcgtgcgcggcctctggaacgacatgaacgaacctgtcgtttttccggaccgcactttcccgatggatacgcggcatgaatatgacggcatgccctgttcccatgaaaaggcccataatatttacgggcagtgcatggcggaagcctcctggctgggcatgaagcgtcacgctccggaccggcgccccttcctgctgtcccgatccggttttgccggattgcagcgctttgccgccacatggacaggggacaaccggtccagctgggaacatttgaagctggccaatttccagtgccagcggcttgcggcttccggcatttcctttgcgggagcggatgctgggggattcatggggcatcccacgccggaattgttttgccgctggatgcaaatggcttctttccacggttttttccgcaatcattcctccggggagttcggcggtcaggagccatgggtttttgggcaggaagtcacctcttacgtgaaagccgccatagagggccgctaccgcctgcttccctatatctacacgcagttccgccggtacgcggagacgggcatgcccgtgctgcgctccctggccctgcaatgttttaccaacaaggacacctactggcggggggcggagtatttctttggagaccatctgtacgtcattcccattcatgagccgcaggaaggcgggcggttcctctacattccggagggcgtctggtattcctaccacacggacagcctgatggaggacacaggaaaggatgtatgggtgaagtgccccctttctttcctgcccgtgtatgtccgcggaggggcggtaattccccattggccggtacagcaatacgtgggagaactgcctcggccgccgctgacgctggatgtatggtgggcaccggaaggggaggtggcttcccatttgtatgaagatgcaggggacggatatgcataccggaacggagaatgcgccgtgcatgggttcctttaccgcggcggcaccaattccctggagctggattggaactgcgaaggggatccctgtgcgttccatgagtccgcagaggtggttttgcacggtttgcctgcgggtatttccgtcagtgcatgcatggacggcgtgccgtgctgcggcgtgatgagggaaagaagggtgtggaaaataccggtgaaggataaatttgacacgctttccgtctgctggccggaggaataatgttcttccattaagggatgaggcgtccggaggaactgtcatggaaggtggaaactgcgcctgaccgtatccctcttcagtttcagttcccgccattcatgcgtcagggtggaggaggccactacgccgcccccggtgcagagtgcgagcctctgcccctgccagtacagggagcggatgcctaccaggcagaaaaagtctccattttccagaaaaccgaacggggcgccgaagtgaagcggacagcggagacgtgaacgccagtcgtccagctgggagagcgtgttttccgtgcggggctgggaacccagggcgggggtggggtggagcagccgtatccagtgggccggagtatgctggtcatcagattccagtgtgaggtaagtgacgaagtggatcagggtgcccaggttcagcacgctgcgtgccgttctggtgacgctgccgtagggggacaggcgggaaagaatgctgcccgccacgatttcatgctcgcggatttccttgtcgtcgttgatgaaaaccccttcatcctccggacgggccgttcctgccagggccattgtctccaggcggcggccctgctggtggaacagtgtttccggagtgattccgcagaatccttcccgttccgtccaccaggcgtagggataatgggacggagagctgctgatggcccgcaggatgagttcccggggggtgtgggggagcagcatttccccgaactgggggatcgccggaacgcttttcatcaattgcccggcagcgatttgctccatcatttccgcaaaaacctgcgcgtatgcgtccggagacggttccgcccaccggatttccggagcaggcggggggggatttccctccgccgggagagcatgaagggctgccggtattttccatggccgcgggtcgtccagccggaatgtatcaatataaaaggcggggccggaatccggcggttccgctgattcccggaaaggcccggttccgagaagaaggccgtgggaagggtgcttgatcagggctccggaagtcagcgtttttatgtccatgcgcaattcatgttaaaatgccgccgccgggaattccagctatttgaatgtttgtgaagtgcggaagaaacgggaatgacggttcaatgggcgcctccgtttttccagaatgtcccatggatggcatggacctgaaaaagggcattccccttcgttttcctcctccgttgaaaaagcaggggatgacggccttcccctgcccggagcctgtaacggagagaaactccgcccctgtttcctggagccgtgcgccatgtcacgtgcgttccccttttgaattgacgggaaaaagcactcaagtaagctttaaagagcttccaaccctatgcagataatgaacagaccagcaccatcagtccccaccgccgatattccggtagaggccatgctggcagaggtgcggaagccgctaggacccgtttggtggagcgtgtttctcgccagcgcattgctggcggcgtggggcatagggtggagttcctggcgcattgccgcagagggtgtgggcgtgctgggggtgaataataacgtggtgtgggggctggacatcgtgcattttgttttctggataggcctggggcatgcgggcaccctgatttccgccgtcctgctgctgacgcgccagtcatggagaagcccgattgcgcgcggagcggaacagatgaccctgtgcgcggttatctgcgccgccgttttccctgtggtgcacgtagggcgtgtctggatggcgtggatggcttccccgttgccggaagtgagcggaatttggccagacatggcctctcctttgatgtgggatgtcatggcagtcagcacctattttcttctttccctgttgtactggtatatcggcctggtgccggatttcgcgttgctgagggattgctgcaaggggcgtctgaggcgccggtacgggtggctggcactgggctggcagggaacggggcgccagtggcgcgcctatgaaaaggccagccttctttttgcggttattctgactcctctcgtggtatccgttcattccgtggtgagtttcgatttttccgtgactcaggtgccggggtggcaccagagcattttcccgccctatttcgtagggggggccatcctcagcggcatggcgatggttcagctgattctgctgggggtgagacgtctgatggccggcagcggcgttcgcagggccgttactccggccattctggatttaagttcccggtttgtgctggccctgagcctggtgatgggagccatgtatttgtgggagcatctggcagccattctgaatggaggctctccggagccgtttccgggcagaaatcctgtgaatgccgtgttcctcatcgtcatggttaccgggaatgtggcgctgccccagttgttctggttccgctctctgcgaaccaaccgctgggtgatcgccgccgtggctctgggagtgcttgcgggcatgtggatggaacgtttctggattgtcgtgaattccctgaaggcatccctgctggctgccaacatcggagattatttccccagcgtgacggatttggccatgatggccgggagcgtggggctgtttatggccctgtacatggcgctggtgcgtgtggctccgttcttctccctgtgcgacgtgcgggaacagcaatccctgaacaaggagggcggggaatgaaaaagcccgtcatttccggctgggtgctttccttcggttcggagaaggcgctccttcaggccgtccgcgtgctggtgaaggaggaaaatctgcgctgggaggtttgcgctccttacccctgcgccgctgttcgtcttgccaacaggcacgccgggaaggccgtgggagcaggcgtccggctgtgggccgcagcgggcggcgtctgcgggtttctggccgtggctctgtggctttactggacgcagttctgtgcggatccccttgtgacccagggcagggtccagggctgggacagctggcccgcatatgtccctcccctgtttgaaggaactttgctgggggccggattgctgaccgccgccggtttcctgaagggggctcttctcccgcagtggcacgactgggcattcgagtgtgattttttcaggacggatgagcacgggaacggttacttcattctgctggaaggcgggagcgaaggccatgccgccgttttggctgaagccctgcatccggatgcctgcgagtacgttcatgggaaaggaggccgggcatgagaggaggcatcacggcggtagcagcccttgttctcctgggagcgctctggttcctggcaggggacgacgatggaagaaatgccgttccccgtttgtttgacaatatgaatgatcgtcctctggcggatgcccagcaggtggggatttcttccgccgccccggaccggaaaacgcgcttggcgcctccccgctccgtggcgcagtccctgggcatgaacggaacggtccgaaaacgggaggatgaccgggactcgtttgctgcggaaggttcctatttttcctccggccgcatgcagggcggagaggaggattccatgcctctggaactgggcggcatctcccgcagccgcgacgtgctggcggaggggcgcgcgctttatctggcgcattgcgccgtttgccacggagaggacggaagcggacgcggaagcatggccgcttatgacacctatccgcaaataggccccttccgggatgaaaaatatgcttcctattcttccggaaaaatgttcaggagcattcggttggggcagggaaacatgcccgctttcggaaacatcctcacggcgcgggaaatctggtgtctggtggcgtttatccgtcatttgcaagcgccgccggaagaacctgccgttcaacagaaggaacaacattcatgaacagcaatacatcttcaacaggcggggaacgccgggaccgtccgggattcggctgggccgggcgttccgttgccctttccctgtggatcatttccgttctattatggtgtgtgctgatgcgccagtcctttacggccatgccctgggacgacatgacggtagccggagaaaggctgcaggaattgagaaggccgttcgccgctgccggaatggccgtaggagtccttggctccagcctctgtctggggtgcctgttctggctctgcctgtcttcactgacgggttccggctggggcattgcgctgagaagggtgctggcggcgggttgctgggggtttttacccggtgttttggtattggccggaacggtcggctgcctgactaccgtgatttttccggaagcagcccgctactggggagtggcggatgttgcctctcccggcctccagcccttcggcgttctggatttggctgacttctcatggtggaacccggcatggctgtacgtgcgcgtggggagtattgcggtgctttcctggagcatggcccaggtatgggaaacgctggttgcggaaaaaaatgtctggcagccttccttccgccggggctctgccgccttctgcatggttgtgacggtgatgatgctgggcctgctggggatggacatgctgggagggacgggaaaggtcgttctttccatgttccccgtatacatgattgcatatgttctgctggcgtccctggcattcgctgtgttgtctgccgtgttcctgaggcggctggacggagggaaggagctgccttggccccgcctgggcggcatgctgacggccatggttctggtgaaagcctatattgtgtattctcagtacatgattacctggtacgcctccattccggctgaaatgtccttttataacgcagccgcttcctccggctggtccggaatgtttgccgcggctcttgttcttcagcttctgctgcctttccttattttgctgttccccgcgttgagacgccggccgtccgctttgggcgctgtatgcgccggggtgctgtttggctccctgctggaagcatgctggatgtttggctccggacttgggctggatccgtccgcatggaaggcatggcttccgcttgtcctgctcttgggagggatggccctgatctgctgtttttccttcctgggggcactgagcgtccgcagggtatttcccgaatcatgatgaaccgtaccgccgccgttttttttctgtttttccgccgtccgggcgagtatctccccctgttctggctggcaggggctttcgtgctgggtttcctgtggtcgctggcgtacgcttccggtctggtggcggaggagcctttgccgtggccggccggccgcctcatgttcgcattctacggcatgctggtgtacggctgggccctccccatcctgttttcctttgcggcgggaagcaggagccggtggatgaaacccgcagaatggctctggcatgcctgcgttgcgctggggttggcgactattgccgcggggaatgggagcggcgtgctcctgatgccttttgactggtgggtttgcccggtttttgccttccttgccgcaggggcggcgtgcgtcgcatggttccgtccgtttccgtggcctgtacggctgttgttcagttcctccgccgggtgcgtggctgcggccctttgggcgttgggatatacgcaggcattgtccatgaatggcctgctggatgtttccgccctgggaggaagcctgtcctgcgggctgatgtttgccgccctgggagcggcggcgctccgcctggatatggcgcaggggagggcagccggaattctgtccgtctggatggccctggtgctggcggcggctccggtgattggcgggctgggggggcttcaggggtttcccgtgccgtggatgttggtggaggccggtaccgcctggttttggtgcgccgttcttcccgccgtcctggcggtggcgcgtttttggataaaatccggtacgaagaccggaatatgggtgaagaccggagtttccctgcttgccttgctggcggcatggaacgtgtttgttgtgggtgcgcctgagctgatgcagttttccctgtctgcatggcatgaaccggaattatggattctgctgggggccggagttttgatgatggcaggggggaaggcccccggacatttccctgtggcatggcggctgttgggcgcaggcgtctgcggcgtgcttctggcgtatgccgtgggcgtgcttgccgccctggatgtccaggcttttcctgaggcccgtcgcgcggagctgatgagcggctgggtgggcatggctgcctgcatccacgccgttgccatggctttttgcctggcgggcagcctctgcctgtggcggccagcgggagcggaagacggaggccgggagccttcccctccgtttttgctgcgtttcttcttcatttcagccgtagcggcggctttggcgctggcgacggctgcggccgttgttctgcatgctccgcctccggattccatggaggtcaggagacccgttcatgatgcggaaggttccggtatttatgccgcggaggggtgtgccctgtgccatacccagattatccggcgttccctgtccggaaaggactggcagacggcgattgaccgcggcacggatcctgatttcccctaccgggtcagtgaaccggaagacatggatgccgaattcaacagggaaggagcgccgcaggcgggggtggcggccataggcccggacctgagcaatgcggcggaatacgccgccgggaggctggaatatgaagacgccgtatccggcggcacgcgccgcgccgcgcaggtgcgggaatggctggccttgcatctttacaacccgcgggaaatgcagttcaacaaaccctggaccatgtgtccggccatgcccggactgtttgaggaacgcccggtggaagggaacgccccctccacggctgccctgcctgtccggatggaacggggccgggagctggtgccttccccgcgcggggagcgcctgttgaactacctggagtccctgcggaggggggaaccctccctgaagcgcgaccaaatccattccttcccggccctgtcccatattcacccggattatgccgcgcatcctcccgccgtggacatggaacgcctgaagaaggcccgcgccgccgccgtgatggaaaagggcaggggcgtgtacctttccaaatgcgccatctgccacggcaacgacggcatgggggacaaggtgacctatccgcccttggccgggtccgagtggctgaaggaaaagcctgatgtggaaatcgtcaggatcatcctccagggactgaccggacccatcacggtgaatggaaaggaatgggattccaccatgctgccgcccggcgtcacggattcccgcgacctggcgaacctgctcacattcctgcgccgccagttcggcggggtggagaaggcggcctatacgccggagcaggtggacgccatccgccgggatctgtgacgggagggcccccgattacaacgtttcatgctccttgccccgggaacggaaatggctgcaaatgccattctatgaatttagatgatacgtccgccctttctgcggacagaaacgttgtaatcggaacaaatgccagtgccgccaatggcacggacaatgttgtgataggttacctcttccaccagagacgaccggggtaccgttgtgggttccacgtccgtgggcaccaactccgctggaaccgccctgggggatcatattaaagtagggaattcctgcgtttccgtaggtttctagtccaatacggactactgtcacatggggattgccctgggttatcagagtaatacgtccaatgaatcggagaagctccatacggccacggcctattccttctgcgcgggcatgggttcccggatcgagggggagcatcggcaggggggtatgtggaagacggttgcgggcacagcatcgtgcttggcggctattccaggtcggaagtgcccagcgacattgtgatttccggcggccacgcgacggccacccggtgtggttcgtcagtccgggcgtcaccagcggggagatgatgctggccaggcaagcccttttagatttccacaacttcctctttcgtgatggcattgtaggccagtgttatccctccgaagccggaaccgggggccggaggattgcccgggtcaatgtcctttgccagcaaatccagcgggtataattccagtttggtgccgggggtgcagaaaaataccacgtcgggattgtccccggtctcgtccgttttaaaaccaagcttgtcccggtaaaattgcagggactttttcatgtctatgactccaaggcagatgactgttcttcttcatggaattggcgaatagcctgtttttctgtttaatgttttgcggcgcctccgccaggaaaatgtgtttttcccggttttgttaacgtctggttttatggtgaaagaaacggagccgtccgcaggtagttaaggaaccttttcatgaatcttccttcctcccgcattccctggctggacaacatccgtgtttttgcctgtattctcgttattgccagccacatcgtggggcagttttttgtgtcgcctcctttcactccggacaatgaaacctttgcctggtcctccttttatacggtgctggtgcgggtctccatccccctgtttttcatgatttccggcgccctcctgctgcccgttcgggatatgacggggcaattcctgaaaaaacgcttcacccgcgtcctgttccccttcctgctgtggtctgcgttttacactgtttttccgtggagctatgaaacgctcacgggggacagctttcactccgtcttccccctctcacaggtcacgccggacctggaaaccatgggaacgaacctgctgctgattccactgaaattcagcgtgggcattcatctctggtatctctacgtgctgatgggcctttacctcttcctgccagtaatatccccctgggtggagaaagcgggaaaggcggcctttgcctacttcctgctgctgtgggcgctcaccctcttgttcccttatctccagaccattttccccagctatctgggaaaatgcccctggaatgaatacggggccctgcattccttctccgggtacctgggttacatggtgctcggctgctttctgaggaaataccctgggaatgcctccttcgcccgcacggcctgctgggccgttccgtgtctggccgcggctttttggtttaccctccatttctaccggacgtccacggctcaggcctggtcctcaagcggcgactacatcggcttcgccagcattaatgtggcccttatgtccgtggccgttttcgttctcttccagtcacttcccgcgttcagagccgggtccgcgccgcggcggttcctggctgatttctccagcatgagtttcggcatctacctggtccactttgtgctggtgggagccgtttaccgcctctttggcatgctccatctgttgttccttccggcttctctttccatcccgctgctgactgcggcgacgtgcctggcagcctggggaatcatcaagctgctctccttcctccccggcagcaggtacctgatcggataaattccggcatggagacaaaaaactgccctccgcaccgtgtggcgggagggcagtccggatggaaaaagcgggaaaaacagagatcagctcagggtttccaccagtttgtcgccgtaagcggagcaggtaagttccgtggaaccgggaatcatttccgcaaggtcgaacgtaaccgttttttcggaaatcacccggtcaatggcctgaatcagcagatcggcggcttccgtccagcccatgtagcgcaacatcatctccgcagacaggatgacggagctggggttggccttgttcagtccggccagtttcggcccggtgccgtgcgtagcttcaaaaatggaatgccccgtcaggtagttgatgttgcctccgggggcaattccgatgccaccgacctgcgccgccagggcgtcagagatgtaatccccgttcagattcagcgtggctaccacgtcgaagttttccggatggagcagaatttcctgaaggaaggcgtctgcaatgcagtccttgataacgataccgttgggaagtttcagccaggggccgtcccctatggggagggcgccgtattcccgccgtgcgacatcgtatccccagtcacggaagccgccttccgtgaatttcatgatgttgcccttatgcaccagcgtgacgcttttccttccgtttttcacggcatagtcaatggcggcgcgcaccaggcgctccgtgccttcacgggaaacgggcttgatgccgaagccggagctttccgggaaacgaacctttttcatgcggtccgggaaaatgcggctcatggtatcaaaaaacagcttggcatcctccgtgccttccttgaattcgattccggcgtaaatgtcttccgtgttttcgcggaaaacgaccatgtccactttttccggagctttgacgggagtttcaatgccgttgaaatagcgcacgggacgcaggcagacaaacagatccagatcctgccgcagcgtgacgttcaggctgcggatgcctccgcccaccggagtggtgagggggcctttgatgccgatgaggtacgtgcggaaagcttccaccgtttcattcggaagccaggtgcccagattgtcaaaagatttctgcccggcaaaaacttcataccatgcgatggaacgcctgccctgataagccttggctacggctgcgtcaatgacacgggaggccgccgcccatatctcaggaccggttccatcaccgatgatgaaaggaatgacgggcctgtccggaacgcaaagcctgccgttctgcatggtgacggctgcaccgttcgcgggaggggtgaatgttaaattggccatgacgtgcgttcctttataggacgcagcccggtttggcaagataaaagagcggaatggggaactgtgcttctggagctttgccggctcctgaagcaaccggccttgaaaatgttttcctcttgtgcctcagaaccagcggtccttcccggaaggttcttccggctgcccggcttcttcccggaggcgtttgaggaaattttcttcagcctgatgtttcaaaccgctctccatgatatgcttccgggcgttttcgttcagctggttgacggcaatggcggcatcttcggaagtcagcctgttccagatgccggcgtcatccttcacgattcgcagggacccctccaccatctcacaggaaatcagcttgccatgaaggccctctgccgtaatggggcctttgtttcctgcgggaatgataatccgaagaggttcgggcccttccagattgatgcccccgtgggcgcggtaggccgctttcagaatcagcgttttcctgctccaccaccaagtggtggagtaacggtattcatattcaaaagtccgttccactgttaccaggttggccactttttcatccttctgcacaatcagggccacaccgccgtggttggaggaaaaacccttattgatcagggtgaggcccgcttccctgccggcttcaatcagtttttccgctacagccatcggcttttccgccggggcggtgatgcaggtgcgcacgccccagaacaatacgaccagcacacctatcagaacggctcccctggccagcgcgacaacggcgggggaatggaaaaaggtgggggaggatccgctcatgagatgttgtgcgtggcggaaattcagggttccgggtcttcatgggagccatgttccctgatagggggcatgaacagggccaggaaggtgaaggcgatgacggtcaggtcatctatctgtcctactcccggaatgaagtccggaatcaggtcaatgggggaaaaggcataaagagccgtcagagccaggaggacaagcttgcgtctggtgaacaggcgcggttctccttcccggctgcggaagtaattgatggccctgaccagaagctgctgcctggagccgttgggcggaatgggaatcttgtttttcatggagatgcaggggtgaatttaccgtcaatggaaaggaaactcttttttatatggaccggaagaagacccgaaggcaggataacgcaccccttcgtcctgccttgtcccggcaacggcacgggaagggatttttttgaagccgttttctgtaggcgtcttttcatcaggaaagctctttccttattgtctcatgcactcccggccgcgtccagagcaattcccggcttcttccgggaatgagcttccttgcatttgagagagagtataacgtttacggcagttgtgccgtgcatgtatctccttttcctggcattatcatcggcaagggaagagggcaagtgccggaaagcgcggaaggaaccgtaatatttgttttgtccctgccgttttccgagcctgttttcccccagccgcaaaaacgttccgcagggtagaggagggcttcttccccattggcgtgcgttcccttcccggaaggggaacgcttgggcttgcggcattgacacggcgggaggcacggggtactctcctgcggcatataatgatcagttttaccaatatcagcggggccgaggaaattggggccaattgctatttgcttgagatggacggcaccaggattgtgcttgacagcgggatgcaccccaagaaggaggggaaggcggccatgccggattttgattccctggaacccaattccgtggaagccgtttttttaagccattcccacctggaccatctgggaacgctgcctgtgcttcaggagaaacagccagcggcggaggtgttcatgacgcccgccgcggcagccctgtctgaagtgatgctgcataattccgtgaatgtgatgagcgccaagaggctggacctgggcattgtggagtatccttttttcacccataatgatctggacagattgagcgacgcctggcatgccaagtcctgcaatgaagtgtttcgcgtgggcttccgccagaacgtgctggccacgttttacgatgccgggcacatcctggggtctgccggcgtgatgctggagggtgagagcggccataccgtattttatacgggggacgtgcagtttgaagaccagagcatgattcccggggctgattttccggaatccggcgtagatacgctggttatggagtgcacgcgcggcggtttccagcgcagcgcccactattcccggccggaagagatggtgaggttcgggaaagcgattgcggagacgctgaaacgcggcggcgccgtactgattccggtattcgccatcggcaagagccaggagatgctgttcaacattcaccgtttcaagcagcagggggtgattcccgccaatactcccgtgtacttcggcgggctgagtgcgaaagtttccctgttgtacgaccgttttgccgggttgacgcgcaggcatgaccatgaattcaagctgaaggaggagattcagaccgtgccccttccgcgcaagggaaaagctccgctggtgtgttccccggggaatatttatgtggtgtccagcggcatgatgacggaaaatacgctttccaacgtcatggcggagcaggttcttccccaggagaagaatgctattttgttcgtaggatatgcggatcccgattctccggcgggactgctgaaggcaactcctgaaggggaactggtgaaaatgaggcccaacgggcagccggtgcgccgcaagtgcaccgtggactgttttgatttttccgggcatgccacccgggactccctggttaattatgccgtgaagctgaaccccaggcaggtggttctggtgcacggggacccggatgccgtggagtggatgcaccacacgctatccgccaaaatgcctgattccaccatcgtcgttcctgagccgggacgccgctacactttcgagccatgagttttaccggagaaagaaaggggaggctgatcgtctttgaaggcattgacggcacgggcaagtccacccacatcggccacttgcgaaagtatttggaggagaaggggctggaagtggtgcagagttttgagcccacacgcggacggtggggccggatgctccgggactccgccgtgaccggacgcctttccgtagaggaggaagtagccctgttcctgaaagacaggagggaacatgtgaagatgctgattgctcccgcattggcgcggggggcatgggttctgctggatcgctactatctttccatgatggcttaccagggcgcgcgcggcatagatccggaggttatccgtgccgccaatgaagaatttgccccggtgccggatgccgtggtctggctggacattcccgtttccgtggcgctggaacgcattgggaaccgcggggaacgcgacgcttttgagacggaagcgggcctggcggcctgccgcagcgtgtttgcatccgtccatgctccctggatgctccgcatagacgcggacgccgggaaggaagaggtggcggcaagagtgcggaaggctctttccatgcgtttccccgatgtcattggggcataggcatctcctttcggccataggccggggatttttccttagcgtttcattcctggcatttggatgctattccgcaggcgcataagccgttggatccggaatcccggcttccctgaaggcttcccggcgttccatgcaggtggaacagacgccgcagtggacggctccgcccttgtagcaggaataggtgcgggaaaagtccacgcccaaatcctggcccatggcggcgatgccgcccttggacatgtggatgaaagggcgcaggatgcccaggccggcataggttcccaagcgaatggcttccgtcatggcggccatgaattcctcccggcagtccggatagatgctatggtccccggaatgggccgcaatgacgagctgctgcgccccgcagctttccgcaaccccggcggcgattgacaggaagatgccgttgcggaaggggacgacggtctgcttcatcagttcttcatcataggaaccgtccggaatatcgtccgcgccggagaggagggctgatttcaaatgggaggagatggaggaaatgtcaatcacgcggtgttctatgcccagactggcggcctgccaggcagcgcatttcagctctcgttccgcgtggttggaggcatagtcaaagctgagggccacccggacgcggtggttccggtgggcccagtgcagggctacgctggagtccaatcccccgctgagcagtacggctgtttccattttgtccatggtctggattacagggggcggttttccggattgtgttcggctgttgcggtcagctggatgccgccgcggggggagaagcggccttccaccttcagccaccgcggggaaatggcggccaccagatcatccgtgatgcggttgacgatttgttcattaaaagccggatagttgcggtaggaggccaggtagtatttgagagatttggtttccacgcacttttccgccggaacgtaggtgatcgtcaggtgacaggaatccggttgaccggtaacggggcagagggaggaaaattcatgggtgtccagcgtgatggtgtagggacgcgtgccgcggttagggaaggattccagcctggcgtcgtcgggattggtaaagaaggagctttgagagcctaatagagtcagatggtcgtcggacatggttgttgtagtatggtaatggatgttcaggtcccctggacgggggctccgccggggaattctttcacgtacaggtcctgttgagggaatgggatggaaatgccgtgttcgttgaacgcattatagatgtgttcccgcacggaggaaaggctggaggactttgtcatgacgggaacccagacccatacgcccagattgacggcactgtctccgaaactgtccagcaccacgctggttttcttgactttggaaaggaagggcagggttgccagcgtttccagaatgattttgcgcgccctttccacgtccgtcccgtaggaaatgcccacttccaccttcacgcattcgaatttgtggttgcgggtcatgttgcggaagttcttgttgaagagctgggagttctggaaggcgatgatagagccgtccagcgtttcgatcatggtggagcggtagcccagggaggagacgcggccccggtagccgtcgcattcaatcatgtcgccttggcgcaggcgacccagcattagggagaggccgctgatgatgttttcaatggtatctttcagggcgaagccgatgcccatgctcaagcctcccatgaccatcagcagcccgttgtagttggcgttcatgatgataagcgccgtaaaaacgaagagcccccagagaaaaagggtggagagtgtcacgaaggtggggatgatgcctacttcataatcttctccatagatttcatgcagcgtatttttccccaaaaatatcaagtagttgagaacaatagcaatcaggatgaccgtgatgacgctgctccagctgaaagtgagcagatccttgatttccgtggttgcgaaaatcttattgatgatgaggtcccccatgtcgaaggtggcggcgggccagatgatgctgaacaggatgaggaaaatggtcaggcagggaagcaccagcttggagatgaaggggcggaaccacaggatagccctcttgttccgttccttccggcggttttcataatggtggagcagatcccacagccccaccagcagcaggatgctggtcatcagcatgatccaggtcatcagcaccaggaaggccatgaagctgaatccagtccagcacaggacgctgcccaggatgatgaataccagagatacggtggagaaaaaacggtccagccggggcagcttgtgcctctgccgcacccaggtcagcagggagaagagggaaaccagcgtgaacaggatgggcatggaaatgtccacgatgatgttgggggccatgaacatgcgcagtagcatgaagaatcctcccaaaagcagatagggcatgtagatgcggatgccggagttaatggtgccgtacggaaggcgcgtgaccagggagaacaggatggcgctgaccagaagaaggaattccgcgcccagggaggccgcgctttccagcaggtagttcggcgtgcgcagtgaggcaatgacgagggtcagcgccacgataaggatagtggtgacgttggcgaaagcatggcgtttgttgtaatgccccgtctttttcaatgtatttcggaagcccaggaagatgatgatgcgggagaggcagtaggagcacaggataattcccagcaggataagtccgtaatgcttgagcgtttccgggtccgacggaagctggagcttgctgtctgcggatgtttcccatgcccccatgcacgtttcatacgtcttgtgcggtttgagaaagatgtaccgggccgcgtgggacggcgtgtagaagaccctgttaaacagggcggtgaacagtttggcgctttcattgttgagcgcgtctattttgccgttcaggctgctgaaaagttccttgaggtagctgatttgctccttttcactttggagggattcttccagctcctggcaggcatacagggcttcgtcccgctgaaccagggaggcttgcgacagggtgtccgtatttacttcctccagggatgacgccagctttttaatgcgttctatttccttgtccagccgttcctcctgcccctggaaatccggtttttgggcgtaatacgtcttcaccaggctggaagcggccttacagtaaaaggccagcgtaaatattttctggtcgtccagcgcgtaaagcacggcggacatttcatataccctggtgtcaaaataattataggtagcatccgcttccctcaccagcgttttccggatggccatccttttttcctcattctttttcagaatggtgatttcatggcacagagccatgattacggtatccatttccgattggtccggctgctcctgaggctgttccgccttggcttcctccgcctgttccggagcggcggcaggcggagccgcctgctgtgcagatgcagaacctgcggccagaacccccgccaggaaaaaggcggcgcagcggcggaaaaagatccggtaatcagggatgctcatgaatggtccctgttctaggggctacaggcattacggtcaaggttatatattctcctgctgacggagggtgagcttcacagaaaaaaacttttttcaacgtgaaccgtatggaaaggacagggcatcttccggcatcatttcccgaatccccggaagatgcccttccgtaaacaggaaacgcaccggagaatttccggtgcgtttgaaaagatgaatactccggcgggaatcagtccagagaaaaggaacggattctccttacggtttcctcccggcccagcagggaaaagacggaggaaaggtccgggccgccgcttaacccggtgagggccacccgggccgggaacatcacggctcccatttttacgccgttttccttggcaaaggctttcagcacgccaatgagttcatgtccatcccattccggttcctgttccagcctgtccgccagtttgaaaagcagttccagggcttccggctgaactttggagacggcttccggatccatgcccaggtcaaaaaagaaacggattttatccgggacttccgccagggtctgcaccttcgtttgcacggtggcgatggcggcgtccagaatcggggaatccggcaggccggcttttaaacagaaggggcgtgcccggagggcgaattcttccgcaggcagggcgatgatgtgctgctggttgacccaacggcatttggtgatatcgaatttggcggcggagtggttcacggcttccagagagaagcgtccgatcagctcctgaggggagaaaatttccgtatcgtccttgggagaccagcccagcagggccagaaagttcatgacgccttccggcagaaagccttcttccggataggttcccagggcggcgcccacgtcgcgcttggacattttggagccgtcctggttcaaaatcagcggcatgtgggcgaaaacagggggagtgacgccgaaagcctcaaacagctggatgtgcttgggcgtgttcatgatgtggtcttccccgcgaatgacgtgggtcatcttcatctcaatatcgtccaccacgttgacaaagtggaaaatgtaggaaccgtccgcgcggcggatagccatgtccggggtgttggaggcgtcccggtagtcgatggtgatgtctccgcaaatcaggtcatggaaggtgacgggtttggagcggtcaaagcggaaacgccaggctccttcatcctcgtacacgcggccggcgtcctggagcttcttgaaataggcgtcgtaaatatcgtttcgctggctttggaaatagggaccgcaatcgccgcccttcatgggcccctcatcccagtccagccccagccattccatgccggtgaagattgcgcgggtagcctcctccgtgttgcgggcgttatccgtatcttcaatgcggaggatgaaggttccccccatcttgcgggcaaacagccagttgaacagggcggtgcgggcgcccccgatgtgaaggtagcccgtgggggaaggtgcaaatcttgttctgacgagactcatgatgggtaagagagtaagggcctgtctgcccgcgtcaagcagatacagggggtgcatgccaaaaaacggggatgcggaagcagtggattttttaggacgttgtcggccttgcggcttgcgtggagagggcttttaggcttcatttaacgccgtgttctttttaaaacacatattccgtctgcgggagaagtggcagattaaaagggaagatgaggaaaagccctttctggagcatctggacgacctgcggaccatgttgctgaggatggctctgtgcctgaccgtcagcacaattttgtgcgccgggtttgcgtccaatctgatggacatcctgaggcgtcccgtcaaccaggtgtgggatatgtttgaagaatcccatcttccggcagggattggtctggatgcctggggtaaggccaaggaaatggcaacggccatgacgagcctgggagcttcccagcgggcattgtttctccgccaggtttccccgtcccaggcagatttgacggaggctgccctggttcttcgcggcgcgcagccgctgccggaggacaggaagcaggtttttatcagggaaggcagcccctccacggccgtgagggatctggcggaagccctgtattccaaaggagccgtgctggcagacggaacggggcggggggccctcaagatgatgagcgcgttccagcccggggaggcgtttatgctgaccatcaagctttccctgtatgccggagtggtcatttccttcccacttctgttgtacttcctgctgcaattcatcattccggggctgctggaacatgaacgcaagctgctgtacaagtgcatggctgtcggcttcggtctcttcctggccgggacgctgttctgttacttcatcgtcctcccgcgggtattgacgtttttttacacctattccctggaattcggcatctccaatgaatggcgcatcggctactacctgtccttcgccacgcagatgattttaatgttcggactggcttttgaattgcctgtggtagtgatgcccttcgtcaagctgggggtgctgacctatgacatgatgaagtccacgagacgctatgccattgtggctatcgccgtcctggccgcggtcatcacccctacgccggatgtagctaccatgatgctgatggccgttcccatgtatgcgctgtatgaaatatgcatcattctggcctgggtgcatgaacgcaaggaggccgcgcgcacccgggaggaaatcgcccggtttgaagaagatttcaacaacaataattctccctacaaccagtaaatacatccaacccacgccaatatcatgaaccttctggaaattattatcctgggcattgtggaaggcctgaccgaatatctgccggtcagctccacgggccacctgctcctgacggaatccctgctgaacatgtcccagagcaaggaagctctggatgccctggccgtctgcatccaggggggagccatcctggcggtgctgagcctgtattttccgcgggtaaaggccatggcgcagggcgtgcgcggcaataatcccgccgggctgaaactgctggtcaacctcattctggccttccttcccgccgccgtggtgggcctgtgctgcgcttcactgattaaggaatatctgttcaacacatatacggtgtcttattcatggatcgtagggggaggcgttattctggcgtattgcgcctggcgcgccagggagggccgttccaatgaaggggactccggcgcctccattgaaagcctgacgccagccaaggcgctgacggtgggcgcactccagtgcgtggccatgatccccggcaccagccggagcctgatgaccatgctgggaggcatgtttgtggggttgagcgtggaagcggccgtggagttcagctttttgctgggattgattaccctgggcgcggccacgatccatgatgcgtataaggacggagctctgatgctggaatcctttgggtgggaagcacttgccgtggggactgcggtcagctggctttccgcatggctggctgtaaaatggatggtatcctatctgcaaaggcacagtttttccgtattcggatggtaccgcatcgccattggtatcgtgacgctggttctcctgtccatggggctggtgcattgaaaaacggattccggcattcaagcaccggaaaacgtttttctccggcgaggcggttctctcccgcagcgggaagcgggttttgaacaatcccggagaaggttggccgctgcctggacgaagccatgacacagggccgttttgcatccccggaacaaaacagccctgcgatgaatagcggttcaggaaaacttatctcctgtgcgttccgtgggaattcccgggattggagggtttaggtgaaggggatggacggaatggcgcagatgaatgaggggaggacggcctgctgggtgcgctggcggaatggggcggggaagaaggccgggaaacggaagagggcctgccggggcggttgatgccggaaggccttgaagacggcagggtggaagggcggctgggacgtccgaaatccggtctggagggacgattgccttccggacggttgatgacggggcgattcgtgccgccgggacgggaaggattattggcggaagggcgagaaggccgtccgggctggttgattcccggatgatgtactggcggccgctgtaaattgccgggttttccaaagtccggccgttgattgggccgtccgggctgaggggccggcctgttgtttcccggacggaaatggtcaggcctgaagtggggtttcatcggcggttttgccatggggcggcagttatggggacggacataatgcccgcggtaatagggagccggcccccacgtgggaatatagtaattcggacggatcaggttgatggagtaaatggggcttccgaacgtgtcgtaggcataaatgggtcttcctccataatatccgtaaatggggtagccggagctgtcatacatgtacgacacgccggaacctccgctgctgtaggagcctgacacgctgaaattgtcataataaggatcgtagcagccggacaaagcgcagccgatagcggccgccagcagtgagttttttaagataacgtatgctttcatgatgacgaaacagggcggattatattttccctttgcctgaaaagcggcaaggaaaaagtacatttgtttaaaattattttgcttggaaacgcacttcctgttgtcttagactgcaaaaacgttctacgcgatgggaattcttcttcaaaataaaaaagtcggcttggctctgctgtgcgataacgccccttatacgctggccatgactctggcttcctatggcaggtccgggctgcttggctattttgacgaagcatgcgccgtttttccggaaagcgccgtcaaggtgcgggagacggccctttcccatgggctttccgcggtggccgccccggcggaaggcggttttataggagccctccatacggcggtcaacgctcttgatacggattacgtgctgctggcggaggatgactgcatgatctgggaacacctgcgcggggaaaacctggaaaagcagttgaaacgggcattggacctgctgatttccggacaggcggatatggtgcgcctgcgccatgcatggcgcggttgcacgcgctataaggccgcttatacatattcctacttttatcccgtggaacagctggccaccatgtgggtgcatgcggaaggtttgtcggaagcgccggactggattaaaagcatccggcgcttcttccaccctctccgctccaagcgttcgataggccgttgcgtttatgtagagcagaacccgcatctttgctttccccagtacattaccaagattgatgaaggctatattattgacagcgaggttttccagtggaccaaccagcctacgctcatcgcacgttccagaatcagacagattctgacgggtctggagcagatgtccggctccatcgggaaattgccgcaggattttgaacatgccgtcaatagcccgcgatggaggaacgcccatatgaacataggcgtcatcaggggaattttcacttaaatgcgtatggaagacggcggaaaagcgatgcggtatgaatgcaccagatgcggcgcgtgctgccgctgggccggggatgtgtgcattgaaacggatgaaatccgcgagatttcccgtttcctggacatggacgaacaggtttttattgacacatgctgccggttgagagccaaccggcgcggattgtccatccgggacgcggaagacggcgcctgcatgatgctgacgaaagacggctgccggatcaatcccgttaaaccccgccagtgccgggattttcccaacaaatggaatttccccggctggcgggatttgtgccgcgccagagaagtgggggaggaacgggaagcataatatggccggaatgccgcaagattcttttctgcttccggcattattccatggacggggtgaaatccggctggaatcttgcgttttttacaggaactgagccagatcccgttcaaaaccgggataggacgtattgatgcattccgcatccgtcactacggtttctccctgtgcgctgagtccggccaccaggaaactcatggcgatgcggtgatccccataactggataattccgttcccttcaggggagtgccgccgtgaacaaccatgccatcgtcaaattcttccacatccacgcccataagccggagattggccgccgtggtggcaatgcggtccgtttccttgacgcgtaattcgcgggcgtttcggacgatgaagtctccccggcccagggctcccgctacggccaggatgggtatctcgtcaatgaggttgggtatttcttccgggaggaggctggtgccgtgcagggaatccgaaccgtacacggtaatatcgccgtatggttcgccggcatcttccggagaagtgggcacgatgtccattcgcgcgcccatccgctgcagagcgctgatgacggcgttccgcgtcttgttcagccccacctggcgcaacgtcaggcgggaacccggacggctggcggcggccaccatccagaaggctgcggaggaaatatctgccgggactgtcaaatcatgggcgacggggagagccggcccgcaggttccgacggtaagtccatccacggtgcagggaacgccgaaatggcggaacaggcgttctgtatggtcacgggtgacggccggctggcgcacagtggtggttccgtccgcaaacatgcccgccaatagaatggcgcttttaacctgggcgctggccatgggaagcgcgtaggaaatggggtgcacccgcccgccgtgaatgctcagcggagcacagcccggtttggctccccgggcttcaatccgcgctcccatttgttccagcggctgcatgatgcggcccatagggcgggagctcagggaagcgtccccaaacatttccgaatcaaaggggcaggcggccagcatcccggccagcagcctcatgcccgtgccggaattaccgcagtcaatgggccgttcaggagccttggggctcatggcgacgcccgtaattcggaagcggacggggccgtatccctgccgttcttccagcacatccactttggcgcccagttgctccatggcgcgcagggtattcaggcaatcttcgctgcatagaaaattatccacttccgtcactccttccgccaggcctcccagaatggcggcgcggtgggaaatgcttttgtctccgggcacggtcagtgccccttgcagggaggaaatggaatgggaatgaaggttcatgagtttccggaagaactaccctgtatcggatgcagaatcaagccaattacgagacgggcggaggcatcagggggcattccagaatggagttgattttccgggacggtggcgtatattcatgtgcgttatcggctgcatccccctgaaaagaaggagagagcttttcaggatcaatggatcaagctggttttcataggtagtaagttggagcggccacgggagcagtcctgtggccgctttaccttgttcagggaagagggcgcccatggcttgaagaaggaagcggaaggaagaaagaaacaaaattctttccatgtctgctttgggctttaccgcgaaccgatgaaagcgtatgtagtccatgccgatcaggttcgggtggtcgctgttccggtctccgggccggagtagaggaaagtccggacatcacaaggcagcgtgtcccgtgaaagcgggagacgggaatctcccaagggttcccggacggaaagtgccacagaaaacaaaccgcccggatggggttcgcccccatgccgggcaagggtgaaaaggggaggtaagagctcaccgctccgagggtgaccaaggaggcatggtaaaccccgcgcgatgcaagacaaacaggggaagggtcgcctgcccgccggatccccgggtattagtcgcatccgttccgtgaaagcgaacgggcgcgcggaacgcctgaccgcggtccgcgtgagaaaaatgaccgcacagccggctctggccggcggacaaaatctggcttacagaacctggtcggctcctgcttttttaccatgccgttttcctcccctcttttcgggggaagagaaacatccgggaatttgtcccgttccgggggctctttggggttgcatgggcgttttaaatgtgtagaatccgtcacctaattgcaacccactatggagaagcttgtcgtacatggaggttttacgctgaggggagccgtcaatatcagcgggtccaaaaatgcctccctgcctattttggccgcatccctgctgacggatgagcctgtagtggtgcgccgggttccggatgtttccgataccaatttcatggtgcagatcatgggccagctgggagcctccgtggagcggtccagcggcaatgtgcgcgtggaagccaggaacctgcattccgaagccgcttatgaacaggtgcgcaagatgcgcgcctccatttgcctgatgggacccttgatggcccgcatgcagcggtgcgtgattcccctgccgggcggctgtgtgattggcgaccgtcctgtggatctgcatatcagggccatccaggcattgggggcacaggtgcagattgagcgcggcaacctgattattgaagctcccaaggggttgaaaggagccacggtggatttgagcggcgaccacggccccaccgttctgggaacggacaacctgatgatggccgccgtattggcggaaggcaccaccgttattgaatccgccgcctccgagccggaagtggtggatctggcgaactttttaaccaagatgggcgccaatattcaaggtgcgggaacgcgccggatcgtcattgagggagtggaaaagctccgcggctgcaaccataccgttatcccggaccgcattgaggccggcacctttatggtggcggcggccatgatgggggatggcgtgaccctgcggcgcgtgtgtgaggaacacatgactgtggtgacggatttgctccggaagtgcggccaccacgtggaattcaacgagcggggggatacggtcaccatcattgccggaaaaacgcccaaatgcggggaaatcaagacagccccgtatcccggctaccccacggacatgcaggcccagatgacagctctcttcgccaccacgccgggcatctccgtggtgaaggatactattttcccgcagcgtttcatgcactgctccgaactcaagcgcatgggggcggacatcaaggtggacaacggcaccgccgtcatttccggggtggaaacgctcagcggcgcccccgtcatggcctccgacctgcgggcatccgccgccctggtgctggcagccctgaaagcggaaggcactacggaaatccaccgcctgtaccatattgaccggggctatgaaatgattgacgaaaaactcctggccatcggcgctgcagtggaaaggctgccggatgacgacaattaacgccgttttaggtcctgattttccttcacaccgcattttttctttactgtcagggttccatatgctattcaccgaagtcctatgaacaaggctcaactgatcgaattgattcaaagcaagctgggtgctgatacgaccaagaagcacgctgaagaagctctggccgctgtgctggaatccatcaaggaaggcgtgaaggaatccggcaaggtgcagatcattggctttggtacgtttgctaccaagacccgtgaagcccgtaccggccgcaacccgaagaccggcaacacgatcaatattcccgcctccaagacggttgctttcaaggcctcttccgccttgaaggactaagacggcaactccttctcaagggagtacttttctttcagcacccccgtcctttgaggacaggggtgttttttatgtcccggtgcggatgcacacggcttgaccgggtgaacgccgccgtctagaataccgccatgtccagcagttttggtcaggtgttcagaatttctacctggggtgaatcccatgggactggggtaggcgtggtgattgatggttgtccgtccctcgtcccggtgacggaagaagacattcagcgggagctggaccggcgcaggccggggcagagcgacatcgtaaccccccgcagggaggaagaccgcgcggaaatcctttccggagtgctggacggcaaaaccttgggaacgcctatcgccatcagtgtccggaacaaggaccaccgctcttccgcctatgacgagatggccagaacgtaccggccctcccacgcggactatacatacgacgctaaatacggcattcgcgcctgggcgggcgggggccgggcctccgcacgggaaaccatcggccgtgtcgcagccggagccgtggccagggccgtgctgaagcaggctttccccgatatggaggtcgtggcctgggtggatcaggttcaccatgtgaaagcttccgtggactggggggccgtgacggcctctgccattgagagcaacatcgtccgtacggcggacccctccgctgcggaagccatgatcgctgccatcaaggaagctcgtgactccggaaactccttgggcggcgtggtcaaatgcgtggtgcgcggctgccctcccggtctgggtgatccggtctttgacaaactggacgctacgcttgcccacgccatgatgagcattcccgccaccaaggctttcgccgtgggctccggttttgaagcggcggacatgaccggtctggaacataatgaccctttttacatgcagggctgccgggtgcgtaccgccaccaaccactccggcggtattcagggcggcatctccaacggagaggacattctgatgcgcatcggcttcaagcctacggccaccttgatgattgaccagcagacggtcaacagggacggggaggatgcccggctcaagggcaggggacggcatgatgcctgcgtactgccgcgcgccgtacccattgtggaggccatggcctggctctgcctgtgcgaccactacctgcgccaacgctgccagagggctctgtaacaaccggtttcacggcttcttttcccctcattcatggattcctccctcacattttacctgattctgggcgcattgctgctgggtttcatcgtgctcggcatgctgaaggggatgattaagatgctcctgttcggcgcggcagtgctctcctccgtagccgcttacttctggctatccaaatacggtttcacctacctctctttcatcaccagcgacccgcgggaatggatggtcactgtactgtccgtcggaggcgcggcggcggtcttctttgtctttatgcacggtctcttctggttcagcgacgtcttctcctggggacggcgcatgggcttcggcggggccaagggaatcgtcacgacggtactgatggcggcagtcgtatgctgggtgggagtcatgtgcatcttcttttacggctccatggcggaaatgacccgcgcccgagaactggccctgtaccacatgaaccccaaccgcaccatttccctacctgccatttattccatcaaaaagtccatcatggacaacccccacctgagctggctggaaaaaatatctccggagcatgatccggaacggctttccctggcaaaaatgatcgcctacctggtgacgctcagtccggagctctccgaccagcggcgcacccagctggactgctatatgccccgttcccgcattaccagccgcgtgctaagcctgaaaagcctgagcgaagaccccgccatccgccttctggtgcagaagggggatatgcagggcttgtataatgatgtcaagctgacccgctttctggaagaccacgatgtccgttccgtcctgtcccaactggatgttgatcgtgtgctgggctttgtcacggaaattcgccggacggcaccagccggaaatgaatacattcccgaagccactccaattgagtgataagcgcggattttttgttccgccggagtggattcgttccttttatccgcctttaattcaagaaaaaatcagggagttatccccccccttgcgcccgaaccggaaaaagagagtttctgcttttttcaggaaaaagcgcttcctccaggcgttcgtcccggaagaagcgctcttttgaggataaggtattgcaaaccttgaaaaaacatcaggagagtttttccgcgatggcatccacccattccgggaaggtatcatcatggtctccattggaaagcactaccggcagaagcctttgcgctttcaaacgttccaggaaggaatcgaagtctttgccagcctggcagaagttttcgtaaaattcatctccaagggcaaaaacggcgtagcttacctcggacaaatcttccgaagagtccttcaattcctgatggagtgcctctgcgttggtgggaggttctccgtccccccacgtactggtgatgaccagaagcgttcccgcattcttcaactgttccaccgtcataccttccatgtcaaccacctttgcctgatggccgagcttggtcaattttgcccgtgcgtcctgggccagactctccgaattgccggtttccgttccgtagataatagtgatttccatgcgttctgatgattagtttgacaacgaaagttagattaaactaattaaacaggcaaggcaaaacagcaggacgacggctgaatttttcttccttgtttatccttcagggtaactggttttccggaaaattctccgataccatactactctcgtttgattatcaaagtattcggatgctgtggaaaggtgaagcaccagccgaaaaggcgcgcaaaacggtagtataatcccttgcggcaggaattctggctggtcatgatatcgtaaaaagccaggtcaatctggcttctggaaatgggggctccattcattttggcgtgcagcatggcgtcgtggaacagggaagggaggagcatatccggaggagtggccccccaggtgacgccgtcccagccatagccggaagtaatgctgaaacgaccgccctccgcctgcatgcgtatggatgggtcatatacgctgacggctgtccagcggccaaaatccatcctttttcttccgctgatccagctgatggcatttttagtgatgtagaaaggcttgtcttcatagagggttccttcataccagccggccacgggttccggggccgcagccggagtggagcaggattccagaaacatggttgcacatattgttgtgaacaatatgtaaatataatgtgaataagaaataaagggcatgagggaacggcgcgttatccggatagttgtttcttattggatttccagcacgatgatttccggagggcagcagaagcgcaggggaagaacgctgcatcccaaaccgcgggtaatgaggaagggggttccgttcagctgggaatagggataggaaaatttgaccttctctcgtgagatgtttgccagggccctgcctccgggaaggcatatctggcctccgtgggtatgcgcgctgatgacgaggtccgccgtgccgggagccagcagaggaaaaatgtcgggtacatgtgaaagaaggatatgcggaatatccggggaaaaacgcagaggcaattcctccggcctgattctcaggtggtagtcgtccctgacggaagagagctgcagctcacggcctccgggaaggtgcagcagcagggaatcattccacatgggcaggatgcccagcccggaaaacatgttgcgccataagttccagccgtaatactggtcatggttgccctgcacggcaaaaatgccgagaggggctttcaacatcttgaaatattcccgggccgtttccggggccatgctgctctccctcgtgtggccgttggcataatcccccagcaggaaaatcatatccggccgagcttccatgattgtttccatgtacctgtgcgccagatcgcccccgttcggacgcagatggaaatccccggcaatcgcgatacggaggggagggctttcttttctcttccactgaggcatctccatcgcagccgtgacggtttccacacgcctgggttccacctgccatgcccacatgaataaggagaagccgatcatcaatattgggacaaagatgattgccaatttgttgagaaaggggcggcgtggtcgtgacttcatgcagggcagggctcctgactgattatgaggccttttaaccaattttcaatcattcgtgtttgctaatcgggaatttgctggtatgatccgtcccgctcaaggtagggctgtccgatgactgcagctctatcttcatattaacatcctaataccatgcagtttacacacgaaatcgaacaaatgtgttgcgtcaagaaaggctgcaaccatggtccggctcctatcccgcaggaaggcaactggacgcaatccagggaaatcacggatatttccggcctgacccacggcgtgggctggtgcgctccccagcagggcacctgcaaactgacgctgaatgtcaaaaacggcatcattgaagaagcactcgtggaaaccagcggctgctccggcatgacccattccgccgccatggctgcggaaatcctgcccggcaagaccatactggaagcaatgaacacggacctcgtgtgcgacgccatcaacaccgccatgcgcgaactgttcctgcagatcgtgtacggccgcacccagagcgccttctctgaaggaggccttcccatcggcgccggtcttgaagacctcggcaaggggcttcgctcccagatcggcaccctgtacggcacccgcgccaaaggcccccgctatttggaaatggctgaaggctacattaccaagcttgccctggatgaagacggtgaaatcatcggctacgagtttgtgcgcatggggccgatgatggaaatgatcaagaagggcgtggacgccaacgaagccgtcgccaaatgcacgggcaactacggtcgtttcgacgaggccgccaaatacatcgatcctcgtcacgaatgagattgaattaaaaagagtatcttaacttcaagcactattaccattatgcctcttttcgaatcctacgaccgccgcatcaagcagatcaatgaagccctggccaaatacggcatcggctccattgaagaagcggaacaactctgcctttccaagggaatcaacccccgtgaaattgtgaacggcattcagcccatcgcgtttgaaaacgccggctgggcctatgtggtgggagccgccatcgccatcaagaagggctgcacgaaggccgccgacgccgctgaagccatcggagaaggccttcagtccttctgcattcccggctccgttgcggatgaacgcaaggtgggcctgggccacggcaacctggccgccatgctcctgcgcgatgaaacggaatgcttctgcttcctggccggtcacgaatcctttgccgccgctgaaggcgccatcggtattgcaaagtccgccaaccgcgtccgcaaacaggatctccgcgtctgcctgaacggcctcggcaaggatgccgcgtacatcatctcccgcatcaacgggttcacgtacgtgcaaaccaagtttgactatgccacgggcaagctgaacatcatccaggagaaagctttttccaagggccccaaagccgccgtgcgcgtgtacggctgcgatgacgtgcgcgaaggcgtggctgtcatgtggaatgaaggcgtggacgtttccatcaccgggaactccaccaaccccacccgcttccagcacccggtagccggcacctataagaaggaatgcaatgagaagggcaagaagtacttctccgtggcttccggcggcggcacgggccgtaccctgcacccggacaacatggcggccggtcccgcttcctacggcatgactgataccatgggccgcatgcactccgacgcccagttcgccggttcttcctccgtgcccgcccatgtggaaatgatgggcctcatcggcatgggcaacaacccgatggtcggcgcttccgtagcggtggccgtggctgttgaagaagccgccaagcagaacgcctgagcgagcagctgagcaaaaaatcgcagagccgctttcccaaatcgggaaagcggctcttttagcaattgaaagaaaaaaggggatgtctcccatttccgtctcccttttcctgcccttgtatccgcatcagcttccgatacggaatcttccatcccggtccgcccggggaggaagcccgcgcgaaggaacggatcttctggaaacggattcctgcctggcagaggccggcttgacggagcggatttccggatgggaggcagaagcgggaacaaccgtttttcccggttgcgtgctgtggggggaagggagaacaggaacggttccgacaaccgttttttgccgttcatgggccttataggcgcgttgcagggtaaaatcccgctgttctcccggtctcagggaataatccgcctttttgggagctccggctttttgcgccagaggttccacgcgacgctgcagctgagcggcggtatccagtttgccggccacccattccggattccactccggctcggatgttttaagggactgaagcaactgctccgctttcttgccgctttccagggctgccttataatccccctccttctcctgccgtgccgcgcgcgtcagggaaaggttggcttcgtaaaaagtgtctccgggattgccaagggccgttgtagccgccaggaacatgcagagcagggaacagggtagaaacttccttttcatgattgttggcacgataacatgattcctcgttttggaaaggcctttcttacggcatgttttgcgcagggccggactccgtttcccttgcggataaaggaaaggttctctattccgcaccccggagcaacttgacggaaagtccggagtgccgtatgctggacgggacctgctatatgacccggaacgagccatcatcccttccagctccgcagatggaggaagatcccagattcctgacggaacaaattgtaacctatttgggcaataagcgttccctgcttcattttctggggacggggctggaacaggtgaaaaaacgcctgggtaaggaaaggctgaaagcaggggatcttttttccggcagcggcattgtggcgcgttttctgaaacagcattcggaagacttgatcgtcaatgatctggaggaatacagccgggtcgtcaatacctgttacctgagcaacgcggaggaagtggaaaatctggagctggacagacattacagacgcctgctgcggtatatggaaacgcatgaatcccctggcttcatcacggaactgtacgctcccagaaatccggactgcatcacggcggatgaccgcgttttctatacgcgccgcaacgccgtgtacctggatacggcgaggcagaccatcaatttgcttccggcagaagtcaggccctattttatcgctcctcttctggcggaagcttccgtccacacaaacacatccggcgtattcaaaggtttttacaaagacaggaacggaatcggcaaattcgggggaacgggaggcaacgccctttcccgcattctgggagaaatttcgctgccgtttcccgtgttttcccggtttgactgccggtattccatccattgccgtgacgccaatgaactggctgccgagctgccggaaatggatgtggtgtacctggatcctccctataaccagcatccgtacggttccaattatttcatgctgaatttgctgtcttcttatgaaaagccggaggaaaccagccgagtttccggcattcccgcagattggaaacgttccacgtacaatagccgccagcatgctccggaggccctgttccggctgctggaggattgcccggccaaatttattctgctttcctacagctcggaggggttcatcaactatgaggaaatgaccggtttccttggacgcctgggccataccgttacgctggaaacgccgtacgccgcgttccggggcagccggaatttcagaaaccgtcctcagaacgtgacggaattcctgtttctggtggaacggttttaacagatgacaggaaaggcagcctccatgcaaactcatttggaacgcttcatccgttttctggccgcggaaaaaggcctgagcaccgcctaccagctttccgtgagacagacgctggaggcatttgcccggtttctggaaatggataataccggccttgcccaaacgggcatcgacacgctttcggcatttctgcggcatttgcaggaccggggcatggcccgcagctccatgcgggtggaaatggtgcatctgcgtatttttttccggtggctggccggaacgggaatactggaaaaagacccttccgtatttctggaaatgccccggcaggggttgtcgcttcctcatgtgctggatcagaaaaccgtctcaaatttgcttgaaagcattgacattcaagatattcctctgggatgtagagacagagcgcttctggagatgatttacgcctgcgggatgcgtgttagtgaaataattaattgcaaattagagagttttgataaagatgaagcttttgtccgcgtgctggggaaggggaataaaacccggctggtgcccgtagggagatccgctttggatgctttgcaaatgtatttggaaaaaggaagacccaaactggtcaggacgggaacgaaaagccacatctttctgacagtacgcggccgtccgttgacgagggagcgggttcgtcaaattctccgggaacgcgccagagccgcaggactggaacagcatgttttcccgcatatcctgcgtcattccttcgccacgcatcttctggaaaacggagcggatctgcgtattattcaggagatgctgggccatgccgatatttcaaccacccagatctatacgcatttggagcagcagcggctgaactcgattcatcaccgctttcatcccagaggatagtaacgctaattcatcattcattcccataccgcgtttttttaagtcctcccaatctatcataaccatttaaatattaaaggatggagaattattctaccgaaattgtatttggcattacatatattatgcgaagtatagtttaggcagcattctcacattctcattggacggaaaacgcgctctgtcacttgacaaatatgcaagcatttcatagctttattaaatgagtggcccttgccttgtccgtaccgttgccattttcatccttttttcatctttttcccttcttcatgccgaagatgaggaattttccgatatcatggaactggtatcggaaacggagaactgttccgccaaactggcccgtgacaaaaacgcgacggaagaacagaagaaggaagacagaaagcgcaggaaaatcggcattggagaaacggtcaccgttaccctgaactgtaaaaaaccgtttttactggaaccgaaggatcaaatccaatggaaagtgatggaaggaaaagagttgcttgaaggcggtttggaaaaaataccaaataactaccagtcgataagatttaagataaatccttacgtaaataaagaacaaatccaacagtctggaaaaattgttattaaggtggaaactgaacagggaatagccctcccccgtcctatcgaatttgacgtaatttttccaagactgcttactgcagaacatgaaactttgggcgggcaggtcaaaggtcttccagctctagcttttgactttcccaacgatggagacttcgaaccaggagcttcggctcagcttattgtttccgtccatcctttggatgtatgttttaaaggagtttgggttattgaaaaggataaaggatttgaaggttcagtcggaagcattggaggtcctcatcaagcagatagtatctggagaattaatcctgaaaattattttagttctcatgataatatagggtttcgggggactccagatgatttgaatgctattaaaggagttgactcagatgggcaacctatttacgaacattcgtatcccaatgaatttatatggaattgcctctttcgaacttataaaaatcctgattccagtaagaatggaatttcagatattgccaccgtttatcagcgttttcatataaatcgaaaagacaataaacgattttatgttaaaattcaaaaatttcttatagatccaaataaaaatgacgaatgttccgttgaacggacttctggcggcgatcatatttttaaaccctgattatataacatgatgatgaaccttcgaatgaattattttctgttttgttccgttgctctagcgtcgcctgcgaccttttcctctgttattgcattgccttcgtccgccgcttttccaacagattcgcaagaattgaaattcaacagggattctgacattggagaattaaaaaaacttcttcagcaaggagaactcgtaaaattttaccaaacagcccgtactcatatggggcagcttgagtggagtgacatcagagggggagtttccccggacaagctggatcggttattgttgatagcccggattacttccgctgctcctctgtttggagagaacgaaaatacaccgtttgaacaaatgacgccggattttgacttaaaaaatgatatttctctcaaagggaaagttatggtagatctggttatcatttccaaaatcaatctcaagcaaaaattctctgccgtgagaaagaaagaagtggggcagctttgttccatttacgcggcaacgatgctgaagatgatgaaagaagcctacattcctgatttcgagggctggaagaaagaagttatggagagaaaaacggcggtttggagcaaagagtttaacgccaggtgggagtccttcttgaaagaaagagacgagagagtggcgagaaaaaagaaggaactctccataccattcgaacagagaatgcgacggcaaaaaacggaagaggaacggataagagacagggaatttggagagaaagacgccgccttcatgcaggaagccagggaaaaatgggacaaatgtaggaatcttgccaatatattaagtatcatggaagatcgaaactccaaaatcaaatcattcctcaaagatggaggaggaggtttattacgaattttgttggacaactaccccggcaaagccaccgaagtgtttaaatacctgaagctggcgggatatgaggaaggagaaatgatggagttggttgatcgggaggagggaaaaaccgaagaaacggaatttttgtatcaaagcccgttgggaagaaagttccttaaagagaagaaacaaaagaaataattactaccagagcgcggaatcatgatatttttagtttgcaaggatattttatctttttgagattccttctctcttgccagatcacctttcatccttcataataaaaaaagcatgaatactttcgtttctctttgcctggtcgggagcctcagcctgggttccctttgttatgcgcagtacatggataacgatgccaagaagaaggtaatcaaggatttggataatttgctcgctctgaacaggtctgcagaaaccaaggtaatcaatgccgctatcagcaaactgaattccgccggcagggatcccggcgccgcatatgacctgctgattcagtccaagaagtttctgatggaaacggaaaaggagaaggacaagagccaggggaagagcgccaaaatcgcctccaattccatgaaggactggatggatcgtgaagcgaagaagtaccaggataaaaatgcccgtaaaggattaatgcttcaatatcaatggggagttctcgtcctcaaggctcgtcttaaggaaaatttaatgaacgccacctcccattccaccggaggaacagcggaggaaaccctggacgttacggagttccagaagccggccatggatttgctgaatgcctacctgtccgcctgctccgaccctgattttgtcgaaccttcctcttccaaaaacaacaatggagcagccggaagagccggcgcccgtattgcggaacaatccgtccttaatacggaagtgggggaggccctgggcatcagcagcatgtcttccaaggctttcccggattccatgaaaaaccgggatgaaatttttgacaagctgtttttcaccggataccggaagacccgcaatcttcccgccctcaggcaggcgtggaacaagagaatttccatggaagtggctctgggaaaaatcagccatgccatttcctccggcaagaaatccggcatgcaaggccgcatcgccaatg
